United States Patent Application Publication US 2018/0126003 A1 - sequence listing, part 72

SEQ ID NO: 130637 - DNA, 2664 bp, Artificial Sequence
  derived and/or modified sequence
atgggagaggctgagaagtttcattatatctactcatgtgacctagatatcaatgtgcagttgaagatcggttctctggaaggaaaaagagagcagaagtcgtataaggcagtcctggaagatcctatgctgaaattttctggattgtaccaagaaacctgctctgacctatacgtcacctgccaagtgtttgcagaggggaaacctctagccctgcctgtacgaacttcttataaggcgttctccactcggtggaactggaacgagtggttaaagttgccagtcaaataccccgacctgccaagaaacgctcaggtagcattgaccatttgggacgtgtacggccctggaaaggccgtgccagtggggggtacaacagtgtctctctttggcaagtacggcatgtttcgccagggcatgcatgatctaaaggtttggcccaacgtagaggcagacgggagtgagcccacaaagactcccggacggacctccagcaccctgtcggaggatcagatgtcacgtctcgctaagcttaccaaagcccatcggcagggccacatggtgaaagtcgactggctggacaggctgactttccgtgaaatcgagatgattaacgagagtgaaaagcggtccagcaatttcatgtacctgatggtggaatttaggtgtgtaaaatgcgatgataaagagtatggtatagtctattacgagaaagacggagacgagtctagtccaatcctgaccagcttcgaactggtcaaggtgcctgatccccagatgtcaatggagaacctggtggagagtaaacaccataaactggcccgttccctcaggtcaggcccttccgatcatgatctgaaacccaatgctgctacacgcgatcagctgaatattattgtttcctatcctcccaccaagcaactgacgtacgaagaacaagatctcgtttggaagttccggtattacctcaccaaccaggaaaaggcactcactaagttcctcaagtgcgtaaattgggatcttccacaggaagccaaacaggcactcgaattgctcgggaaatggaagcccatggatgtggaagacagcttggaactgctatcttcacattacactaacccaaccgttagaaggtacgccgttgcccgtctgaggcaggcagacgacgaagacctcctgatgtatcttcttcagctcgtgcaggccttgaagtacgagaatttcgatgacataaagaacggcctggaacccaccaagaaggacagccaaagctctgtctctgagaatgtgagcaattccggcatcaactccgcggaaattgattcctcccagatcataacttcccccctaccatctgtgtccagtcccccaccggcatcaaagacaaaagaggtgcccgacggggagaatctggagcaggatctgtgcacctttctcatctcacgggcatgtaaaaactcgactctcgctaactatctttactggtacgtaatcgtggaatgcgaagatcaggatacccagcagcgcgaccctaaaacacacgaaatgtatctgaatgtaatgcgcaggtttagccaggccctgctcaagggggacaagagcgtaagagtaatgagatccctgctagccgctcagcagacctttgttgataggctggtgcatttgatgaaggccgtccagcgggaatctgggaatcgtaaaaagaaaaatgaacggctccaagctctactcggcgataatgaaaaaatgaatctttctgatgtggaactcatccctctgccacttgaaccccaggtgaagatcagaggcattattccagagaccgccacactgtttaaatctgcactcatgccagcccagctgtttttcaagacggaggacggtggaaaatatcccgttatcttcaagcatggcgatgatctgagacaggaccaacttatactacagatcatcagcctcatggataaactgttgcgcaaggagaacttagacctgaaactgacaccatacaaggtccttgccacctctacaaaacacggattcatgcagtttattcaatccgttcccgtagcggaagtactggacacagagggcagcatccagaattttttcagaaagtacgctccgagtgaaaacggcccaaatggcatcagtgcggaggtgatggatacttacgttaagtcctgcgccggatattgcgtaatcacatacatacttggcgtaggagacaggcatcttgataatcttctactgacgaagactggcaaactgtttcatattgacttcggctacatcctaggtcgggatccaaaacccctcccaccgccaatgaaactgaataaagagatggtggagggaatgggtggtacgcagagtgagcagtatcaggagttcaggaagcagtgttatactgcattccttcacctccgcagatattcaaacctgattctgaacttgtttagcctgatggtggatgcaaatattcctgatatagcgctggagcccgataaaactgtgaagaaggtacaggataagtttaggctcgacctgtctgacgaggaagccgttcactatatgcaatcactcattgacgagtctgtacacgccctcttcgccgctgtggtggagcaaattcataagttcgcacagtactggaggaagtag

SEQ ID NO: 130638 - DNA, 9443 bp, Artificial Sequence
  derived and/or modified sequence
cgtgttgtggggctcagctggttcatttatgttgtttttcctgtacctaagttcccgctgtaggtggtacctttgcagacggtgcgatgggggaagcagagaagtttcactacatctatagttgtgacctggatatcaacgtccagcttaagataggaagcttggaagggaagagagaacaaaagagttataaagctgtcctggaagacccaatgttgaagttctcaggactatatcaagagacatgctctgatctttatgttacttgtcaagtttttgcagaagggaagcctttggccttgccagtgagaacatcctacaaagcatttagtacaagatggaactggaatgaatggctgaaactaccagtaaaataccctgacctgcccaggaatgcccaagtggccctcaccatatgggatgtgtatggtcccggaaaagcagtgcctgtaggaggaacaacggtttcgctctttggaaaatacggcatgtttcgccaagggatgcatgacttgaaagtctggcctaatgtagaagcagatggatcagaacccacaaaaactcctggcagaacaagtagcactctctcagaagatcagatgagccgtcttgccaagctcaccaaagctcatcgacaaggacacatggtgaaagtagattggctggatagattgacatttagagaaatagaaatgataaatgagagtgaaaaacgaagttctaatttcatgtacctgatggttgaatttcgatgtgtcaagtgtgatgataaggaatatggtattgtttattatgaaaaggacggtgatgaatcatctccaattttaacaagttttgaattagtgaaagttcctgacccccagatgtctatggagaatttagttgagagcaaacaccacaagcttgcccggagtttaagaagtggaccttctgaccacgatctgaaacccaatgctgccacgagagatcagttaaatattattgtgagttatccaccaaccaagcaacttacatatgaagaacaagatcttgtttggaagtttagatattatcttacgaatcaagaaaaagccttgacaaaattcttgaaatgtgttaattgggatctacctcaagaggccaaacaggccttggaacttctgggaaaatggaagccgatggatgtagaggactccttggagctgttatcctctcattacaccaacccaactgtgaggcgttatgctgttgcccggttgcgacaggccgatgatgaggatttgttgatgtacctattacaattggtccaggctctcaaatatgaaaattttgatgatataaagaatggattggaacctaccaagaaggatagtcagagttcagtgtcagaaaatgtgtcaaattctggaataaattctgcagaaatagatagctcccaaattataaccagcccccttccttcagtctcttcacctcctcctgcatcaaaaacaaaagaagttccagatggcgaaaatctggaacaagatctctgtaccttcttgatatcgagagcctgcaaaaactcaacactggctaattatttatactggtatgtgatagtggaatgtgaagatcaagatactcagcagagagatccaaagacccatgagatgtacttgaacgtaatgagaagattcagccaagcattgttgaagggtgataagtctgtcagagttatgcgttctttgctggctgcacaacagacatttgtagatcggttggtgcatctaatgaaggcagtacaacgcgaaagtggaaatcgtaagaaaaagaatgagagactacaggcattgcttggagataatgaaaagatgaatttgtcagatgtggaacttatcccgttgcctttagaaccccaagtgaaaattagaggaataattccggaaacagctacactgtttaaaagtgcccttatgcctgcacagttgttttttaagacggaagatggaggcaaatatccagttatatttaagcatggagatgatttacgtcaagatcaacttattcttcaaatcatttcactcatggacaagctgttacggaaagaaaatctggacttgaaattgacaccttataaggtgttagccaccagtacaaaacatggcttcatgcagtttatccagtcagttcctgtggctgaagttcttgatacagagggaagcattcagaacttttttagaaaatatgcaccaagtgagaatgggccaaatgggattagtgctgaggtcatggacacttacgttaaaagctgtgctggatattgcgtgatcacctatatacttggagttggagacaggcacctggataaccttttgctaacaaaaacaggcaaactcttccacatagactttggatatattttgggtcgggatccaaagcctcttcctccaccaatgaagctgaataaagaaatggtagaaggaatggggggcacacagagtgagcagtaccaagagttccgtaaacagtgttacacggctttcctccacctgcgaaggtattctaatctgattttgaacttgttttccttgatggttgatgcaaacattccagatattgcacttgaaccagataaaactgtgaaaaaggttcaggataaattccgcttagacctgtcggatgaagaggctgtgcattacatgcagagtctgattgatgagagtgtccatgctctttttgctgcagtggtggaacagattcacaagtttgcccagtactggagaaaatgaaactgggattgacccatcaagatgcttggctcaataagaaaaccacgttaggagcaacctttgtatattggagacttcagagtaaccagcaaggaagagaaatcttaatcttcaagttaccatattttccaaatattacatggtacctgagttctgcttccttggatgtcattgcttaaatatagtcttgaagggcttgttttgaaatattgtatatattttttcaaatgtatacattgttaataaattaagaaatgagaaacattcttatttatgtacatgttatgagagttctggaggaagtaatatgttgaaatagtaaaacattttagtttttgagtttaaaatgttattttttcctcttatatcttcatatcaggacagcagtaacctgaatttagattgtcacagtttacaagtttttgtttgttccttctttcctctctcttctcccactcacttttgtgtgttgtttgtttttgcctaatttacatgtttaaagttctacttaaaatttttcttcaagttttacatgtgatggctcattcttctgcagttcaagaattgcttatatttttagaagatactcattttctcttacaaataattaattttttgtaaactacagttaatagttcttctagcttgtaagtgtgtaaagtagaatatgaaaatgtggctatttagataactggccaaaaggtcatatgaccaccagttttagtattgagcataagatatttttacatattcatgtaagacaatgtaaattgtctttctgcaataaattttttggatgcaaatttagatttcaaaagctttttgatgttataaaggagttgaggaacaaaaagctctttgaaatagctcacctagacctgttaatgtaatatattctttctgaattaagcaaaattttttttgtcttttaagactagaactaatccctctagcttttttactggaactttggggaaaaagaacaaatacaaatatacaaatgatatgaacaatatggtaataatcttttgcaacttaatatgttacatagtcatatgacttggtcttggaagaaaaagaattgttttggtgctgaataaatattagaaatcaagtgacagagaagatgaaggtaaaattgtggcacagtttcagagaatgccgttaatgataacgtgttatttgtctcaaattcttagccctgggcttgcctcttcagagtggggttaccggcgagagggcaagcatgtaattaagagacactctagaggcatatggaatatagtttgtataaaacatacctgctgattagaaaaatggtaaaaatgaaaatacctttgtacatcatcttaagagagcttatatataaactaaatgggcaggctccatcgtctacctttctttttcttttcttcacatgtttatgtcttttttgttattagtcagacatttttagccctctgtatgctcattcttgtagttctatttctattgaaacttcctccaaaacttttctctgaattacccttgttgaaactgacctttcttccgtgtgaactcctacacttgcatctcctatttcaggatttggcatactttttctttaatgggctaagaaagtaaatatcttcagctttggggggcatatgatcccaatagcatcaacttaactctgctaactggaaggcaaaagtgtatcatcttactcgtctttataaactccacagcactctgcatagatatgaccatgtttataaggaactcaataaataattttgacacaaacatgaaattctagaagggcagacactgacaactagtaaggaagttgatcatgagtaactttgtattcagtgccaccttaacaagaattgtaaagaggataaacctttctaggaaggttgatgcgtgttgggtgaggaaggagcatctctcaggagggtaaacagtagctgtggttttgctgagagattttggctgtgagtgacaagcctatatcaaaaagaaaagtggcttatcaatctcagtttttattgctcaaagcaattctttactcctattttttccaaattccattgtttttactctttagagctctatcctcagagtgtagtctgcatatttctttattatcattgccatgtgacttctttggtgacaagttcagtgatatttcaagcatgatgttttgagtttgagaaatgtatttgtgaggacacatcactttaattaaaaaagtgtgagtactatggtcattaagttattcagagtgagatttctgagaggagaagagagaatgtagatggcagttattgagagtggggctataggacaaaaagaagaaaagtatggttaacattgccaaataaagggtcatacagccttgctttttgctggagttagcaaaaatcattctccatatgatagttttagatgttccccagctcatttgtattattgagttttcagctgggtatatattataataacagtcaacatgatgtaggggctcagtattacatggcagggctatactaattgcttcatatgccttatctcattattctgtgagatagaattgtctcctcattttttagttgaaataactgaagtttaaagcaattgaatcatctgcccaaggataagctgctggtgagagcagagttgggatttgaagtcgagttagaccccagtgatcacagtcttgacgattaaattcttccagctttcatttttcactgagataatggtagtgatagtactgacctctaatgtgtgcatttgtgggtatgtggtccattcagctttaatccccagaagacaaggcttattccttttcttatttttggtcatgttttatttttccattgcttttaacaggattaccaaaggcacactcagtagtcagtaaacacatttctaggaaaggtgttgtgtcatcatgccacatattcatactttccttgggttggaaaatagatcattcagtaaaaacatacaggaaaaatgaatcttgccaatgcaattgttaacctacaaccataatataccttaagtatatttttgcacataagtataacattgcgatttaaaacaataaaccagattgagattctaaggagcattttgtaagtaattactaatgtttattttagagagatcacacaacttcaaataaaaactgacatagattgaacaccttgagaataaactttagtgccaaatggaaaataattttttacaagtaaatttgaagaacaatgtgaactttctataattatatacagaaaatatactgatttgccaaaatgagtaattttgatatattaatatttcacttataagaatgcataccacctgatccaggatgggatccaggaacagaaaaagaacattaggtaaaaatgacagaaatctgaatatagtatagagtagctaaaaacaaaccaaaaaaaaaaaaaaaaaaaaaggaaaaacagaataagcctcagaagatagtgagcatcccacctgggtgaccacttagagaagctgaggtgggacccctgcatccgataagtggctgcactagaccacaggaaccagactccactgtaagaactagagtgggaatggacatgtcaaaacctcctgggaaccttattaaatgtgcacattcccaatccccactcctgagcagccaaatcaatctgcaggtgggccttgtgagttttcccaggggattccgatgcctgctagatttaaccagtagatgagatgttaagttatcctgtagtccagagattccacaggccagtgtcagggaacaggggccagggctgggaaggcataagaacagaagataaatttgaggctctgttacgctggtcatccaacccaaccaggtatctcttgttatatgctaacttcattttccctttcttgtccatagtgggaaaaaataatttttaactggctatgtagttaaaaaacctaacaaaaagcacttttctatataatgagtggtttatattaagaataggtacaatgtaaatactggtaagtgaaagttcattttgttcagtgctatgggctggtacattgcatttcaacactagttttttacttttatctaccctgagggtagataacccatattccaaaatacagtattattttcatttgctgtaacattttaagaaatatgtagtttctaaaacttcatatactttatatggaatatgaacaactttaatatgaataaatagtctagaaaaaaatttaggaaaaattgccatgaaatcatgagctaagtcaatggttattttaaaccacttaattttgagactagtatttcatacagaaaaagctaatactgatatcacacactaattgtgtataaaacactaggaatgtcaaaatagaacataagaaaatgagtctagtggacccactgcatagtgtaactttgggatgaatttaaaagaatatttaagtcacagtcaattttctgttggtctaattttaccaaataaccccctaaataagaagtctgatttatctaaaatagaagttaacatagcatcccagtattgccattctaaaactctggcatgtaaatgggagaaatggaaataagctcaaaatgggtagagtaacccatttctgcatgaaccatagaatttaactagaatttggctggctcatgcctgtaatgccagcactttgggaggccaaggcaggcagatcacttgagcccaggagtttgagaccagcccgggcaacatggtgaaactccatctcttcaaaaatatatatttgtgtgtgtgtgtgtgtgtatgtgcgtgcacaaaaattagctgagtgtggtggttcacacttgtaatcacagctacctgggaggctgaggcaggaggattgcttgagcctgggaggcagaggttgcagtgagctgagattgcaccattgcactgcagcctgggtaatagagcgagacaactctatctcaaaaaaaagaatttcactagaatttatatcttcagtgtttgcattagattgtcaccagcactatctgccttgtgactgtcaggactaatccttatatcatttatcttatgtcctttacctcagtttatgtctgtcaccacaagaaacccagacctccctaatcataccatatgccctggtcttacccacatacagctcggtacaactgcatttccccaaacctcagaactccttgggccatcactgtcagagacatttgaactagagcaactccatcttgagtagggactgggtataatgaagctgagacccactgggctgcattcccaggaagttaggcattcttagtcacaggatgagataggagattggctcaagataaggtcacaaagaccttgctgataaaacagtctgtggtaaagaagccagccaaaacccaccaaaaccaagacgggaatgaaagtgacctccggtcatcctcactgctcattatacgctagttataatgcattgacatgctaagagacactcccaccagcaccatgacagtttacaaatgccataacaacatcaggaagttaccctatatggtctaaaaaggggaggaaccctcagttctgagaatttccttgaaaattcatgaataatccaccccttgtttagcatatgatcaagaaataatcattaaaaaatagccaaccagcagctcatgctgctggtctgcctatggagtagccatcctttctttattaacctgctttcactttatggactcccctgaattcttctgcaggagatccaagaaccctctcttggagtcttaaccaggatccctttccagtaacttcagcaggatctgtgagtgccagtttccttctgtggtgcaaaactaggtgctaagtacactttttcccccctttcctctatttttaaaagaactttcagcccttttgaagtgggtacattgtctggagtacataccctggggttcattgttataggagaatttaggacacagacacacgaggagtttaggagcagaggtttaataggtagaagagaagggaaagagaaacagcttcctctatagatgtctgcactgacaccgtggctttaaggcatggcccatgatgtgtctccgagtggaaaagactggttggtggtgaatgcgccaaattttatagtccggtttgaggaggtggtttctgattggttgcatcatgtatgacgtttgcaaggtgcatgtggaaggctggtcgccccaccctaatcttatgcaaatgggctttccagttgattgggtccatcttgtgtaacacgtggctggcagagaagggaagatgaagccaccatcttgaaaatgtctagtccttagtttctgctggcattcacccatgcaagctgccagcttgtctatgtctgcagctcaactttacaggctgctctttgttagcaaatgatttggagcttcttttcattaaagaaaaaagccttaccgaggactcccatacccttgctttctgcttaagtgatttcttcttaactcctatgtcaattttatacagcatgaaataatgatgtatctataaatgagcctttgcaagattaccatttatcaaagaaaaccagtgatgtttagttaactgtttgtaaaaataaatggttagtagaatgtctaattcaataaatgtttcataaatgagtaaa

SEQ ID NO: 130639 - DNA, 942 bp, Artificial Sequence
  derived and/or modified sequence
atgctactcagcaagatcaactcccttgcccaccttcgagcggcaccctgtaatgacttacacgccacaaaactggcacccggcaaggagaaggagcccctggagtcacagtatcaggtcgggcctttgctggggtctggcggattcggatcggtttactccggtattagggtgtcagacaacctgccagtggctatcaaacatgtcgaaaaggacaggatctctgattggggcgagctccccaatggaacgcgcgtgcctatggaggttgttctactaaagaaggtgagctcagggtttagcggggtgatcaggctcttagactggttcgaacgaccagattcgttcgtgctgatactggagaggcccgaacccgtgcaggatttgtttgatttcattacagagcggggagctttacaggaagagctggcacggagcttcttctggcaagtgttagaggctgtgcgacactgtcataattgtggggtactgcatcgagatattaaagatgaaaatatactgatagatctgaatagaggagagttgaagcttatcgactttggctcaggcgctttgctcaaggataccgtgtacaccgattttgatgggacccgcgtatactcacctcccgaatggattcggtatcatagataccatggcaggagtgcagctgtatggtctttggggatcctgctctatgacatggtgtgcggcgatatcccctttgaacatgacgaagagataatccgggggcaggtgttcttcagacagcgtgtttcgagtgagtgtcagcatctgattcgctggtgcctcgcccttaggccctccgaccgtccaactttcgaagaaattcagaatcacccttggatgcaagatgtcctgcttccacaggagacagccgagatccacctacattccctgtcccctggcccctctaagtag

SEQ ID NO: 130640 - DNA, 942 bp, Artificial Sequence
  derived and/or modified sequence
atgctgctgagcaagatcaacagcctggcccacctgcgggccgccccctgcaatgacctgcacgccaccaagctggcccctgggaaggagaaggagcccctggagagccagtaccaggtgggccccctgctgggcagcggcggctttggatctgtgtacagcggcatccgggtgtctgacaacctgcctgtggccatcaagcacgtggagaaggaccgcatcagtgactggggcgagctgcccaacggcaccagggtgcccatggaggtggtgctgctgaagaaggtgagcagcggcttctctggagtcatccggctgctggactggtttgagaggccagacagctttgtgctgatcctggagaggcctgagcctgtgcaggacctgtttgacttcatcacagagcggggggccctgcaggaggagctggcccggagcttcttctggcaggtgctggaggccgtgcgccactgccacaactgtggggtgctgcaccgggacatcaaggatgagaacatcctgattgacctgaacagaggagagctgaagctgattgactttggaagtggggccctgctgaaggacacagtgtacacagactttgatggcaccagggtgtacagccccccagagtggatccgctaccaccgctaccacggccgctctgctgctgtgtggagcctgggcatcctgctgtatgacatggtgtgtggggacatcccctttgaacatgatgaggagatcatccggggccaggtgttcttccggcagagggtgtcctctgagtgccagcacctgatccgctggtgcctggccctgcggcccagcgaccggcccacctttgaggagatccagaaccacccctggatgcaggatgtgctgctgccccaggagacagctgagatccacctgcacagcctgagccctggccccagcaagtag

SEQ ID NO: 130641 - DNA, 942 bp, Artificial Sequence
  derived and/or modified sequence
atgctgctgagcaagatcaacagcctggcccacctgcgggccgccccctgtaatgatctgcacgccacgaaacttgccccaggtaaggagaaggaacccctagaatcacagtatcaggtgggtcctctgctaggaagtggaggttttggtagtgtgtactccggaatccgggtgtccgacaacctcccagtggccatcaaacacgtcgagaaagaccgtattagcgactggggagaactgcccaacggtacccgcgtacccatggaagtcgtcctcttgaagaaggtgtcctctggtttcagtggggtgattaggctgctcgactggttcgagaggcctgactccttcgtgctgatcttagagaggcctgagcctgtgcaggacctgtttgatttcataactgagcgcggcgctctacaggaggagctggcccggtcatttttctggcaggttcttgaagctgtgcgccattgtcataactgtggagtcctgcatcgggatatcaaggatgaaaatattctcattgatctgaatagaggagaactgaagctcattgactttggtagtggggccttactgaaagacaccgtgtacacggacttcgacggcacgcgggtgtatagtccgccagagtggattagataccaccgctaccacggaagatcagccgctgtgtggtccttgggaattctgctgtatgatatggtgtgcggcgatattcccttcgagcacgatgaggagatcattagaggccaggtgttcttccgccagcgcgtgtctagtgaatgtcagcacctgatccgatggtgcctggcactccggccttctgacagacccaccttcgaggaaatccagaaccacccttggatgcaggacgtattacttcctcaagaaactgccgaaatccacttacacagcctctcaccagggcctagcaaatag

SEQ ID NO: 130642 - DNA, 942 bp, Artificial Sequence
  derived and/or modified sequence
atgctactcagcaaaatcaactctcttgcacatctgcgcgcagctccatgcaatgaccttcatgccaccaaactcgcacccggaaaggagaaggaacccctggagagccagtatcaggtaggccctctcctgggctcaggcggattcggcagcgtgtatagcggaattcgggtcagtgataatttgcctgtggcgattaagcatgttgaaaaagaccggattagcgattggggcgagcttccaaacggcactagagtcccaatggaggttgttctgctcaagaaggtttcctctggattctcaggcgtgatacgcctcctggattggttcgaacggcctgacagtttcgtattgattttggagaggcctgagccagtccaagatctctttgattttatcaccgagagaggcgcactgcaggaagaactcgccagaagttttttctggcaggttctggaagctgtaaggcactgccacaattgcggcgtgctccacagggacattaaagatgagaacatcctgatcgacctaaaccgtggggaactgaagctcattgatttcggatcaggcgcactgctgaaagacacggtgtataccgattttgacggaacaagagtgtactcacctccggaatggatccgctatcaccgctaccacggaagatccgctgctgtgtggagcctgggcatcttactctacgacatggtgtgcggagacattccattcgaacacgatgaggaaattataagaggccaggtcttcttccgtcagcgcgttagctctgagtgtcagcacctcatcaggtggtgtttggcattgcgcccttctgatcgcccaacttttgaggagatacagaaccatccctggatgcaggatgttctgcttcctcaggaaaccgccgagattcacctgcactcactgagcccaggtcctagcaagtag

SEQ ID NO: 130643 - DNA, 942 bp, Artificial Sequence
  derived and/or modified sequence
atgctgctgagcaagatcaacagcctggcccacctgagagccgccccctgcaacgacctgcacgccaccaagctggcccccggcaaggagaaggagcccctggagagccagtaccaggtgggccccctgctgggcagcggcggcttcggcagcgtgtacagcggcatcagagtgagcgacaacctgcccgtggccatcaagcacgtggagaaggacagaatcagcgactggggcgagctgcccaacggcaccagagtgcccatggaggtggtgctgctgaagaaggtgagcagcggcttcagcggcgtgatcagactgctggactggttcgagagacccgacagcttcgtgctgatcctggagagacccgagcccgtgcaggacctgttcgacttcatcaccgagagaggcgccctgcaggaggagctggccagaagcttcttctggcaggtgctggaggccgtgagacactgccacaactgcggcgtgctgcacagagacatcaaggacgagaacatcctgatcgacctgaacagaggcgagctgaagctgatcgacttcggcagcggcgccctgctgaaggacaccgtgtacaccgacttcgacggcaccagagtgtacagcccccccgagtggatcagataccacagataccacggcagaagcgccgccgtgtggagcctgggcatcctgctgtacgacatggtgtgcggcgacatccccttcgagcacgacgaggagatcatcagaggccaggtgttcttcagacagagagtgagcagcgagtgccagcacctgatcagatggtgcctggccctgagacccagcgacagacccaccttcgaggagatccagaaccacccctggatgcaggacgtgctgctgccccaggagaccgccgagatccacctgcacagcctgagccccggccccagcaagtag

SEQ ID NO: 130644 - protein, 828 aa, Artificial Sequence
  derived and/or modified sequence
MRFLEARSLAVAMGDTVVEPAPLKPTSEPTSGPPGNNGGSLLSVITEGVGELSVIDPEVAQKACQEVLEKVKLLHGGVAVSSRGTPLELVNGDGVDSEIRCLDDPPAQIREEEDEMGAAVASGTAKGARRRRQNNSAKQSWLLRLFESKLFDISMAISYLYNSKEPGVQAYIGNRLFCFRNEDVDFYLPQLLNMYIHMDEDVGDAIKPYIVHRCRQSINFSLQCALLLGAYSSDMHISTQRHSRGTKLRKLILSDELKPAHRKRELPSLSPAPDTGLSPSKRTHQRSKSDATASISLSSNLKRTASNPKVENEDEELSSSTESIDNSFSSPVRLAPEREFIKSLMAIGKRLATLPTKEQKTQRLISELSLLNHKLPARVWLPTAGFDHHVVRVPHTQAVVLNSKDKAPYLIYVEVLECENFDTTSVPARIPENRIRSTRSVENLPECGITHEQRAGSFSTVPNYDNDDEAWSVDDIGELQVELPEVHTNSCDNISQFSVDSITSQESKEPVFIAAGDIRRRLSEQLAHTPTAFKRDPEDPSAVALKEPWQEKVRRIREGSPYGHLPNWRLLSVIVKCGDDLRQELLAFQVLKQLQSIWEQERVPLWIKPYKILVISADSGMIEPVVNAVSIHQVKKQSQLSLLDYFLQEHGSYTTEAFLSAQRNFVQSCAGYCLVCYLLQVKDRHNGNILLDAEGHIIHIDFGFILSSSPRNLGFETSAFKLTTEFVDVMGGLDGDMFNYYKMLMLQGLIAARKHMDKVVQIVEIMQQGSQLPCFHGSSTIRNLKERFHMSMTEEQLQLLVEQMVDGSMRSITTKLYDGFQYLTNGIM

SEQ ID NO: 130645 - protein, 816 aa, Artificial Sequence
  derived and/or modified sequence
MGDTVVEPAPLKPTSEPTSGPPGNNGGSLLSVITEGVGELSVIDPEVAQKACQEVLEKVKLLHGGVAVSSRGTPLELVNGDGVDSEIRCLDDPPAQIREEEDEMGAAVASGTAKGARRRRQNNSAKQSWLLRLFESKLFDISMAISYLYNSKEPGVQAYIGNRLFCFRNEDVDFYLPQLLNMYIHMDEDVGDAIKPYIVHRCRQSINFSLQCALLLGAYSSDMHISTQRHSRGTKLRKLILSDELKPAHRKRELPSLSPAPDTGLSPSKRTHQRSKSDATASISLSSNLKRTASNPKVENEDEELSSSTESIDNSFSSPVRLAPEREFIKSLMAIGKRLATLPTKEQKTQRLISELSLLNHKLPARVWLPTAGFDHHVVRVPHTQAVVLNSKDKAPYLIYVEVLECENFDTTSVPARIPENRIRSTRSVENLPECGITHEQRAGSFSTVPNYDNDDEAWSVDDIGELQVELPEVHTNSCDNISQFSVDSITSQESKEPVFIAAGDIRRRLSEQLAHTPTAFKRDPEDPSAVALKEPWQEKVRRIREGSPYGHLPNWRLLSVIVKCGDDLRQELLAFQVLKQLQSIWEQERVPLWIKPYKILVISADSGMIEPVVNAVSIHQVKKQSQLSLLDYFLQEHGSYTTEAFLSAQRNFVQSCAGYCLVCYLLQVKDRHNGNILLDAEGHIIHIDFGFILSSSPRNLGFETSAFKLTTEFVDVMGGLDGDMFNYYKMLMLQGLIAARKHMDKVVQIVEIMQQGSQLPCFHGSSTIRNLKERFHMSMTEEQLQLLVEQMVDGSMRSITTKLYDGFQYLTNGIM

SEQ ID NO: 130646 - protein, 281 aa, Artificial Sequence
  derived and/or modified sequence
MGDTVVEPAPLKPTSEPTSGPPGNNGGSLLSVITEGVGELSVIDPEVAQKACQEVLEKVKLLHGGVAVSSRGTPLELVNGDGVDSEIRCLDDPPAQIREEEDEMGAAVASGTAKGARRRRQNNSAKQSWLLRLFESKLFDISMAISYLYNSKEPGVQAYIGNRLFCFRNEDVDFYLPQLLNMYIHMDEDVGDAIKPYIVHRCRQSINFSLQCALLLGAYSSDMHISTQRHSRGTKLRKLILSDELKPAHRKRELPSLSPAPDTGLSPSKRTHQRSKSDATA

SEQ ID NO: 130647 - protein, 484 aa, Artificial Sequence
  derived and/or modified sequence
MAIGKRLATLPTKEQKTQRLISELSLLNHKLPARVWLPTAGFDHHVVRVPHTQAVVLNSKDKAPYLIYVEVLECENFDTTSVPARIPENRIRSTRSVENLPECGITHEQRAGSFSTVPNYDNDDEAWSVDDIGELQVELPEVHTNSCDNISQFSVDSITSQESKEPVFIAAGDIRRRLSEQLAHTPTAFKRDPEDPSAVALKEPWQEKVRRIREGSPYGHLPNWRLLSVIVKCGDDLRQELLAFQVLKQLQSIWEQERVPLWIKPYKILVISADSGMIEPVVNAVSIHQVKKQSQLSLLDYFLQEHGSYTTEAFLSAQRNFVQSCAGYCLVCYLLQVKDRHNGNILLDAEGHIIHIDFGFILSSSPRNLGFETSAFKLTTEFVDVMGGLDGDMFNYYKMLMLQGLIAARKHMDKVVQIVEIMQQGSQLPCFHGSSTIRNLKERFHMSMTEEQLQLLVEQMVDGSMRSITTKLYDGFQYLTNGIM

SEQ ID NO: 130648 - DNA, 2451 bp, Artificial Sequence
  derived and/or modified sequence
atgggcgacaccgtggtggagcccgcccccctgaagcccaccagcgagcccaccagcggcccccccggcaacaacggcggcagcctgctgagcgtgatcaccgagggcgtgggcgagctgagcgtgatcgaccccgaggtggcccagaaggcctgccaggaggtgctggagaaggtgaagctgctgcacggcggcgtggccgtgagcagcagaggcacccccctggagctggtgaacggcgacggcgtggacagcgagatcagatgcctggacgacccccccgcccagatcagagaggaggaggacgagatgggcgccgccgtggccagcggcaccgccaagggcgccagaagaagaagacagaacaacagcgccaagcagagctggctgctgagactgttcgagagcaagctgttcgacatcagcatggccatcagctacctgtacaacagcaaggagcccggcgtgcaggcctacatcggcaacagactgttctgcttcagaaacgaggacgtggacttctacctgccccagctgctgaacatgtacatccacatggacgaggacgtgggcgacgccatcaagccctacatcgtgcacagatgcagacagagcatcaacttcagcctgcagtgcgccctgctgctgggcgcctacagcagcgacatgcacatcagcacccagagacacagcagaggcaccaagctgagaaagctgatcctgagcgacgagctgaagcccgcccacagaaagagagagctgcccagcctgagccccgcccccgacaccggcctgagccccagcaagagaacccaccagagaagcaagagcgacgccaccgccagcatcagcctgagcagcaacctgaagagaaccgccagcaaccccaaggtggagaacgaggacgaggagctgagcagcagcaccgagagcatcgacaacagcttcagcagccccgtgagactggcccccgagagagagttcatcaagagcctgatggccatcggcaagagactggccaccctgcccaccaaggagcagaagacccagagactgatcagcgagctgagcctgctgaaccacaagctgcccgccagagtgtggctgcccaccgccggcttcgaccaccacgtggtgagagtgccccacacccaggccgtggtgctgaacagcaaggacaaggccccctacctgatctacgtggaggtgctggagtgcgagaacttcgacaccaccagcgtgcccgccagaatccccgagaacagaatcagaagcaccagaagcgtggagaacctgcccgagtgcggcatcacccacgagcagagagccggcagcttcagcaccgtgcccaactacgacaacgacgacgaggcctggagcgtggacgacatcggcgagctgcaggtggagctgcccgaggtgcacaccaacagctgcgacaacatcagccagttcagcgtggacagcatcaccagccaggagagcaaggagcccgtgttcatcgccgccggcgacatcagaagaagactgagcgagcagctggcccacacccccaccgccttcaagagagaccccgaggaccccagcgccgtggccctgaaggagccctggcaggagaaggtgagaagaatcagagagggcagcccctacggccacctgcccaactggagactgctgagcgtgatcgtgaagtgcggcgacgacctgagacaggagctgctggccttccaggtgctgaagcagctgcagagcatctgggagcaggagagagtgcccctgtggatcaagccctacaagatcctggtgatcagcgccgacagcggcatgatcgagcccgtggtgaacgccgtgagcatccaccaggtgaagaagcagagccagctgagcctgctggactacttcctgcaggagcacggcagctacaccaccgaggccttcctgagcgcccagagaaacttcgtgcagagctgcgccggctactgcctggtgtgctacctgctgcaggtgaaggacagacacaacggcaacatcctgctggacgccgagggccacatcatccacatcgacttcggcttcatcctgagcagcagccccagaaacctgggcttcgagaccagcgccttcaagctgaccaccgagttcgtggacgtgatgggcggcctggacggcgacatgttcaactactacaagatgctgatgctgcagggcctgatcgccgccagaaagcacatggacaaggtggtgcagatcgtggagatcatgcagcagggcagccagctgccctgcttccacggcagcagcaccatcagaaacctgaaggagagattccacatgagcatgaccgaggagcagctgcagctgctggtggagcagatggtggacggcagcatgagaagcatcaccaccaagctgtacgacggcttccagtacctgaccaacggcatcatgtag

SEQ ID NO: 130649 - DNA, 2487 bp, Artificial Sequence
  derived and/or modified sequence
atgcgtttcctcgaagcaaggagtttggccgtggccatgggcgatactgtggtggagcctgcgccactgaaacccacatcggaacctacgagcggccctccggggaacaacggtggctctctcctctcagtgatcacggagggcgtcggagagcttagtgtcattgatccggaggtagcccagaaggcttgccaggaggtattggagaaggtcaagctcttgcatggcggcgttgcagtgtcatccagagggacacctctggagctcgtgaatggcgacggtgtcgacagcgaaataaggtgtcttgacgaccccccagcgcagataagagaggaggaagacgaaatgggggcggcggttgcgtccggcaccgccaagggagctagaaggcgacggcagaataattcagccaaacagagctggctactgcggctcttcgagtctaaactgtttgatatctctatggcaatctcttacctatataattccaaggagcctggtgtgcaagcctatataggcaaccgccttttctgtttcaggaacgaggatgtggatttttacctgcctcagttattgaatatgtacatccacatggacgaagatgtgggcgacgccattaaaccttatatcgttcataggtgccgccagtcaataaacttcagcctccagtgtgctctccttttaggggcatactcttctgatatgcacatctcaacccagcggcactcgagaggaactaagctacggaagctcatcctgagcgatgagctaaaaccagcacaccgcaaacgcgaactgcccagcctttcccccgccccagacaccggactgtctccttccaaacggacacaccagagaagcaaaagcgacgcaactgcaagcatcagcctgtcatctaatttgaagaggaccgcaagtaaccccaaggttgaaaacgaggacgaggagttatcatcatcaaccgaaagcatcgataactcattctcttcaccagtacgccttgctccagaacgtgagttcattaaaagcctcatggcaattggaaaacgtctcgcaactctgcccaccaaagagcagaaaacacagcgcttaatttccgaattgtcccttctgaaccataagctgcctgcccgggtttggctgcccacagcaggattcgatcaccatgttgtccgggtcccacacacgcaggctgttgtgcttaactccaaagataaggcaccttacttgatttacgtcgaggtgttagaatgtgaaaatttcgataccacatctgtcccggctcggattcctgagaatcgaatacggagcacgcgttcagtcgaaaacctacccgagtgcggcatcacacacgagcagagggcaggttctttctccactgtgccgaactacgataacgatgacgaagcatggtcggtggatgacatcggagaactgcaagtggaactgcctgaagtgcataccaacagctgcgacaacatctctcaatttagcgtggactcaatcaccagccaggagagtaaggagcctgtcttcatcgcagccggcgatataagaagaaggctttcagaacaactggcgcacactcccacagcgttcaagcgcgacccggaggaccccagcgcggtggccttgaaagaaccgtggcaagagaaagtacgccgtattagagaggggtctccttacggacatttgcccaactggcgcttgctcagtgtaattgtgaaatgcggcgatgacctccgccaagaactgctggcatttcaggtgctgaagcagcttcagtcaatttgggagcaagagcgggtgcccctctggattaagccttataagatccttgtcatatccgccgatagtgggatgattgaacccgttgtaaacgcagtcagcatccaccaggttaagaaacagtcacaattgtcactactggattattttctccaggagcatggcagttacactactgaggctttcctgtcggcacagcgcaacttcgtgcaatcctgtgctggctactgcttagtatgctatctgctccaggttaaagacaggcacaatgggaatattcttctggacgcagagggtcacattatccatatcgattttggtttcatacttagttcatccccaagaaacctgggatttgagacgagtgccttcaaactgacaacagagttcgtcgatgtcatgggaggccttgatggtgacatgtttaattattataagatgttgatgctgcaggggctcatagccgccagaaaacacatggacaaggtcgtccagatcgtggagatcatgcaacaggggagtcagctgccatgctttcacggctcatcaaccatacgcaacctcaaggagaggttccatatgtctatgaccgaagaacagctgcagctgttggtagagcagatggtcgacggttctatgcgtagtattacaacaaagttatacgacggattccagtacctgaccaacggaataatgtag

SEQ ID NO: 130650 - DNA, 2451 bp, Artificial Sequence
  derived and/or modified sequence
atgggcgacaccgtggtggaacccgccccactgaagcctaccagcgagcctacaagcggccccccaggcaataacgggggttccttgctgtcagtaattaccgagggggtgggcgaacttagcgtaatagacccggaggtggcccaaaaggcatgccaagaggtgctggagaaggtgaaactgctgcatggtggggtagccgtgtcatccagggggacgcccttagagcttgtgaacggagatggggtcgacagcgaaatccgttgtttggacgatccccctgcccaaatccgcgaagaggaagatgagatgggcgcagccgtcgcctcgggcacagctaagggggcaaggaggaggcgccagaataacagcgcaaagcagagttggctgcttaggttatttgaatctaagctcttcgatattagcatggccatatcatatctgtacaacagcaaggagccgggtgtgcaggcctacataggcaatcgacttttctgctttcggaatgaggacgtggacttctatctgccccagctattaaatatgtacattcacatggatgaggatgtgggagatgccattaaaccgtacatcgtccacagatgtaggcagtccataaatttctccctgcagtgcgccctgcttctgggcgcctactcaagcgacatgcacatcagcacccaaagacactccaggggaacaaagctgcggaagctgattctgtcagacgagctcaagcctgcacatcgcaagcgtgagcttccctccctttccccggccccagacacggggctctcaccttcaaagaggacacaccagagatctaaaagtgacgctaccgcatcgatctcactctcctccaacctcaagcgaaccgccagcaatcccaaggtagagaacgaggacgaggagcttagcagtagcacagaatctattgacaattccttttcttctccagtgagacttgcccccgaacgagaattcatcaagtcccttatggctataggcaagagactggccacactgccgacaaaggagcagaaaactcaacgcctgatcagtgagttgtcacttcttaaccataaacttccggctcgggtctggctgcccactgccggctttgatcatcacgtcgtccgcgtcccgcacactcaggccgtcgtgcttaactctaaggataaggccccctacctgatctatgtggaagtgctcgagtgtgaaaactttgacactacctccgtgcccgccagaattcctgagaataggatcagatctacacgcagcgtggagaacttacccgagtgtggcatcacccatgagcagagggccgggagcttttcgacagtgccaaactacgataacgatgatgaggcttggagcgtcgatgatatcggcgagctgcaggtggagctccccgaagtgcataccaactcctgcgacaacatcagccagttttcagttgattcaattacttcccaggagagtaaagagccggtattcattgccgctggggatattagacgcagattatcagagcagttagcccacacgcccaccgctttcaaacgggatcccgaggacccatcggctgtggccctcaaagaaccctggcaagaaaaggtaagaaggattcgggagggcagtccttatggccatctccccaattggaggctcttgtccgtcattgtgaagtgtggcgacgatttgaggcaggaactgcttgcgtttcaggtcctgaagcagctccagagtatttgggagcaagaaagggtccctttgtggatcaaaccttataagattttggtgattagtgccgattcaggcatgattgagcctgtggtaaatgcagtgagcatacaccaagtaaaaaaacagtcacagctcagcttattggattattttctccaagaacacggctcatacacaacggaagcgtttctgtcagcacagcgcaacttcgtgcagtcttgcgccgggtactgcttggtctgctatttgctgcaggtgaaagacaggcataacgggaatatccttcttgacgccgaaggacacattatacacatagactttggattcattttgtcatcatctccgcgaaatctgggattcgagaccagcgcttttaagttgacaactgagttcgtcgatgtcatgggcggattggatggcgatatgtttaattactataagatgctaatgcttcaaggactcatcgccgcaagaaagcacatggataaggtagtccagatagtggaaatcatgcagcagggctctcagttaccttgtttccatggtagctctacgattcggaacctcaaagaacggtttcacatgtcaatgacggaggaacagcttcagcttttagtggagcagatggttgatggcagtatgcggagtatcaccaccaaactttatgatgggttccagtacctgactaacggaataatgtag

SEQ ID NO: 130651 - DNA, 2487 bp, Artificial Sequence
  derived and/or modified sequence
atgagatttttggaagcccggagcctggccgtcgctatgggggatacagtcgtcgagcccgcccctctcaagcccacttctgagcctacaagcggtcccccagggaacaatggcggatcacttctgtccgtgatcacagagggagtaggcgagctgagcgttattgaccctgaagtggcacagaaggcctgccaggaggtgctcgagaaagtgaaactgctgcacgggggggtggcagtatcgtcccggggtacgcctctggagctggtaaacggcgacggcgtcgacagcgagatacggtgtctggacgatccacctgcacaaattcgcgaggaagaggatgaaatgggggcggcagtcgctagcggcactgcaaagggcgctagacgacgccgccagaacaacagcgctaaacagtcgtggctgctacggctgttcgagtccaaattattcgacatttcaatggcgatcagttacttgtataatagcaaggagcccggggtgcaggcctacattggaaacaggcttttttgtttccggaacgaggacgtggacttttacctgccacagctgctgaacatgtatatacatatggacgaggatgttggggacgccatcaagccttacatcgttcaccggtgccgccagtctatcaacttcagtctacaatgtgccctccttctcggggcttactcttctgatatgcacatcagtacgcaacgccattcacgaggaacaaaactccgaaaactgatcctgagtgatgaactgaaaccagctcatcgtaaacgggaactgccttcacttagcccagctccggacaccggcctttcaccatccaaacggacccatcagcgttccaagagcgatgccacggcttctattagcttaagtagcaatcttaagcggaccgcaagcaaccctaaggtggagaatgaggacgaggagctctccagtagcactgagtccattgataatagcttctcgagcccggtgcgcctggctcccgaacgggagtttataaagagcctgatggccatcggaaagcggctggcaacactgccaactaaagagcagaagacacagcgacttatcagcgaactttctctgctgaatcataaactcccagccagagtgtggctgcctaccgccggctttgaccatcacgtggtgagggttcctcacacacaggcagtggttctgaattccaaggataaggcgccctatctgatctacgtagaggtgctcgagtgcgagaactttgacaccacctccgttcccgctcggatcccggaaaatcgaataagatccacacgaagtgtggagaaccttcccgaatgcggaattactcacgagcaacgcgctggaagcttttccacggtgcccaactacgacaacgatgacgaagcttggtctgtggatgatattggtgagctgcaggtcgagctcccagaggtgcacaccaactcatgtgacaacatcagccagttttcagtggatagtatcaccagccaagagtctaaggagccagtgttcatcgctgcgggggatatcagacgacgcttgtcagagcagctggcccacacgccaacagcatttaaaagagatcctgaagacccgtccgctgtcgcgctgaaggagccttggcaggagaaagttcggaggataagggagggttcgccctacggccacctgcccaactggcgactgctcagcgtgatcgtcaagtgcggagacgacctgcgacaagagctccttgccttccaggtgctgaaacagctgcagagcatctgggaacaagaacgcgttcccctgtggatcaaaccatataaaatactcgtgatctccgccgattctgggatgatagaacccgtcgttaatgctgtgtctatccaccaggtaaaaaagcagtctcagttgagcttgttggattacttcctgcaggagcatggaagctacactacggaagcatttctctccgcgcaacgtaacttcgtccagagttgcgctggatattgcctcgtctgctatctgctgcaggtgaaggaccggcacaatgggaatattctgcttgatgcagaaggacacatcatccacatagacttcgggttcatattgtcgtccagtccacgcaacctgggatttgagacctctgctttcaagctgactacagagttcgttgatgtaatgggcgggctagacggtgacatgtttaactattataaaatgcttatgctgcagggcctgattgccgctcgaaagcatatggataaggtagtgcagattgtggagattatgcagcagggaagtcaactgccctgttttcatggcagcagcaccatcaggaatctgaaagaacgattccacatgtccatgaccgaggaacaacttcagctgctcgttgaacagatggtggacggctcgatgcggtctattacaaccaaattgtatgacggattccagtacctgacaaacggaatcatgtag

SEQ ID NO: 130652 - DNA, 3340 bp, Artificial Sequence
  derived and/or modified sequence
gggcctggtgcagcctccgcggccgctgtcagggaagcgcaggcggccaatggaacccgggagcggtcgctgctgctgaggcggcagtgtcggcagtccaaccgcgactgcccgcaccccctccgcgggggtcccccagagcttggaagctcgaagtctggctgtggccatgggagatacagtagtggagcctgcccccttgaagccaacttctgagcccacttctggcccaccagggaataatggggggtccctgctaagtgtcatcacggagggggtcggggaactatcagtgattgaccctgaggtggcccagaaggcctgccaggaggtgttggagaaagtcaagcttttgcatggaggcgtggcagtctctagcagaggcaccccactggagttggtcaatggggatggtgtggacagtgagatccgttgcctagatgatccacctgcccagatcagggaggaggaagatgagatgggggccgctgtggcctcaggcacagccaaaggagcaagaagacggcggcagaacaactcagctaaacagtcttggctgctgaggctgtttgagtcaaaactgtttgacatctccatggccatttcatacctgtataactccaaggagcctggagtacaagcctacattggcaaccggctcttctgctttcgcaacgaggacgtggacttctatctgccccagttgcttaacatgtacatccacatggatgaggatgtgggtgatgccattaagccctacatagtccaccgttgccgccagagcattaacttttccctccagtgtgccctgttgcttggggcctattcttcagacatgcacatttccactcaacgacactcccgtgggaccaagctacggaagctgatcctctcagatgagctaaagccagctcacaggaagagggagctgccctccttgagcccggcccctgacacagggctgtctccctccaaaaggactcaccagcgctctaagtcagatgccactgccagcataagtctcagcagcaacctgaaacgaacagccagcaaccctaaagtggagaatgaggatgaggagctctcctccagcaccgagagtattgataattcattcagttcccctgttcgactggctcctgagagagaattcatcaagtccctgatggcgatcggcaagcggctggccacgctccccaccaaagagcagaaaacacagaggctgatctcagagctctccctgctcaaccataagctccctgcccgagtctggctgcccactgctggctttgaccaccacgtggtccgtgtaccccacacacaggctgttgtcctcaactccaaggacaaggctccctacctgatttatgtggaagtccttgaatgtgaaaactttgacaccaccagtgtccctgcccggatccccgagaaccgaattcggagtacgaggtccgtagaaaacttgcccgaatgtggtattacccatgagcagcgagctggcagcttcagcactgtgcccaactatgacaacgatgatgaggcctggtcggtggatgacataggcgagctgcaagtggagctccccgaagtgcataccaacagctgtgacaacatctcccagttctctgtggacagcatcaccagccaggagagcaaggagcctgtgttcattgcagcaggggacatccgccggcgcctttcggaacagctggctcataccccgacagccttcaaacgagacccagaagatccttctgcagttgctctcaaagagccctggcaggagaaagtacggcggatcagagagggctccccctacggccatctccccaattggcggctcctgtcagtcattgtcaagtgtggggatgaccttcggcaagagcttctggcctttcaggtgttgaagcaactgcagtccatttgggaacaggagcgagtgcccctttggatcaagccatacaagattcttgtgatttcggctgatagtggcatgattgaaccagtggtcaatgctgtgtccatccatcaggtgaagaaacagtcacagctctccttgctcgattacttcctacaggagcacggcagttacaccactgaggcattcctcagtgcacagcgcaattttgtgcaaagttgtgctgggtactgcttggtctgctacctgctgcaagtcaaggacagacacaatgggaatatccttttggacgcagaaggccacatcatccacatcgactttggcttcatcctctccagctcaccccgaaatctgggctttgagacgtcagcctttaagctgaccacagagtttgtggatgtgatgggcggcctggatggcgacatgttcaactactataagatgctgatgctgcaagggctgattgccgctcggaaacacatggacaaggtggtgcagatcgtggagatcatgcagcaaggttctcagcttccttgcttccatggctccagcaccattcgaaacctcaaagagaggttccacatgagcatgactgaggagcagctgcagctgctggtggagcagatggtggatggcagtatgcggtctatcaccaccaaactctatgacggcttccagtacctcaccaacggcatcatgtgacacgctcctcagcccaggagtggtggggggtccagggcaccctccctagagggcccttgtctgagaaaccccaaaccaggaaaccccacctacccaaccatccacccaagggaaatggaaggcaagaaacacgaaggatcatgtggtaactgcgagagcttgctgaggggtgggagagccagctgtggggtccagacttgttggggcttccctgcccctcctggtctgtgtcagtattaccaccagactgactccaggactcactgccctccagaaaacagaggtgacaaatgtgagggacactggggcctttcttctccttgtaggggtctctcagaggttctttccacaggccatcctcttattccgttctggggcccaggaagtggggaagagtaggttctcggtacttaggacttgatcctgtggttggccactggccatgctgctgcccagctctacccctcccagggacctacccctcccagggaccgacccctggcccaagctccccttgctggcgggcgctgcgtgggccctgcacttgctgaggttccccatcatgggcaaggaagggaattcccacagccctccagtgtactgagggtactggcctagccatgtggaattccctaccctgactccttccccaaacccagggaaaagagctctcaattttttatttttaatttttgtttgaaataaagtccttagttagcc

SEQ ID NO: 130653 - DNA, 3983 bp, Artificial Sequence
  derived and/or modified sequence
agattactatggaatcggtagggtcctgaccgctggggaagcaggaaagcgtatcctgggaagaaaggcttggcttggactccggagaagaatactacatcgagacctgctggggaattttattttattttattatttttttggtcttggttgtactgagggaggaagaagaggttgtgtggcccggtcgaacttgtggcagcctgaaggccccctcaggcggcgccgcgggcagccccgcagccggggcctggtgcagcctccgcggccgctgtcagggaagcgcaggcggccaatggaacccgggagcggtcgctgctgctgaggcggcagtgtcggcagtccaaccgcgactgcccgcaccccctccgcgggggtcccccagaggatcaactaaaccttgaactaagaagaaaaatgtgttgtgagcagggggagcctcagctgcctcaggccgttcaggacagaagggtgtttctgaaggccggagcaagttttgaagaagtccctatcagattacacttggttgactactccggagcagccactaagagggatgaacaggcctgcgtggaaattgaatgagattcttggaagctcgaagtctggctgtggccatgggagatacagtagtggagcctgcccccttgaagccaacttctgagcccacttctggcccaccagggaataatggggggtccctgctaagtgtcatcacggagggggtcggggaactatcagtgattgaccctgaggtggcccagaaggcctgccaggaggtgttggagaaagtcaagcttttgcatggaggcgtggcagtctctagcagaggcaccccactggagttggtcaatggggatggtgtggacagtgagatccgttgcctagatgatccacctgcccagatcagggaggaggaagatgagatgggggccgctgtggcctcaggcacagccaaaggagcaagaagacggcggcagaacaactcagctaaacagtcttggctgctgaggctgtttgagtcaaaactgtttgacatctccatggccatttcatacctgtataactccaaggagcctggagtacaagcctacattggcaaccggctcttctgctttcgcaacgaggacgtggacttctatctgccccagttgcttaacatgtacatccacatggatgaggatgtgggtgatgccattaagccctacatagtccaccgttgccgccagagcattaacttttccctccagtgtgccctgttgcttggggcctattcttcagacatgcacatttccactcaacgacactcccgtgggaccaagctacggaagctgatcctctcagatgagctaaagccagctcacaggaagagggagctgccctccttgagcccggcccctgacacagggctgtctccctccaaaaggactcaccagcgctctaagtcagatgccactgccagcataagtctcagcagcaacctgaaacgaacagccagcaaccctaaagtggagaatgaggatgaggagctctcctccagcaccgagagtattgataattcattcagttcccctgttcgactggctcctgagagagaattcatcaagtccctgatggcgatcggcaagcggctggccacgctccccaccaaagagcagaaaacacagaggctgatctcagagctctccctgctcaaccataagctccctgcccgagtctggctgcccactgctggctttgaccaccacgtggtccgtgtaccccacacacaggctgttgtcctcaactccaaggacaaggctccctacctgatttatgtggaagtccttgaatgtgaaaactttgacaccaccagtgtccctgcccggatccccgagaaccgaattcggagtacgaggtccgtagaaaacttgcccgaatgtggtattacccatgagcagcgagctggcagcttcagcactgtgcccaactatgacaacgatgatgaggcctggtcggtggatgacataggcgagctgcaagtggagctccccgaagtgcataccaacagctgtgacaacatctcccagttctctgtggacagcatcaccagccaggagagcaaggagcctgtgttcattgcagcaggggacatccgccggcgcctttcggaacagctggctcataccccgacagccttcaaacgagacccagaagatccttctgcagttgctctcaaagagccctggcaggagaaagtacggcggatcagagagggctccccctacggccatctccccaattggcggctcctgtcagtcattgtcaagtgtggggatgaccttcggcaagagcttctggcctttcaggtgttgaagcaactgcagtccatttgggaacaggagcgagtgcccctttggatcaagccatacaagattcttgtgatttcggctgatagtggcatgattgaaccagtggtcaatgctgtgtccatccatcaggtgaagaaacagtcacagctctccttgctcgattacttcctacaggagcacggcagttacaccactgaggcattcctcagtgcacagcgcaattttgtgcaaagttgtgctgggtactgcttggtctgctacctgctgcaagtcaaggacagacacaatgggaatatccttttggacgcagaaggccacatcatccacatcgactttggcttcatcctctccagctcaccccgaaatctgggctttgagacgtcagcctttaagctgaccacagagtttgtggatgtgatgggcggcctggatggcgacatgttcaactactataagatgctgatgctgcaagggctgattgccgctcggaaacacatggacaaggtggtgcagatcgtggagatcatgcagcaaggttctcagcttccttgcttccatggctccagcaccattcgaaacctcaaagagaggttccacatgagcatgactgaggagcagctgcagctgctggtggagcagatggtggatggcagtatgcggtctatcaccaccaaactctatgacggcttccagtacctcaccaacggcatcatgtgacacgctcctcagcccaggagtggtggggggtccagggcaccctccctagagggcccttgtctgagaaaccccaaaccaggaaaccccacctacccaaccatccacccaagggaaatggaaggcaagaaacacgaaggatcatgtggtaactgcgagagcttgctgaggggtgggagagccagctgtggggtccagacttgttggggcttccctgcccctcctggtctgtgtcagtattaccaccagactgactccaggactcactgccctccagaaaacagaggtgacaaatgtgagggacactggggcctttcttctccttgtaggggtctctcagaggttctttccacaggccatcctcttattccgttctggggcccaggaagtggggaagagtaggttctcggtacttaggacttgatcctgtggttggccactggccatgctgctgcccagctctacccctcccagggacctacccctcccagggaccgacccctggcccaagctccccttgctggcgggcgctgcgtgggccctgcacttgctgaggttccccatcatgggcaaggaagggaattcccacagccctccagtgtactgagggtactggcctagccatgtggaattccctaccctgactccttccccaaacccagggaaaagagctctcaattttttatttttaatttttgtttgaaataaagtccttagttagccacttgtgtcatttccaggttttctgggggagtgcagggggagatgggtgatgaggtatgaacggatgcctcagtgtccaagatacaaaaggcactacatagaagtttgctttttccctgcctgtcttggtcactaccacctcttccctgagaagggcgggccttccatgttctctcacccgcttcaactccacat

SEQ ID NO: 130654 - DNA, 2487 bp, Artificial Sequence
  derived and/or modified sequence
atgaggttcctggaggcccggagcctggccgtggccatgggagacacagtggtggagcccgcccccctgaagcccaccagcgagcccaccagcggccccccaggcaacaatggaggcagcctgctgagcgtcatcacagagggcgtgggggagctgtctgtgattgatcctgaggtggcccagaaggcctgccaggaggtgctggagaaggtgaagctgctgcatggaggagtggccgtgagcagccggggcacccccctggagctggtgaatggagatggagtggacagcgagatccgctgcctggatgatcctccagcccagatccgggaggaggaggatgagatgggcgctgctgtggccagcggcacagccaagggggccaggagaagacggcagaacaacagcgccaagcagagctggctgctgcggctgtttgagagcaagctgtttgacatctccatggccatctcctacctgtacaacagcaaggagcccggggtgcaggcctacatcggcaacagactcttctgcttcagaaatgaagatgtggacttctacctgccccagctgctgaacatgtacatccacatggatgaagatgtgggagatgccatcaagccctacatcgtgcaccgctgccggcagagcatcaacttcagcctgcagtgtgccctgctgctgggcgcctacagcagtgacatgcacatcagcacccagaggcacagccggggcaccaagctgaggaagctgatcctgagtgatgagctgaagccagcccacaggaagcgggagctgcccagcctgagccctgccccagacaccggcctgagccccagcaagaggacccaccagaggagcaagagtgatgccacagccagcatcagcctgagcagcaacctgaagaggacagccagcaaccccaaggtggagaatgaagatgaggagctgagcagcagcacagagagcattgacaacagcttcagcagccctgtgcggctggcccctgagcgggagttcatcaagagcctgatggccatcggcaagaggctggccaccctgcccaccaaggagcagaagacccagaggctcatcagcgagctgagcctgctgaaccacaagctgcctgcccgggtgtggctgcccacagctggctttgaccaccacgtggtgcgggtgccccacacccaggccgtggtgctgaacagcaaggacaaggccccctacctgatctacgtggaggtgctggagtgtgaaaattttgacaccacctctgtgcctgcccgcatccctgagaaccgcatccgcagcaccaggtctgtggagaacctgcctgaatgtggcatcacccatgagcagagagctggcagcttcagcacagtgcccaactatgacaatgatgatgaggcctggagcgtggatgacatcggggagctgcaggtggagctgcctgaggtgcacaccaacagctgtgacaacatcagccagttctctgtggacagcatcaccagccaggagagcaaggagcccgtcttcatcgctgctggggacatcagaagaaggctgtctgagcagctggcccacacccccacagccttcaagagggaccctgaggaccccagcgctgtggccctgaaggagccctggcaggagaaggtgcggcgcatccgggagggcagcccctacggccacctgcccaactggaggctgctgagcgtcatcgtgaagtgtggagatgacctgcggcaggagctgctggccttccaggtgctgaagcagctgcagagcatctgggagcaggagcgggtgcccctgtggatcaagccctacaagatcctggtgatctctgctgacagcggcatgattgagcctgtggtgaatgctgtgtccatccaccaggtgaagaagcagagccagctgagcctgctggactacttcctgcaggagcacggcagctacaccacagaggccttcctgagcgcccagaggaactttgtgcagagctgtgccggctactgcctggtgtgctacctgctgcaggtgaaggacagacacaacggcaacatcctgctggatgctgagggccacatcatccacatcgactttggcttcatcctgagcagcagccccaggaacctgggctttgagaccagcgccttcaagctgaccacagaatttgtggatgtgatgggcggcctggatggagacatgttcaactactacaagatgctgatgctgcagggcctgattgctgccaggaagcacatggacaaggtggtgcagatcgtggagatcatgcagcagggcagccagctgccctgcttccacggcagcagcaccatccggaacctgaaggagcgcttccacatgtccatgacagaggagcagctgcagctgctggtggagcagatggtggatggctccatgaggagcatcaccaccaagctgtatgatggcttccagtacctgaccaacggcatcatgtag

SEQ ID NO: 130655 - DNA, 2451 bp, Artificial Sequence
  derived and/or modified sequence
atgggagacacagtggtggagcccgcccccctgaagcccaccagcgagcccaccagcggccccccaggcaacaatggaggcagcctgctgagcgtcatcacagagggcgtgggggagctgtctgtgattgatcctgaggtggcccagaaggcctgccaggaggtgctggagaaggtgaagctgctgcatggaggagtggccgtgagcagccggggcacccccctggagctggtgaatggagatggagtggacagcgagatccgctgcctggatgatcctccagcccagatccgggaggaggaggatgagatgggcgctgctgtggccagcggcacagccaagggggccaggagaagacggcagaacaacagcgccaagcagagctggctgctgcggctgtttgagagcaagctgtttgacatctccatggccatctcctacctgtacaacagcaaggagcccggggtgcaggcctacatcggcaacagactcttctgcttcagaaatgaagatgtggacttctacctgccccagctgctgaacatgtacatccacatggatgaagatgtgggagatgccatcaagccctacatcgtgcaccgctgccggcagagcatcaacttcagcctgcagtgtgccctgctgctgggcgcctacagcagtgacatgcacatcagcacccagaggcacagccggggcaccaagctgaggaagctgatcctgagtgatgagctgaagccagcccacaggaagcgggagctgcccagcctgagccctgccccagacaccggcctgagccccagcaagaggacccaccagaggagcaagagtgatgccacagccagcatcagcctgagcagcaacctgaagaggacagccagcaaccccaaggtggagaatgaagatgaggagctgagcagcagcacagagagcattgacaacagcttcagcagccctgtgcggctggcccctgagcgggagttcatcaagagcctgatggccatcggcaagaggctggccaccctgcccaccaaggagcagaagacccagaggctcatcagcgagctgagcctgctgaaccacaagctgcctgcccgggtgtggctgcccacagctggctttgaccaccacgtggtgcgggtgccccacacccaggccgtggtgctgaacagcaaggacaaggccccctacctgatctacgtggaggtgctggagtgtgaaaattttgacaccacctctgtgcctgcccgcatccctgagaaccgcatccgcagcaccaggtctgtggagaacctgcctgaatgtggcatcacccatgagcagagagctggcagcttcagcacagtgcccaactatgacaatgatgatgaggcctggagcgtggatgacatcggggagctgcaggtggagctgcctgaggtgcacaccaacagctgtgacaacatcagccagttctctgtggacagcatcaccagccaggagagcaaggagcccgtcttcatcgctgctggggacatcagaagaaggctgtctgagcagctggcccacacccccacagccttcaagagggaccctgaggaccccagcgctgtggccctgaaggagccctggcaggagaaggtgcggcgcatccgggagggcagcccctacggccacctgcccaactggaggctgctgagcgtcatcgtgaagtgtggagatgacctgcggcaggagctgctggccttccaggtgctgaagcagctgcagagcatctgggagcaggagcgggtgcccctgtggatcaagccctacaagatcctggtgatctctgctgacagcggcatgattgagcctgtggtgaatgctgtgtccatccaccaggtgaagaagcagagccagctgagcctgctggactacttcctgcaggagcacggcagctacaccacagaggccttcctgagcgcccagaggaactttgtgcagagctgtgccggctactgcctggtgtgctacctgctgcaggtgaaggacagacacaacggcaacatcctgctggatgctgagggccacatcatccacatcgactttggcttcatcctgagcagcagccccaggaacctgggctttgagaccagcgccttcaagctgaccacagaatttgtggatgtgatgggcggcctggatggagacatgttcaactactacaagatgctgatgctgcagggcctgattgctgccaggaagcacatggacaaggtggtgcagatcgtggagatcatgcagcagggcagccagctgccctgcttccacggcagcagcaccatccggaacctgaaggagcgcttccacatgtccatgacagaggagcagctgcagctgctggtggagcagatggtggatggctccatgaggagcatcaccaccaagctgtatgatggcttccagtacctgaccaacggcatcatgtag

SEQ ID NO: 130656 - DNA, 2487 bp, Artificial Sequence
  derived and/or modified sequence
atgcggttcctggaggcccggagcctggccgtggccatgggcgacaccgtcgtcgaacccgccccgcttaaaccaacctcggagcccacatcaggaccaccaggcaataacggggggagtctgctttcagttattaccgaaggggttggagagctatccgtcattgatcctgaggtagcccaaaaggcctgccaggaagttctcgagaaggttaaacttctgcacggaggtgtcgcagtgagttcaagaggcactccgcttgagctggtcaatggtgacggggtcgactcggagatcaggtgtctagatgacccgccagcccagataagagaggaggaagacgagatgggcgcagctgtcgcctccggaactgctaagggggcccgccggagaaggcagaataactctgccaagcagagctggctgctgcgtctttttgagtcaaaactgttcgatatctcaatggccatttcctacctgtataactcaaaggaacccggtgtgcaggcctacatcgggaatcgactgttctgtttcaggaacgaggacgttgacttctatttgccacagctgctgaacatgtacattcacatggatgaggacgtcggcgacgcaatcaagccatacattgtacatagatgcaggcagagtattaacttcagcttgcagtgcgccttgctattgggagcttactcttccgacatgcacatttcgacacagaggcactcacgaggcacaaagctccggaaattaatactgtctgacgaactcaagcccgcccaccgaaagcgcgaattaccctcactatcaccagccccagacacaggcctatccccgagcaaacgcactcaccagaggagcaaatctgatgctaccgctagtataagtctctcatctaacctcaagcgaactgcctcaaacccaaaggtagagaatgaggacgaagaactgtcaagctctacagaatctattgataactccttcagctccccggttcgactggcacccgagcgagagttcattaagagcctgatggccatcggaaagcgtctggctaccctgccgaccaaggaacagaagacacagagactcatctccgagttgtcacttctcaatcacaaattaccagcacgagtgtggttgccaaccgccggattcgaccaccacgttgtccgtgtgccccacacacaggccgtcgtacttaactccaaggacaaggctccatatctgatttatgtggaggtgctggagtgcgagaactttgacacaaccagcgttcccgctcgcatcccagaaaacaggatccggagcaccagaagcgtcgagaatctgcccgaatgcggaatcacacatgagcaacgcgctggaagtttcagtacggtgcccaactatgacaacgatgacgaggcttggagtgtggatgacataggggagcttcaagtggagctgcccgaggtccacactaatagctgtgacaatatctcccaattcagcgttgattccattaccagtcaagagtccaaggagcccgtctttattgctgcgggcgatattaggcgtaggcttagtgaacaacttgcccacacccctacagcttttaagagggacccggaggacccttcagcagtcgcattaaaggagccatggcaagaaaaggtgaggcgcattcgggaaggctcgccgtacgggcatctgcccaactggcgcctactctcagtgattgtgaaatgcggcgacgatctgcgccaggagcttctagcttttcaggtactgaaacagttgcagtcaatctgggagcaggagcgcgtgccactttggatcaaaccttataagatacttgtcattagtgccgattctggcatgattgagccggtcgttaacgctgtgtccattcaccaggtgaagaagcagagtcagctctcactcctagattattttctacaggagcatggaagctacacaacagaggcttttctgtctgcccagaggaacttcgtacaatcatgtgcaggatactgtcttgtctgttatcttttgcaggtcaaggacaggcataacgggaatatcctgctggacgccgagggacatatcatccacattgattttggattcatactgagctctagtcctcggaatcttggctttgaaacttccgcattcaagttgactaccgaattcgtagatgttatgggagggctggatggggacatgttcaattactataaaatgctcatgctccagggcctcattgccgctcgcaagcacatggacaaagtcgtgcaaatcgtggaaattatgcagcagggatctcagcttccatgcttccacggctcatccaccatccggaaccttaaagaacgcttccacatgtccatgacggaagagcagctgcaactcctggtggagcagatggtcgatgggagcatgcgtagtattacgaccaaactgtacgacggctttcaatacttaaccaatggcatcatgtag

SEQ ID NO: 130657 - DNA, 2451 bp, Artificial Sequence
  derived and/or modified sequence
atgggcgacaccgtggtggagcccgcccccctgaagcccaccagcgagcccacatccgggccgcctggaaacaacggtggctctcttctgagcgtgataacagagggcgtgggggagcttagtgtgatagatcctgaagtggctcagaaggcctgccaggaagtgctggaaaaggtgaaactgttgcacggaggggtggcagtcagctcacggggaaccccccttgagctcgttaacggagacggggtggactcagaaattcgctgcttggacgatccaccagcacagatcagggaggaggaggatgagatgggtgccgctgtggcttcaggcacagcaaagggggcacggcgtcgccgccagaacaactccgccaagcagtcctggctgctgagactgttcgagtccaaactgttcgatattagtatggctatcagctatctttataactctaaagagccgggcgtccaggcatatataggtaacagactcttctgtttccgaaatgaggatgtggacttttacctgcctcaattactaaatatgtacatccacatggacgaggatgtgggtgatgcaatcaaaccgtacattgtccatcggtgccgccaatcaattaatttcagtctccagtgcgccctgctgctgggggcctatagttccgatatgcatatctccactcagcgacactcgagaggaaccaagctcaggaagctcatcctgagcgacgaattgaagccagcccaccgcaagcgcgagcttccaagcctctcgcccgctcccgacaccggcctctctccttctaagagaactcatcaaagatcaaagtctgacgcgacggcatccatttcccttagtagtaacctgaagcgaacggcgtcaaaccccaaagtggaaaacgaggatgaagagctgtcttcttccactgaatccattgataactctttttcgtctccggtgcgcttggctccagaaagggaattcatcaagtctctgatggcgattggaaaacggctagctactctaccaactaaggagcaaaagacccagcggttgattagcgaactttcgctcctgaatcataaactgcccgccagggtgtggctcccaaccgccggatttgaccaccatgtggttagggtgccccacacccaggccgtggttctgaacagtaaggacaaggcgccatacctgatatatgttgaagtcttagagtgcgaaaacttcgacacaacatctgtgcccgctaggatccctgagaaccggataagaagcacacgctccgtggaaaatttacccgagtgtggcatcactcatgaacagcgagcaggaagctttagcacagtacctaattacgacaatgacgatgaagcctggagcgtggatgatatcggagagttacaagtagagcttccagaagtccacaccaactcttgcgacaacataagccagttttctgtggacagtatcacatcccaagaatcgaaagagccagtgttcattgcggccggagatatcagacggaggctctcagaacagctcgcgcacacacccaccgcattcaagagggacccagaagacccttctgccgtcgccctcaaagagccctggcaagaaaaggtgcgtagaatccgggagggttcaccatacgggcacctgcctaactggagactcttgtctgttatagtcaaatgcggcgacgaccttcgacaggaactgcttgctttccaagtcttgaaacagctgcagagtatttgggagcaggaaagagtgcccctatggattaaaccatataagatcctagtgatctctgccgactccggcatgattgagcccgtggtgaacgccgtgtctattcaccaagtgaagaagcagtcgcaactttctttgctggactacttcctacaggagcatggatcttacactaccgaagctttcctgtccgcccagcgtaattttgttcaaagttgtgccgggtactgcctcgtctgttacctgctgcaggttaaggacagacacaacggcaacatcctcctcgacgctgagggacacatcatccatatcgactttggttttattctgtcaagcagcccaagaaacttggggtttgagacttccgccttcaaactgacaactgagttcgtagacgtaatgggggggctcgacggcgatatgtttaactactataagatgctgatgttacagggcctgattgctgcgcgcaaacacatggacaaggtcgtgcagattgtggagattatgcagcagggttcccaattaccatgctttcatggatcatcgacaatcaggaaccttaaagagcgctttcatatgagtatgacggaagagcaacttcagttacttgttgagcagatggtggacggctcgatgcgcagtataacaactaagctgtatgatgggttccagtatctgacgaacggcatcatgtag

SEQ ID NO: 130658 - DNA, 2487 bp, Artificial Sequence
  derived and/or modified sequence
atgcggttcctggaggcccggagcctggccgtggccatgggcgacaccgtggtggagcctgcccctctgaaacccacctctgaaccaacctcagggccgccaggcaacaatggaggctcgttactgtctgtgattacggagggggtgggcgaattatctgtgatcgatccagaggtcgcacagaaagcctgccaggaggtccttgagaaggttaagcttctgcacggcggagtcgccgtttccagcagaggtacacctttagagttggtcaatggggacggagtggacagcgagattcggtgtctggacgacccacctgctcagattcgcgaggaggaggatgaaatgggcgcagctgtggcctccggaaccgctaaaggtgcgcggcggcgcagacaaaataactcagccaaacagtcatggctgctcaggctattcgaatcaaaattgttcgatatttccatggctatatcttatctgtacaactccaaggagcccggtgtgcaggcctatatcggcaataggcttttttgtttcagaaatgaagacgtggacttttatctcccacagttactgaatatgtatattcacatggacgaggacgtcggggatgccataaaaccttatatcgtgcatcggtgtcgacagagtataaacttttcgctgcagtgtgctctcctgctgggagcctatagctcggacatgcacatcagtacacagaggcactctaggggcaccaagctgcggaaactcatcctgtctgatgagctgaagcccgcccaccgaaagcgtgaactcccatcactatctcctgccccggataccggcctatcccccagcaaaagaacccatcaaagatccaagagtgacgctaccgcctccattagcctcagctcgaacctcaaacgtactgcttccaatcctaaagtggaaaatgaggacgaagagctgtcctcttcaaccgaaagcatagacaatagcttcagtagccctgtacggttagctcctgagcgtgaatttatcaagagcctgatggcgatcggaaagcgcctcgcaacgctgcccaccaaggaacagaaaactcagcgcttgatatctgagttgagtctgctgaatcataagcttcccgcccgtgtctggctgcctaccgccgggtttgaccaccacgtggtacgtgtcccgcacacccaggctgttgtcttgaacagcaaagacaaagctccttacctcatctacgtggaagtattagaatgtgaaaatttcgatactacttcggtcccggcgcgcatacctgaaaaccgtattaggtcaactagatcggtagaaaacctgcctgagtgtgggattacacacgagcagagagccggatcattcagcacagttcctaactatgataatgacgacgaagcctggtctgttgatgacatcggagaactacaagtggaattgccggaggtacacactaactcctgcgataatatttctcagtttagtgtagactccattacaagccaggaaagcaaagagcctgtttttatcgcagcaggcgacattcggaggaggctctctgaacagctggcacacacccctacagcattcaaacgagacccagaggacccctctgcagtggcactgaaggagccttggcaagaaaaggtgaggagaatccgggagggcagcccctacggccatcttcccaactggcggctcctctcggtcatagtcaagtgcggagacgatttacgtcaggagttgctggccttccaggttctcaagcaactgcagagcatctgggaacaagagcgagtgcccctctggatcaagccatacaagatactggtgatatccgcagactcaggaatgatcgaaccggttgttaatgccgtgagtatccaccaggtgaagaagcaaagccagctgtcacttctggactacttccttcaggaacacggctcttacaccaccgaggcattcctcagtgctcagcgtaacttcgtgcaaagctgcgctggctattgtctggtctgctatctgcttcaggtgaaggacagacataacggtaacatcctgctggacgccgaaggacacattattcacattgacttcggttttattctcagctcttctcctagaaacttgggtttcgaaacgagtgcattcaaactgacgacagagttcgtggacgtcatgggaggcctggatggagacatgttcaattattacaagatgcttatgctgcaaggattaatcgctgcaagaaaacatatggataaggtggtccagatcgtcgaaatcatgcagcaggggtcacagctgccttgttttcatgggtcctccacaatacgaaatctcaaagagagatttcatatgagtatgactgaggagcaattgcaactgctcgtggagcaaatggtggacggctcgatgcgctcgatcaccaccaaactctatgacgggtttcagtatctgacaaatggcataatgtag

SEQ ID NO: 130659 - DNA, 2487 bp, Artificial Sequence
  derived and/or modified sequence
atgcgttttcttgaggcgagatccctggctgtggcaatgggtgatactgttgtggaaccagctcctctgaagcctacttctgagcctacaagcggccctccaggaaacaatggcggttctctgctgagcgtaatcactgaaggcgtcggtgagctgtctgtgattgaccccgaggtggctcaaaaagcctgccaagaagtcctggagaaagtgaagcttctccacggtggggtagctgtatcatcaagggggacccctctggagctggtcaacggtgacggcgttgactccgaaatccgatgcctcgatgatcctcccgcacaaatccgggaagaggaagatgagatgggagccgcagtggcttccgggactgccaaaggagctcgacgacgccgtcagaacaactcggccaagcaaagttggttgctgcgcctgttcgagtctaagctttttgacatatcaatggccatatcatacttgtacaatagtaaggaacctggcgtgcaggcttacattggtaacagactgttctgtttcaggaatgaggacgtggatttctacctgccccaactgctgaacatgtatatccacatggacgaagatgtcggagacgctattaaaccatatattgtgcaccgctgcaggcagtccataaactttagcctgcagtgtgcactgttattaggtgcctattcttcagacatgcatatttccactcagcgccactcccggggtacgaagcttcgtaagctgatcctttcagacgagttaaagccagctcaccgcaaacgcgaactccctagcctgagccctgccccagatacaggtctcagcccgagcaagcgaacgcaccagcgttccaaaagcgatgccaccgcgtccatcagcctgagctccaacctgaagcggactgctagtaatcctaaagtcgagaacgaggatgaggagttgtcctcttctacagagtcgatcgacaatagcttctccagccccgttagattagctccggagagggaattcatcaaaagcctaatggccatcggcaaacggctggctacattgcccaccaaggaacagaaaacgcagagacttatttctgagctgagtctgctgaaccacaaattacccgctcgagtatggctgccaacagccggatttgatcatcacgtcgttcgggtacctcacacacaggctgttgttctgaactctaaagataaggctccgtacctcatttacgtggaggtcttggagtgcgaaaactttgacactaccagcgttccagcaaggatcccggaaaatcgcattagatccacccgatccgtggaaaacctgccagagtgcggaatcacccacgaacagagggccggatccttttcaactgtgccaaactacgataatgatgacgaggcttggtccgtggatgacattggagaactgcaggtagagcttccagaagtccacacaaattcatgcgataacatctctcaattttctgtcgattccatcactagccaggagagcaaagagcctgtgttcatagctgcaggcgatatcaggagacggcttagcgaacagctcgcccacacgcccaccgcgttcaagagagatccagaggatcctagcgccgtcgccctcaaggagccctggcaggagaaggtgcggcgtattcgagaaggctcaccttatgggcatttgcccaactggcgactgctcagtgttatcgttaaatgtggcgatgacctgaggcaggaacttctggcgtttcaggtgctgaagcagctccagtccatctgggagcaagagcgggtaccactttggattaaaccctataagatcctggtgatttccgccgacagtgggatgatcgagcccgttgtcaacgccgtgtccatacaccaggtaaaaaagcaaagtcagctgtccctcctggactactttctccaagaacatggatcgtacactactgaggcctttttgtccgcccagaggaacttcgtgcagtcatgtgctggatactgcttggtgtgttacctcctgcaggtgaaagatcgtcacaacggaaatatcttactcgacgccgaaggtcatatcattcatatcgattttggcttcattctgagtagttcccctcgtaatctggggtttgagacttctgctttcaagttgacgactgagttcgtcgatgtgatgggaggtctggatggagatatgttcaactattacaaaatgttgatgctgcaggggctcatcgctgcgaggaaacatatggacaaagtggtacagatagtagagattatgcagcagggatcccagctgccctgcttccacggttcttccacaatcaggaaccttaaagagcgcttccacatgtctatgaccgaagagcaactccaacttcttgtggagcaaatggtcgacggaagcatgcgttccattacgaccaaactctacgatgggttccaatatctaacaaatggtataatgtag

SEQ ID NO: 130660 - DNA, 2451 bp, Artificial Sequence
  derived and/or modified sequence
atgggtgacactgtcgttgagccagcacctcttaaacccacatccgaaccaacctctggaccccctgggaataatgggggaagtctactttctgtaatcaccgaaggggtgggagagctgtcggtaatcgacccagaagtcgctcagaaggcctgccaggaagtgctagaaaaagtaaagttgcttcatggcggtgttgctgtgtcatcgagaggcacacctctagaacttgttaacggcgatggggtggattccgagataagatgccttgacgacccccctgcccaaattagagaagaagaggatgaaatgggtgcggcagtggcctccggcactgcgaagggggcacgccgtcgacgccaaaataacagcgctaagcagtcatggctgttgcgcctgtttgaatcaaaactgtttgacatttccatggctatcagctacctgtacaacagcaaagagcctggagttcaggcatacatagggaatcgactattctgctttcgaaacgaagacgttgatttttacttacctcagttactgaacatgtatatacatatggacgaagatgtaggggatgcaattaagccctacattgtacaccgctgtcgacagagtatcaactttagtctgcagtgtgccctgctgctgggcgcatattctagtgacatgcacataagcacccaacgtcactcaagaggcactaagctcagaaagcttatcttgtctgatgagttaaaacctgcccaccgtaaacgcgagttacccagtctttctcctgccccagacactggcctgtctccgtcgaaacgcacccaccagcggagtaagtcagacgctacagcctctatctctctgagtagcaatttgaagcgcaccgcgagcaatcccaaagtggagaatgaagatgaagaacttagctctagcactgagtccattgacaactctttcagtagtcccgtgcggctggcaccggagcgggagttcatcaagagtctgatggccattggaaagcggctagcaactctccccactaaggaacaaaagactcagcggttgatatcagaattgtcactgcttaaccacaagcttccagcacgagtgtggttgccgacagcgggatttgatcaccacgtggttagggtgcctcatacccaggccgttgtgctgaattccaaggataaggcaccttacctcatttacgtggaggtcctcgagtgcgagaacttcgacacaacctcagtccctgcccgaatccccgagaaccgaatccgctccaccagaagcgtcgagaacctgcctgaatgcggaatcacacacgaacagagagctggctcatttagcactgtgcctaactacgataatgatgatgaagcctggtcagtcgacgacataggcgaacttcaggtggaattgccagaggtgcatacaaattcctgcgacaacatcagccagtttagtgtggattctatcacgtctcaggagtctaaagagcctgtgttcattgccgcaggcgacatcagaaggagacttagcgaacaactcgcgcacacacccacagccttcaagcgagacccagaagaccccagcgccgtggccttgaaggaaccttggcaggagaaggtacggagaatacgggagggctctccgtacggccacctgcccaattggcgcctgctcagcgtcatcgtcaagtgcggcgatgatctaagacaggaacttctggcattccaggtgctcaagcagctccagtctatttgggaacaggaacgggtacccctatggatcaaaccttataagattctcgtaattagcgctgactccggtatgatcgaacctgttgtcaatgcagtttcgatacatcaggtgaagaaacagtcccagctgagtctccttgattatttcttgcaggagcacggcagctacaccaccgaggccttcctgtctgcccagagaaatttcgtgcagtcttgtgcgggatattgcctcgtctgttatcttttgcaggttaaagaccgacataatggtaatatactcctggatgccgagggccacataatccatatcgattttggcttcatcctgagttcatctccacgcaatctgggattcgaaacatctgcttttaagttgactaccgaattcgtagacgttatgggcggactggatggcgatatgttcaattactacaagatgctgatgctccagggtctgatcgccgctcggaagcatatggataaagtagtccagattgtggagatcatgcagcagggtagccagctgccctgttttcacggaagctcgactatccgaaatctgaaggagcgcttccatatgtcgatgacagaggaacagctgcagttgttagtggaacagatggtagatgggtccatgcggtccatcaccaccaagctgtacgacggattccagtatctcactaacggcatcatgtag

SEQ ID NO: 130661 - DNA, 2487 bp, Artificial Sequence
  derived and/or modified sequence
atgcgcttcctggaggccaggagcttggctgtggccatgggcgacaccgtggtggagccggctcccttaaagcccacttcagagccaacgagtggtccaccgggaaataacggtggcagtctgctgagcgttatcacggaaggcgtgggggagttgtcagtaattgatccagaggtcgcccagaaggcatgtcaggaggtgcttgagaaggtgaaactgttacatggcggagtcgctgtgtccagtcggggtacccctctggaactcgtcaatggggacggagtggactcagagatccgctgtttggacgacccacccgctcagattcgggaggaggaagacgagatgggggcagccgtggcaagtggtactgccaaaggcgctaggcgcagaagacagaacaattctgccaaacagtcttggcttctgcgattgttcgagtctaagctgtttgacatcagcatggctatcagctatctgtacaatagcaaagaacccggtgttcaagcatatatcggcaacaggctgttctgctttcggaacgaggacgtcgacttttacctgccccagcttctcaacatgtacatacatatggatgaagatgtgggcgacgccatcaaaccatatattgttcaccggtgccggcagtctataaacttcagcctccaatgcgctctccttttgggtgcttatagctccgatatgcacatctctactcaacgccattcacgaggtacaaagcttcgcaagcttatattgagcgacgagctgaaacccgcacaccgaaagcgggaattgccatctttgagccctgcgcctgacactgggctgagccccagcaagaggacccatcagaggagcaaatctgatgccacagccagcatcagcctctcctcaaacctcaaacgcactgcctctaacccaaaggtagaaaacgaggatgaggaactgtcatcctccacagagagcattgataattcattcagtagcccagtacgtctggcgccagagcgcgagttcattaagtccctgatggccattggcaagagactcgcgacactgcctactaaggaacaaaaaacccagagacttataagtgagttgtccctcctgaaccacaaactgccagcaagggtgtggctgccaacagcaggttttgatcatcatgttgtgcgagtgccccacacccaggccgtggttctgaattcaaaagataaagccccatatctgatttacgtggaggtcctggaatgcgagaactttgacactacttccgtacccgcaagaattcccgagaaccggattagaagcactcggtccgtcgagaaccttcctgagtgcgggattacccatgaacaacgcgcaggctcgttctcgaccgtgcccaattatgataacgacgacgaggcgtggtcagtagatgacatcggcgaactccaagtggagctgcctgaggttcataccaacagctgtgacaacatatcacagttctccgtcgattccatcacctcccaggagagtaaggagccagtgttcattgcagccggtgatattcggcgtagactgtcagaacagcttgcacatacccccacagcctttaaaagggacccagaagacccatccgccgtggcgttgaaggagccttggcaggagaaggtaagaagaatcagggagggcagtccctatggccatctgcctaactggcggctgctgagcgtgattgttaaatgtggggacgacttacggcaggagttattggccttccaagtcttgaagcagctccagtctatctgggagcaagaacgggtgcccctgtggatcaaaccctataaaatcctggtgatttctgccgattccgggatgattgaacccgtggttaatgccgtatcgattcaccaggtaaagaaacaatcacagctgtctctgttagactactttctgcaggagcatgggtcttatacgacagaggcctttttgagtgctcagcgaaatttcgtccagagctgcgccggatattgtttggtgtgttacctcttgcaggtaaaagatcgccacaacggaaacattttgctagatgctgaagggcatattatacacatagactttggtttcatcctgagctcttctcctcgcaacctcgggtttgaaacctcggctttcaaattgacaacagagtttgttgacgtcatgggcggtctggatggagacatgttcaactactacaagatgctcatgctacagggcctgatcgccgcacgcaagcacatggataaggtcgtgcagatagtagagataatgcagcagggctcccagttaccttgtttccacggatccagcaccatccgtaatctgaaggagcgattccacatgagcatgacagaggaacagctgcaactgctcgttgagcagatggtcgacgggtctatgcggtcgatcacgaccaaactgtacgatgggttccaatatctaaccaacggcatcatgtag

SEQ ID NO: 130662 - DNA, 3471 bp, Artificial Sequence
  derived and/or modified sequence
cagattacacttggttgactactccggagcagccactaagagggatgaacaggcctgcgtggaaattgaatgagattcttggaagctcgaagtctggctgtggccatgggagatacagtagtggagcctgcccccttgaagccaacttctgagcccacttctggcccaccagggaataatggggggtccctgctaagtgtcatcacggagggggtcggggaactatcagtgattgaccctgaggtggcccagaaggcctgccaggaggtgttggagaaagtcaagcttttgcatggaggcgtggcagtctctagcagaggcaccccactggagttggtcaatggggatggtgtggacagtgagatccgttgcctagatgatccacctgcccagatcagggaggaggaagatgagatgggggccgctgtggcctcaggcacagccaaaggagcaagaagacggcggcagaacaactcagctaaacagtcttggctgctgaggctgtttgagtcaaaactgtttgacatctccatggccatttcatacctgtataactccaaggagcctggagtacaagcctacattggcaaccggctcttctgctttcgcaacgaggacgtggacttctatctgccccagttgcttaacatgtacatccacatggatgaggatgtgggtgatgccattaagccctacatagtccaccgttgccgccagagcattaacttttccctccagtgtgccctgttgcttggggcctattcttcagacatgcacatttccactcaacgacactcccgtgggaccaagctacggaagctgatcctctcagatgagctaaagccagctcacaggaagagggagctgccctccttgagcccggcccctgacacagggctgtctccctccaaaaggactcaccagcgctctaagtcagatgccactgccagcataagtctcagcagcaacctgaaacgaacagccagcaaccctaaagtggagaatgaggatgaggagctctcctccagcaccgagagtattgataattcattcagttcccctgttcgactggctcctgagagagaattcatcaagtccctgatggcgatcggcaagcggctggccacgctccccaccaaagagcagaaaacacagaggctgatctcagagctctccctgctcaaccataagctccctgcccgagtctggctgcccactgctggctttgaccaccacgtggtccgtgtaccccacacacaggctgttgtcctcaactccaaggacaaggctccctacctgatttatgtggaagtccttgaatgtgaaaactttgacaccaccagtgtccctgcccggatccccgagaaccgaattcggagtacgaggtccgtagaaaacttgcccgaatgtggtattacccatgagcagcgagctggcagcttcagcactgtgcccaactatgacaacgatgatgaggcctggtcggtggatgacataggcgagctgcaagtggagctccccgaagtgcataccaacagctgtgacaacatctcccagttctctgtggacagcatcaccagccaggagagcaaggagcctgtgttcattgcagcaggggacatccgccggcgcctttcggaacagctggctcataccccgacagccttcaaacgagacccagaagatccttctgcagttgctctcaaagagccctggcaggagaaagtacggcggatcagagagggctccccctacggccatctccccaattggcggctcctgtcagtcattgtcaagtgtggggatgaccttcggcaagagcttctggcctttcaggtgttgaagcaactgcagtccatttgggaacaggagcgagtgcccctttggatcaagccatacaagattcttgtgatttcggctgatagtggcatgattgaaccagtggtcaatgctgtgtccatccatcaggtgaagaaacagtcacagctctccttgctcgattacttcctacaggagcacggcagttacaccactgaggcattcctcagtgcacagcgcaattttgtgcaaagttgtgctgggtactgcttggtctgctacctgctgcaagtcaaggacagacacaatgggaatatccttttggacgcagaaggccacatcatccacatcgactttggcttcatcctctccagctcaccccgaaatctgggctttgagacgtcagcctttaagctgaccacagagtttgtggatgtgatgggcggcctggatggcgacatgttcaactactataagatgctgatgctgcaagggctgattgccgctcggaaacacatggacaaggtggtgcagatcgtggagatcatgcagcaaggttctcagcttccttgcttccatggctccagcaccattcgaaacctcaaagagaggttccacatgagcatgactgaggagcagctgcagctgctggtggagcagatggtggatggcagtatgcggtctatcaccaccaaactctatgacggcttccagtacctcaccaacggcatcatgtgacacgctcctcagcccaggagtggtggggggtccagggcaccctccctagagggcccttgtctgagaaaccccaaaccaggaaaccccacctacccaaccatccacccaagggaaatggaaggcaagaaacacgaaggatcatgtggtaactgcgagagcttgctgaggggtgggagagccagctgtggggtccagacttgttggggcttccctgcccctcctggtctgtgtcagtattaccaccagactgactccaggactcactgccctccagaaaacagaggtgacaaatgtgagggacactggggcctttcttctccttgtaggggtctctcagaggttctttccacaggccatcctcttattccgttctggggcccaggaagtggggaagagtaggttctcggtacttaggacttgatcctgtggttggccactggccatgctgctgcccagctctacccctcccagggacctacccctcccagggaccgacccctggcccaagctccccttgctggcgggcgctgcgtgggccctgcacttgctgaggttccccatcatgggcaaggaagggaattcccacagccctccagtgtactgagggtactggcctagccatgtggaattccctaccctgactccttccccaaacccagggaaaagagctctcaattttttatttttaatttttgtttgaaataaagtccttagttagccacttgtgtcatttccaggttttctgggggagtgcagggggagatgggtgatgaggtatgaacggatgcctcagtgtccaagatacaaaaggcactacatagaagtttgctttttccctgcctgtcttggtcactaccacctcttccctgagaagggcgggccttccatgttctctcacccgcttcaactccacat

SEQ ID NO: 130663 - DNA, 2487 bp, Artificial Sequence
  derived and/or modified sequence
atgagattcctggaggccagaagcctggccgtggccatgggcgacaccgtggtggagcccgcccccctgaagcccaccagcgagcccaccagcggcccccccggcaacaacggcggcagcctgctgagcgtgatcaccgagggcgtgggcgagctgagcgtgatcgaccccgaggtggcccagaaggcctgccaggaggtgctggagaaggtgaagctgctgcacggcggcgtggccgtgagcagcagaggcacccccctggagctggtgaacggcgacggcgtggacagcgagatcagatgcctggacgacccccccgcccagatcagagaggaggaggacgagatgggcgccgccgtggccagcggcaccgccaagggcgccagaagaagaagacagaacaacagcgccaagcagagctggctgctgagactgttcgagagcaagctgttcgacatcagcatggccatcagctacctgtacaacagcaaggagcccggcgtgcaggcctacatcggcaacagactgttctgcttcagaaacgaggacgtggacttctacctgccccagctgctgaacatgtacatccacatggacgaggacgtgggcgacgccatcaagccctacatcgtgcacagatgcagacagagcatcaacttcagcctgcagtgcgccctgctgctgggcgcctacagcagcgacatgcacatcagcacccagagacacagcagaggcaccaagctgagaaagctgatcctgagcgacgagctgaagcccgcccacagaaagagagagctgcccagcctgagccccgcccccgacaccggcctgagccccagcaagagaacccaccagagaagcaagagcgacgccaccgccagcatcagcctgagcagcaacctgaagagaaccgccagcaaccccaaggtggagaacgaggacgaggagctgagcagcagcaccgagagcatcgacaacagcttcagcagccccgtgagactggcccccgagagagagttcatcaagagcctgatggccatcggcaagagactggccaccctgcccaccaaggagcagaagacccagagactgatcagcgagctgagcctgctgaaccacaagctgcccgccagagtgtggctgcccaccgccggcttcgaccaccacgtggtgagagtgccccacacccaggccgtggtgctgaacagcaaggacaaggccccctacctgatctacgtggaggtgctggagtgcgagaacttcgacaccaccagcgtgcccgccagaatccccgagaacagaatcagaagcaccagaagcgtggagaacctgcccgagtgcggcatcacccacgagcagagagccggcagcttcagcaccgtgcccaactacgacaacgacgacgaggcctggagcgtggacgacatcggcgagctgcaggtggagctgcccgaggtgcacaccaacagctgcgacaacatcagccagttcagcgtggacagcatcaccagccaggagagcaaggagcccgtgttcatcgccgccggcgacatcagaagaagactgagcgagcagctggcccacacccccaccgccttcaagagagaccccgaggaccccagcgccgtggccctgaaggagccctggcaggagaaggtgagaagaatcagagagggcagcccctacggccacctgcccaactggagactgctgagcgtgatcgtgaagtgcggcgacgacctgagacaggagctgctggccttccaggtgctgaagcagctgcagagcatctgggagcaggagagagtgcccctgtggatcaagccctacaagatcctggtgatcagcgccgacagcggcatgatcgagcccgtggtgaacgccgtgagcatccaccaggtgaagaagcagagccagctgagcctgctggactacttcctgcaggagcacggcagctacaccaccgaggccttcctgagcgcccagagaaacttcgtgcagagctgcgccggctactgcctggtgtgctacctgctgcaggtgaaggacagacacaacggcaacatcctgctggacgccgagggccacatcatccacatcgacttcggcttcatcctgagcagcagccccagaaacctgggcttcgagaccagcgccttcaagctgaccaccgagttcgtggacgtgatgggcggcctggacggcgacatgttcaactactacaagatgctgatgctgcagggcctgatcgccgccagaaagcacatggacaaggtggtgcagatcgtggagatcatgcagcagggcagccagctgccctgcttccacggcagcagcaccatcagaaacctgaaggagagattccacatgagcatgaccgaggagcagctgcagctgctggtggagcagatggtggacggcagcatgagaagcatcaccaccaagctgtacgacggcttccagtacctgaccaacggcatcatgtag

SEQ ID NO: 130664 - protein, 146 aa, Artificial Sequence
  derived and/or modified sequence
MRLLQLLFRASPATLLLVLCLQLGANKAQDNTRKIIIKNFDIPKSVRPNDEVTAVLAVQTELKECMVVKTYLISSIPLQGAFNYKYTACLCDDNPKTFYWDFYTNRTVQIAAVVDVIRELGICPDDAAVIPIKNNRFYTIEILKVE

SEQ ID NO: 130665 - DNA, 441 bp, Artificial Sequence
  derived and/or modified sequence
atgagattactacagctgctgtttcgcgctagcccagccacgcttctcctggtgctatgtttgcagttaggagcgaataaagcccaagacaatacgaggaaaatcatcattaaaaatttcgacatacccaagtccgttcgtccaaatgacgaggttactgccgtattggccgtccagacggagctaaaggagtgtatggtggtaaagacctatttgatcagcagtattcccctgcagggcgcctttaattataagtatactgcgtgcctatgtgatgacaaccctaagacattctactgggatttctatacgaatcgcacggtgcagatcgctgccgtggtggatgtcatcagggagcttggaatctgccctgatgatgccgccgtgatcccaatcaagaacaacaggttttataccattgagatcctgaaggtagaatag

SEQ ID NO: 130666 - DNA, 441 bp, Artificial Sequence
  derived and/or modified sequence
atgaggctgctgcagctgctcttccgggccagccctgccaccctgctgctggtgctgtgcctgcagctgggcgccaacaaggcccaggacaacaccaggaagatcatcatcaagaactttgacatccccaagtctgtgcggcccaatgatgaggtgacagctgtgctggccgtgcagacagagctgaaggagtgcatggtggtgaagacctacctgatcagcagcatccccctgcagggcgccttcaactacaagtacacagcctgcctgtgtgatgacaaccccaagaccttctactgggacttctacaccaacagaacagtgcagattgctgctgtggtggatgtgatccgggagctgggcatctgcccagatgatgctgctgtgatccccatcaagaacaaccgcttctacaccatcgagatcctgaaggtggagtag

SEQ ID NO: 130667 - DNA, 441 bp, Artificial Sequence
  derived and/or modified sequence
atgcggctgctgcagctgctgttccgggccagccccgccaccctgctgctcgtgctctgtctgcagctgggggccaataaggcacaggacaacacacgaaaaataattatcaaaaattttgacatccctaagtctgtgcgtcccaacgatgaagtgactgccgtcctggccgtgcagaccgaactcaaagagtgtatggtagtaaagacttacctgatttccagtatacctctccagggtgcctttaactacaagtacacggcctgtctctgcgacgataatccgaaaaccttctactgggacttctacaccaaccgcactgtgcagattgctgccgtagtcgacgtgattcgggagcttggcatctgccctgacgatgctgcggtaatccctattaagaataatcgcttttacaccatcgagatactcaaggtcgagtag

SEQ ID NO: 130668 - DNA, 441 bp, Artificial Sequence
  derived and/or modified sequence
atgcgtctgctacaattacttttcagagccagtcctgcaaccctgctactggtcttatgtctgcagctgggtgccaacaaggcccaggataatacacgaaagatcatcattaagaactttgacatccctaagagtgttcgccctaatgacgaagtgacggcggtgttggctgtacaaacagagttgaaggaatgtatggtggtgaagacctatctgatctctagtataccacttcagggcgcattcaattacaagtacacagcctgcctgtgtgacgacaatcctaagactttttactgggatttttatactaatcgaactgtccagattgccgctgtggtggacgtcattcgggaactggggatctgccccgacgacgcagctgtaattcctattaagaacaatcgtttttacaccatcgaaatcctcaaagttgagtag

SEQ ID NO: 130669 - DNA, 585 bp, Artificial Sequence
  derived and/or modified sequence
accacttctctgggacacattgccttctgttttctccagcatgcgcttgctccagctcctgttcagggccagccctgccaccctgctcctggttctctgcctgcagttgggggccaacaaagctcaggacaacactcggaagatcataataaagaattttgacattcccaagtcagtacgtccaaatgacgaagtcactgcagtgcttgcagttcaaacagaattgaaagaatgcatggtggttaaaacttacctcattagcagcatccctctacaaggtgcatttaactataagtatactgcctgcctatgtgacgacaatccaaaaaccttctactgggacttttacaccaacagaactgtgcaaattgcagccgtcgttgatgttattcgggaattaggcatctgccctgatgatgctgctgtaatccccatcaaaaacaaccggttttatactattgaaatcctaaaggtagaataatggaagccctgtctgtttgccacacccaggtgatttcctctaaagaaacttggctggaatttctgctgtggtctataaaataaacttcttaacatgcttctcca

SEQ ID NO: 130670 - DNA, 441 bp, Artificial Sequence
  derived and/or modified sequence
atgagactgctgcagctgctgttcagagccagccccgccaccctgctgctggtgctgtgcctgcagctgggcgccaacaaggcccaggacaacaccagaaagatcatcatcaagaacttcgacatccccaagagcgtgagacccaacgacgaggtgaccgccgtgctggccgtgcagaccgagctgaaggagtgcatggtggtgaagacctacctgatcagcagcatccccctgcagggcgccttcaactacaagtacaccgcctgcctgtgcgacgacaaccccaagaccttctactgggacttctacaccaacagaaccgtgcagatcgccgccgtggtggacgtgatcagagagctgggcatctgccccgacgacgccgccgtgatccccatcaagaacaacagattctacaccatcgagatcctgaaggtggagtag

SEQ ID NO: 130671 - protein, 314 aa, Artificial Sequence
  derived and/or modified sequence
MDAFKGGMSLERLPEGLRPPPPPPHDMGPAFHLARPADPREPLENSASESSDTELPEKERGGEPKGPEDSGAGGTGCGGADDPAKKKKQRRQRTHFTSQQLQELEATFQRNRYPDMSMREEIAVWTNLTEPRVRVWFKNRRAKWRKRERNQQLDLCKGGYVPQFSGLVQPYEDVYAAGYSYNNWAAKSLAPAPLSTKSFTFFNSMSPLSSQSMFSAPSSISSMTMPSSMGPGAVPGMPNSGLNNINNLTGSSLNSAMSPGACPYGTPASPYSVYRDTCNSSLASLRLKSKQHSSFGYGGLQGPASGLNACQYNS

SEQ ID NO: 130672 - protein, 114 aa, Artificial Sequence
  derived and/or modified sequence
MDAFKGGMSLERLPEGLRPPPPPPHDMGPAFHLARPADPREPLENSASESSDTELPEKERGGEPKGPEDSGAGGTGCGGADDPAKKKKQRRQRTHFTSQQLQELEATFQRNRYP

SEQ ID NO: 130673 - protein, 131 aa, Artificial Sequence
  derived and/or modified sequence
MDAFKGGMSLERLPEGLRPPPPPPHDMGPAFHLARPADPREPLENSASESSDTELPEKERGGEPKGPEDSGAGGTGCGGADDPAKKKKQRRQRTHFTSQQLQELEATFQRNRYPDMSMREEIAVWTNLTEP

SEQ ID NO: 130674 - DNA, 2383 bp, Artificial Sequence
  derived and/or modified sequence
cctggcgcagggactgctggaacctggctgtgcgcgctgtcgctttaagacagactctgccggcgccgtccggagccttagaaaccggccccggatcgcgagccggagccggagccggagccggggccggccgggctgctgaggcccgagcggcaggagcgcagcgcggagcgctgagccaggcgcccagtcgcgagaagctgccgccgcctctgcccgcccggcgccgcagccccgggcggtccatggggcgggcacggcgtcgctgcaggcgccggcagccctggagggcagccgcttaggcgctgcgctcttgtccccgcaggtcgcagccagggcggcggggcgcgcccagccccggcccctggagcgcccgccgcggtccccacctccatggacgccttcaaggggggcatgagcctggagcggctgccggaggggctccggccgccgccgccgccaccccatgacatggggcccgccttccacctggcccggcccgccgacccccgcgagccgctcgagaactccgccagcgagtcgtctgacacggagctgccagagaaggagcgcggcggggaacccaaggggcccgaggacagtggtgcgggaggcacgggctgcggcggcgcagacgacccagccaagaagaagaagcagcggcggcaacgtacgcacttcacaagccagcagttgcaagagctagaggccacgttccagaggaaccgctaccccgacatgagcatgagggaggagatcgccgtgtggaccaacctcaccgagccgcgcgtgcgggtctggttcaagaaccggcgagccaagtggcgtaagcgcgagcgtaaccagcagctggacctgtgcaagggtggctacgtgccgcagttcagcggcctagtgcagccctacgaggacgtgtacgccgccggctactcctacaacaactgggccgccaagagcctggcgccagcgccgctctccaccaagagcttcaccttcttcaactccatgagcccgctgtcgtcgcagtccatgttctcagcacccagctccatctcctccatgaccatgccgtccagcatgggcccaggcgccgtgcctggcatgcccaactcgggcctcaacaacatcaacaacctcaccggctcctcgctcaactcggccatgtcgccgggcgcttgcccgtacggcactcccgcctcgccctacagcgtctaccgggacacgtgcaactcgagcctagccagcctgcggctcaagtccaaacagcactcgtcgtttggctacggcggcctgcagggcccggcctcgggcctcaacgcgtgccagtacaacagctgaccgccccgccgcaccacgcgggccggcggccggagcggggaagggcgcgggcgcgggcgcggaggacgcacgcggggccccggctcgcaagccccagctcaccgcgccgcggacctcacacctgcgcagccccctcctcccacttcccactccgggttggttttgtgtttgcttttccggaccccactctgccctccaaaaagacaaaaaaaaaaaaaaaaaaaaaaaagcaaaaagacgtcggagaaaagtgccgcgaaaaaatggatgagttgcaatttctctcgggatggcgcgggtggtgtgtgtgttcccacgggccccggaggcccactccgcggagggcacgcggcgcggtaggcgagcgccgaggcccagcggccgggggaggacgacctcgtatcccgcgtccccgccgcgctggatccggactgagtggccgggcctgcggactggatgtgcggggcctggacttgcctaggatttcccgaccccgtacaaaccaagttgccctctccgagctaggcccggccgagagcgccttagctcgagtcggatccgtgttggggcgggcgttgggtttggggggacggtgcccccagcccaggatcgggcactcagtggagccgcacacggccccggcgcgcctggtagagcctcgctggccccgcgccccggagccctatattaaggccacggagcgacagcgggcagtgcgggcctggcgggaggtgggggaggtccatctcagaacaccccagccttgagcttagctgcaggcccaggccctctgctctgctcccgggctaggaggtggccctctgtctgggcgaacagccccctcctcaccgcccgccgtgcaagagtcgagccggcagagcaaggggcgcggccccagggccctgcgcccactttgcacacccgctctccggcccgcgcccctgtttacagcgtccctgtgtatgttggactgactgtaataaatctgtctatatcgacttgtccatgtacgtctattaaaaccatagtccgagcgtgctaagca

SEQ ID NO: 130675 - DNA, 945 bp, Artificial Sequence
  derived and/or modified sequence
atggacgctttcaaggggggaatgtctttggagcgactacccgagggattgagacctccacctcctcctccccatgatatgggcccagcttttcatctggctcggccggcagaccctcgcgagcccctcgagaactcagcatccgaatcaagcgacaccgagctgccggagaaggagcggggaggggaaccaaagggaccggaagactcaggggcaggcggaactggatgcgggggggctgatgaccccgccaaaaagaaaaagcagagacgccaacggacacacttcacatcacagcagctccaggagctggaagcaacattccagcgaaatagatatcctgatatgagcatgagggaggagattgccgtgtggaccaacctgaccgagccacgtgtgcgggtttggttcaaaaaccggcgagccaagtggagaaagagggagagaaaccagcagttggatctctgtaagggtggatacgtcccacagttctcagggctggtccagccttacgaggacgtgtacgcagcaggttacagttataataattgggctgcaaagtcactggcccccgccccactgtcaacaaagtcatttacattcttcaactctatgagtcctcttagctcacagtcgatgttctcggcgccgtcctcaataagttctatgaccatgccaagcagcatgggccctggagccgtgccaggcatgcccaatagcggcttgaacaatatcaataaccttaccggctcaagtcttaattccgcgatgtcgcccggggcctgtccctatggtaccccagccagcccctacagcgtctacagggacacttgcaactctagcttggccagcttgagactaaagagcaaacagcactccagctttggctatggcggtctacaggggccagcctcaggcctcaacgcctgtcaatacaatagctag

SEQ ID NO: 130676 - DNA, 345 bp, Artificial Sequence
  derived and/or modified sequence
atggacgcttttaaaggtgggatgagtctcgaaagactgcccgaaggactaaggccccccccccccccgccccatgatatgggaccagctttccatctggctaggccagccgatcccagggaaccgctggagaacagtgcatcagaatcctcagatacggagctcccggagaaagagcgtggaggcgagccaaagggcccggaagattcaggagcaggcggaacaggctgtggcggagccgacgatccagccaaaaaaaaaaaacaacgaagacagaggactcacttcacctcacaacagctccaagaattggaagccactttccagaggaatcgctacccttag

SEQ ID NO: 130677 - DNA, 945 bp, Artificial Sequence
  derived and/or modified sequence
atggacgctttcaagggggggatgtcactggagcgtctgccagagggcctccgccctccccctccaccaccccatgatatgggtcctgcattccacctcgcacggcctgccgacccacgtgagcccctggagaatagcgcctctgagtccagcgacaccgagctgcctgagaaggaacggggaggcgagccgaaagggcccgaggattccggagctggcggaactgggtgtggtggagcagatgacccagccaagaaaaagaagcagagacgacaacgaacccatttcacctcgcaacagctgcaggaactggaggcaacctttcagaggaatagataccctgatatgagtatgagagaagaaatagcagtttggactaatttgacagaaccccgagtgcgggtttggtttaagaaccggcgggcgaaatggcggaagcgcgagagaaatcagcagctcgacctctgtaaaggggggtacgtgccacagttttccggactcgtccaaccctatgaggacgtatacgccgctggctatagttacaacaattgggccgcgaaaagccttgctcctgctcctctttctaccaagagctttaccttctttaacagcatgtctcctctgagctctcagtccatgttctccgccccatcctctatttcaagcatgaccatgccatcttctatgggacctggcgccgtgcctggtatgcctaacagcgggcttaacaacattaacaaccttaccggcagcagtctgaattctgcaatgagccctggagcatgtccctacggtacccctgcttccccatattccgtgtatagagacacatgcaatagcagcctggcgagccttaggcttaagagcaaacaacactccagctttggatatggcggactgcagggccctgcgtccggactgaacgcatgccagtataactcctag

SEQ ID NO: 130678 - DNA, 396 bp, Artificial Sequence
  derived and/or modified sequence
atggatgcttttaagggcggcatgtcattggagcgcctgcctgaagggctgagacccccaccgccccccccccatgatatggggcctgctttccacttggcaagacccgctgacccgagagagcccctagaaaactctgctagcgaatcatcagacactgagttacccgaaaaggagcgcggcggggagccgaagggccctgaagattccggcgccggcggaaccggatgcggtggggccgatgacccagccaagaaaaaaaaacaacggcgccaaagaactcactttacttcacagcagctgcaggagttagaggccaccttccagagaaacaggtaccccgatatgagcatgagggaagagatagctgtgtggaccaatctcaccgaaccctag

SEQ ID NO: 130679 - DNA, 945 bp, Artificial Sequence
  derived and/or modified sequence
atggatgccttcaagggcggcatgagcctggagcggctgcctgagggcctgcggcccccacctcctcctcctcatgacatgggccctgccttccacctggcccggcctgctgacccccgggagcccctggagaacagcgccagcgagagcagtgacacagagctgcctgagaaggagcggggcggggagcccaagggccctgaggacagcggggccggcggcaccggctgcggcggcgcagatgatcctgccaagaagaagaagcagaggcggcagaggacccacttcaccagccagcagctgcaggagctggaggccaccttccagaggaaccgctacccagacatgtccatgagggaggagattgctgtgtggaccaacctgacagagccccgggtgcgggtgtggttcaagaacagaagagccaagtggaggaagcgggagaggaaccagcagctggacctgtgcaagggcggctacgtgccccagttcagcggcctggtgcagccctatgaagatgtgtatgctgctggctacagctacaacaactgggccgccaagagcctggccccagcccccctgagcaccaagagcttcaccttcttcaacagcatgagccccctgagcagccagagcatgttttctgcccccagcagcatcagctccatgaccatgcccagctccatgggccctggagctgtgcccggcatgcccaacagcggcctgaacaacatcaacaacctgaccggcagcagcctgaacagcgccatgagccctggggcctgcccctacggcaccccagccagcccctacagcgtgtacagagacacctgcaacagcagcctggccagcctgcggctgaagagcaagcagcacagcagctttggctatggaggcctgcagggccctgccagcggcctgaatgcctgccagtacaacagctag

SEQ ID NO: 130680 - DNA, 345 bp, Artificial Sequence
  derived and/or modified sequence
atggatgccttcaagggcggcatgagcctggagcggctgcctgagggcctgcggcccccacctcctcctcctcatgacatgggccctgccttccacctggcccggcctgctgacccccgggagcccctggagaacagcgccagcgagagcagtgacacagagctgcctgagaaggagcggggcggggagcccaagggccctgaggacagcggggccggcggcaccggctgcggcggcgcagatgatcctgccaagaagaagaagcagaggcggcagaggacccacttcaccagccagcagctgcaggagctggaggccaccttccagaggaaccgctacccctag

SEQ ID NO: 130681 - DNA, 396 bp, Artificial Sequence
  derived and/or modified sequence
atggatgccttcaagggcggcatgagcctggagcggctgcctgagggcctgcggcccccacctcctcctcctcatgacatgggccctgccttccacctggcccggcctgctgacccccgggagcccctggagaacagcgccagcgagagcagtgacacagagctgcctgagaaggagcggggcggggagcccaagggccctgaggacagcggggccggcggcaccggctgcggcggcgcagatgatcctgccaagaagaagaagcagaggcggcagaggacccacttcaccagccagcagctgcaggagctggaggccaccttccagaggaaccgctacccagacatgtccatgagggaggagattgctgtgtggaccaacctgacagagccctag

SEQ ID NO: 130682 - DNA, 945 bp, Artificial Sequence
  derived and/or modified sequence
atggacgccttcaagggcggcatgagcctggagcggctgcccgagggtctgcggccccctccccccccaccacatgacatggggcccgccttccacctggctcgacccgcggacccccgcgaaccactggagaatagtgccagcgagtccagcgacacggaactgcctgaaaaggaaagaggcggagagccgaagggacccgaagactccggcgccggcggtacagggtgcggcggcgctgacgacccggcaaaaaagaagaagcaaagaagacagaggacccactttactagtcagcaactgcaggagctggaggcgactttccagcgaaatcggtacccagatatgagcatgagagaggaaattgccgtttggactaatttgacggaaccccgagtgagagtctggtttaaaaacagacgtgccaagtggagaaaacgagagaggaatcaacagctcgatctctgcaagggcggctacgtgccacaattctccgggttggttcaaccatatgaagacgtatacgctgcaggctactcctataacaattgggcagcgaaaagtctggctcctgcacccctttcaacaaaaagttttactttctttaattcgatgagccccttatccagccaaagtatgttctccgcgccatcaagcatctcaagtatgacgatgccttccagcatgggaccgggagcagtacccgggatgcctaatagtggactcaacaacatcaataatctgactggctccagcctcaattctgccatgagtccaggtgcctgtccttatggaacccccgcctcaccctactccgtgtaccgagacacttgcaatagctccttggcgtccctacggttgaagtccaagcagcactcaagcttcggctacggagggctgcagggacccgcctccggactgaatgcctgccagtataattcatag

SEQ ID NO: 130683 - DNA, 345 bp, Artificial Sequence
  derived and/or modified sequence
atggacgccttcaagggcggcatgagcctggagcggctgcccgagggtttaaggcctcccccgccgcctccacatgatatggggccagcgttccacttggccaggcctgctgaccctcgcgagccactagaaaacagtgcgtcagaaagctcagacaccgagttgccggaaaaagagcgtggcggggaacctaaagggccagaagactccggtgctggtgggacggggtgtggcggagctgacgacccagccaaaaagaaaaaacagaggcgacagagaacccactttacaagccagcagctgcaggagttggaggccactttccaaaggaatagatatccatag

SEQ ID NO: 130684 - DNA, 945 bp, Artificial Sequence
  derived and/or modified sequence
atggacgccttcaagggcggcatgagcctggagcggctgcccgagggtttgcggccgccacctcctccgcctcatgatatgggcccggctttccatctggcgcggcccgctgacccgagggaacccctggagaatagtgcctccgaatcttctgataccgagcttcctgagaaagagcgcggaggcgagccaaaggggccagaggactctggtgcaggagggaccggctgcgggggcgccgacgaccctgctaaaaagaaaaaacaacggcggcaacgcactcactttactagccaacagttacaggagcttgaggctactttccaacggaacagataccccgatatgtcgatgcgcgaggagattgcagtctggaccaacctcaccgagccgagggttcgagtgtggtttaaaaaccgccgcgcgaaatggcggaagcgagaacgtaaccagcagcttgacctctgcaaaggtgggtacgtacctcagttttcaggcctggttcagccgtatgaggacgtatacgccgccggttactcctacaacaactgggccgcgaagagcttggcgcccgccccgctgtctaccaaatccttcacgttcttcaattctatgtctcccttatcttcccagagcatgttcagcgctccctcttctatcagctctatgacaatgccgtccagcatgggtccgggtgccgtgcctggcatgccaaacagtggtcttaataatattaataacctcaccggatcgtcactgaactctgccatgtcccccggcgcttgtccatatgggactcctgcctccccttacagcgtttatcgcgacacctgcaatagttccctcgcatcactgaggctgaagtcaaagcagcattcatcatttgggtacggggggctgcaagggcccgcatcgggactgaacgcgtgccagtataattcatag

SEQ ID NO: 130685 - DNA, 396 bp, Artificial Sequence
  derived and/or modified sequence
atggacgccttcaagggcggcatgagcctggagcggctgcccgaggggttacggcctcctcccccacctccccacgacatggggccagccttccacttagctcgtccggctgatcctagggagccactggaaaactcagcctccgagagtagcgacactgagctgcccgagaaagagcgcggcggggaacctaaaggtccagaggactccggtgccggtggaacgggttgtgggggagccgatgaccccgcaaagaagaagaaacagagacgtcagcggactcactttacatctcagcagctgcaggagctggaggctaccttccagcgcaaccgataccctgatatgagcatgagggaggaaattgccgtttggacaaatctcacggaaccctag

SEQ ID NO: 130686 - DNA, 3216 bp, Artificial Sequence
  derived and/or modified sequence
cccaggcccaccccacccagcacccctggcgcagggactgctggaacctggctgtgcgcgctgtcgctttaagacagactctgccggcgccgtccggagccttagaaaccggccccggatcgcgagccggagccggagccggagccggggccggccgggctgctgaggcccgagcggcaggagcgcagcgcggagcgctgagccaggcgcccagtcgcgagaagctgccgccgcctctgcccgcccggcgccgcagccccgggcggtccatggggcgggcacggcgtcgctgcaggcgccggcagccctggagggcagccgcttaggcgctgcgctcttgtccccgcaggtcgcagccagggcggcggggcgcgcccagccccggcccctggagcgcccgccgcggtccccacctccatggacgccttcaaggggggcatgagcctggagcggctgccggaggggctccggccgccgccgccgccaccccatgacatggggcccgccttccacctggcccggcccgccgacccccgcgagccgctcgagaactccgccagcgagtcgtctgacacggagctgccagagaaggagcgcggcggggaacccaaggggcccgaggacagtggtgcgggaggcacgggctgcggcggcgcagacgacccagccaagaagaagaagcagcggcggcaacgtacgcacttcacaagccagcagttgcaagagctagaggccacgttccagaggaaccgctaccccgacatgagcatgagggaggagatcgccgtgtggaccaacctcaccgagccgcgcgtgcgggtctggttcaagaaccggcgagccaagtggcgtaagcgcgagcgtaaccagcagctggacctgtgcaagggtggctacgtgccgcagttcagcggcctagtgcagccctacgaggacgtgtacgccgccggctactcctacaacaactgggccgccaagagcctggcgccagcgccgctctccaccaagagcttcaccttcttcaactccatgagcccgctgtcgtcgcagtccatgttctcagcacccagctccatctcctccatgaccatgccgtccagcatgggcccaggcgccgtgcctggcatgcccaactcgggcctcaacaacatcaacaacctcaccggctcctcgctcaactcggccatgtcgccgggcgcttgcccgtacggcactcccgcctcgccctacagcgtctaccgggacacgtgcaactcgagcctagccagcctgcggctcaagtccaaacagcactcgtcgtttggctacggcggcctgcagggcccggcctcgggcctcaacgcgtgccagtacaacagctgaccgccccgccgcaccacgcgggccggcggccggagcggggaagggcgcgggcgcgggcgcggaggacgcacgcggggccccggctcgcaagccccagctcaccgcgccgcggacctcacacctgcgcagccccctcctcccacttcccactccgggttggttttgtgtttgcttttccggaccccactctgccctccaaaaagacaaaaaaaaaaaaaaaaaaaaaaaagcaaaaagacgtcggagaaaagtgccgcgaaaaaatggatgagttgcaatttctctcgggatggcgcgggtggtgtgtgtgttcccacgggccccggaggcccactccgcggagggcacgcggcgcggtaggcgagcgccgaggcccagcggccgggggaggacgacctcgtatcccgcgtccccgccgcgctggatccggactgagtggccgggcctgcggactggatgtgcggggcctggacttgcctaggatttcccgaccccgtacaaaccaagttgccctctccgagctaggcccggccgagagcgccttagctcgagtcggatccgtgttggggcgggcgttgggtttggggggacggtgcccccagcccaggatcgggcactcagtggagccgcacacggccccggcgcgcctggtagagcctcgctggccccgcgccccggagccctatattaaggccacggagcgacagcgggcagtgcgggcctggcgggaggtgggggaggtccatctcagaacaccccagccttgagcttagctgcaggcccaggccctctgctctgctcccgggctaggaggtggccctctgtctgggcgaacagccccctcctcaccgcccgccgtgcaagagtcgagccggcagagcaaggggcgcggccccagggccctgcgcccactttgcacacccgctctccggcccgcgcccctgtttacagcgtccctgtgtatgttggactgactgtaataaatctgtctatatcgacttgtccatgtacgtctattaaaaccatagtccgagcgtgctaagcactgctgagccccgactgcttcattgggctgaggagggaggcggatagaaagggaactgtgggtagaaagggaaccgggccccttgggtaggagcagagcgccgaggcagcccccgccgaggtctgcctaccccgcttccccaccaccattcttgacctgctcagcctggctcccatgagggcaccgtcctgcgttgcgagcctgtccggtgcgcacccgctaagctgtgcctctcggcgttgtccgcgggacgccttagcgagaaccccctccctccgcggctgcgggactctacgggtttcttcccaggccgggtctgcggtgaccctcgaggccccagggtgctatggggcccttgcctgccaggagcgttcgggcaggggctgctgagagcctctttatgcctggggttgccttttcttctgtgggcccagcaacagcccctcttctctcctcggagccagggccaggctattccaggaggactgagggggctggatctatcagagtatagcgagggcctcccgctgcctttctccctaatgcccgcaacgtgccgagagcccaccgaggggcgtgcggctgtgcaggagaaagtgtccgtcacacaggactcacttctcacttccaatccatcccaacttgtggggactgctggccgcctccgccctcccctggcttttggaaactactgaacaagaccagcctgtaaactgcctgtaaaattctgcttcccttaagtaagtcatttctaatggcaaaacaaaatgtttgcagctgcagtgggggaggaaggaggggttgatatt

SEQ ID NO: 130687 - DNA, 666 bp, Artificial Sequence
  derived and/or modified sequence
ccgctgggagctgccggaacgggccccgggctctgcccccgccccggcgctggctcgaaggcgcccgctcggtgcgatcctgttcggcaaacattcactcatcctgggctgttctcgccagggctggggacttcgaggcggccgagacgggagttgattctaggcgaaacaagtcatttgaggcctgaggtgtgcacgagccgcccgggactcgcaggccagatgcgtttcttttgtgaggccgagggagaactcggtcgcagccagggcggcggggcgcgcccagccccggcccctggagcgcccgccgcggtccccacctccatggacgccttcaaggggggcatgagcctggagcggctgccggaggggctccggccgccgccgccgccaccccatgacatggggcccgccttccacctggcccggcccgccgacccccgcgagccgctcgagaactccgccagcgagtcgtctgacacggagctgccagagaaggagcgcggcggggaacccaaggggcccgaggacagtggtgcgggaggcacgggctgcggcggcgcagacgacccagccaagaagaagaagcagcggcggcaacgtacgcacttcacaagccagcagttgcaagagctagaggccacgttccagaggaaccgctacccc

SEQ ID NO: 130688 - DNA, 1305 bp, Artificial Sequence
  derived and/or modified sequence
ctggggacttcgaggcggccgagacgggagttgattctaggcgaaacaagtcatttgaggcctgaggtcgcagccagggcggcggggcgcgcccagccccggcccctggagcgcccgccgcggtccccacctccatggacgccttcaaggggggcatgagcctggagcggctgccggaggggctccggccgccgccgccgccaccccatgacatggggcccgccttccacctggcccggcccgccgacccccgcgagccgctcgagaactccgccagcgagtcgtctgacacggagctgccagagaaggagcgcggcggggaacccaaggggcccgaggacagtggtgcgggaggcacgggctgcggcggcgcagacgacccagccaagaagaagaagcagcggcggcaacgtacgcacttcacaagccagcagttgcaagagctagaggccacgttccagaggaaccgctaccccgacatgagcatgagggaggagatcgccgtgtggaccaacctcaccgagccgcgcgtgcgggtctggttcaagaaccggcgagccaagtggcgtaagcgcgagcgtaaccagcagctggacctgtgcaagggtggctacgtgccgcagttcagcggcctagtgcagccctacgaggacgtgtacgccgccggctactcctacaacaactgggccgccaagagcctggcgccagcgccgctctccaccaagagcttcaccttcttcaactccatgagcccgctgtcgtcgcagtccatgttctcagcacccagctccatctcctccatgaccatgccgtccagcatgggcccaggcgccgtgcctggcatgcccaactcgggcctcaacaacatcaacaacctcaccggctcctcgctcaactcggccatgtcgccgggcgcttgcccgtacggcactcccgcctcgccctacagcgtctaccgggacacgtgcaactcgagcctagccagcctgcggctcaagtccaaacagcactcgtcgtttggctacggcggcctgcagggcccggcctcgggcctcaacgcgtgccagtacaacagctgaccgccccgccgcaccacgcgggccggcggccggagcggggaagggcgcgggcgcgggcgcggaggacgcacgcggggccccggctcgcaagccccagctcaccgcgccgcggacctcacacctgcgcagccccctcctcccacttcccactccgggttggttttgtgtttgcttttccggaccccactctgccctccaaaaagacaaaaaaaaaaaaaaaaaaaaa

SEQ ID NO: 130689 - DNA, 587 bp, Artificial Sequence
  derived and/or modified sequence
agttcccgggagaagaggctggagaaggaggggcaggcggcccctcgacgaggacaccgctgggagctgccggaacgggccccgggctctgcccccgccccggcgctggctcgaaggcgcccgctcggtcgcagccagggcggcggggcgcgcccagccccggcccctggagcgcccgccgcggtccccacctccatggacgccttcaaggggggcatgagcctggagcggctgccggaggggctccggccgccgccgccgccaccccatgacatggggcccgccttccacctggcccggcccgccgacccccgcgagccgctcgagaactccgccagcgagtcgtctgacacggagctgccagagaaggagcgcggcggggaacccaaggggcccgaggacagtggtgcgggaggcacgggctgcggcggcgcagacgacccagccaagaagaagaagcagcggcggcaacgtacgcacttcacaagccagcagttgcaagagctagaggccacgttccagaggaaccgctaccccgacatgagcatgagggaggagatcgccgtgtggaccaacctcaccgagcc

SEQ ID NO: 130690 - DNA, 945 bp, Artificial Sequence
  derived and/or modified sequence
atggatgctttcaaggggggaatgtccctggaacgtctccccgaaggcctccgccctcccccaccgccacctcacgatatgggtcccgcttttcacttggctcgaccagccgatccaagagagcccttggagaacagcgcctcagaatcctcagacacagaactgcccgagaaagaacgcggaggcgaaccgaagggcccagaagactctggcgcaggcggaacaggatgcgggggagctgacgaccctgcaaaaaaaaagaagcagcgcaggcagagaacacactttaccagccagcagttgcaggaactcgaggccacctttcagcgcaatcggtacccagacatgagcatgcgcgaggaaattgctgtttggactaacctcaccgagcccagagtgcgcgtttggttcaagaaccgcagagccaagtggcgcaaacgcgagcggaaccaacagttggatttgtgtaagggtggctacgtaccgcagttttccggtcttgtgcagccctacgaggatgtttacgcagccggttactcttataataactgggccgctaaatctttggctccggcacctcttagcactaaaagtttcactttcttcaattctatgtcaccactgtcatctcagagcatgttctccgctcccagcagtatatcttcgatgaccatgccatcaagcatgggcccaggtgctgtccccggtatgcccaacagtggattgaataatatcaacaacctgacaggtagctcgttgaattctgccatgtcccctggtgcgtgcccttatggaactcccgcttccccatattccgtctacagggacacctgtaattcttccttggcttcccttcgactgaaaagcaaacaacactcaagttttggctacggtggtttgcaagggcctgccagtgggctcaacgcgtgccagtacaattcatag

SEQ ID NO: 130691 - DNA, 345 bp, Artificial Sequence
  derived and/or modified sequence
atggacgcttttaagggcggaatgagtctcgaaagactccccgagggactacgcccaccgccacctccccctcatgatatgggaccagcattccatctggcaagaccagccgaccctagagagccgctggaaaattccgcgagtgagagttcagatacagaactgcctgagaaagagcgtgggggagagccgaaggggccagaggacagcggggctggaggtaccggatgcgggggtgccgacgaccctgccaaaaagaagaagcaacgccgacaaaggacccacttcacctcacagcaactccaagaattagaggcaactttccagcgaaatcgatatccctag

SEQ ID NO: 130692 - DNA, 945 bp, Artificial Sequence
  derived and/or modified sequence
atggacgccttcaaaggcggtatgtctttagagaggttgccagagggccttcggcctccgccacccccaccacacgatatgggccctgcatttcatcttgcccgtccagccgatcccagagagccactggagaactctgcgagcgaatcaagtgacactgagctcccggagaaagagcgtggtggggaaccgaagggtcccgaagattctggagctggtggcaccggctgcggcggtgcagacgatcccgcaaagaaaaaaaaacagagaagacagcgaacccatttcacttctcagcaactccaggaacttgaggcaacttttcaacgcaatcgctatcctgacatgtctatgagagaggagatcgcagtctggaccaacctcacggagccacgtgtaagggtatggttcaagaacaggcgggctaaatggcggaagcgggagagaaatcagcagctggacctgtgtaaggggggatacgtgcctcaattcagcgggctagttcaaccctacgaggatgtgtacgccgcaggttactcatacaacaactgggctgcaaagtctctggccccagcccctctgtccaccaaaagctttaccttctttaattcaatgtctcctttgagttctcagagcatgttctcagccccttccagcatctccagtatgaccatgcctagcagtatggggccaggtgctgtgcctggaatgcctaacagcggtttaaacaacatcaataatcttacaggttcatccttgaacagtgctatgagtcccggagcctgtccgtacggcacaccagcctccccatactctgtttatagggatacatgcaacagctcattggcctcgctgaggctcaaaagtaaacaacacagcagttttggatatggcggactgcagggaccagcttctgggctgaatgcctgtcagtacaactcatag

SEQ ID NO: 130693 - DNA, 396 bp, Artificial Sequence
  derived and/or modified sequence
atggacgctttcaaagggggaatgtcattagagaggctgcccgaagggctgcgcccacctccacctcccccacatgatatgggtccagcttttcatctcgcccgacccgctgacccacgcgagcccttagagaattcagctagtgagtcgtccgataccgagctacccgagaaggaaagaggtggcgaacctaagggccctgaagattcaggggcagggggaacgggatgtggcggagccgacgatcccgcaaagaagaaaaaacagcgcagacagcggacacacttcacttcccagcagctccaggagctggaagccactttccagcgcaatcgttatcctgatatgtcaatgagggaggagattgcagtttggaccaacctcaccgagccctag

SEQ ID NO: 130694 - DNA, 945 bp, Artificial Sequence
  derived and/or modified sequence
atggacgccttcaagggcggcatgagcctggagagactgcccgagggcctgagacccccccccccccccccccacgacatgggccccgccttccacctggccagacccgccgaccccagagagcccctggagaacagcgccagcgagagcagcgacaccgagctgcccgagaaggagagaggcggcgagcccaagggccccgaggacagcggcgccggcggcaccggctgcggcggcgccgacgaccccgccaagaagaagaagcagagaagacagagaacccacttcaccagccagcagctgcaggagctggaggccaccttccagagaaacagataccccgacatgagcatgagagaggagatcgccgtgtggaccaacctgaccgagcccagagtgagagtgtggttcaagaacagaagagccaagtggagaaagagagagagaaaccagcagctggacctgtgcaagggcggctacgtgccccagttcagcggcctggtgcagccctacgaggacgtgtacgccgccggctacagctacaacaactgggccgccaagagcctggcccccgcccccctgagcaccaagagcttcaccttcttcaacagcatgagccccctgagcagccagagcatgttcagcgcccccagcagcatcagcagcatgaccatgcccagcagcatgggccccggcgccgtgcccggcatgcccaacagcggcctgaacaacatcaacaacctgaccggcagcagcctgaacagcgccatgagccccggcgcctgcccctacggcacccccgccagcccctacagcgtgtacagagacacctgcaacagcagcctggccagcctgagactgaagagcaagcagcacagcagcttcggctacggcggcctgcagggccccgccagcggcctgaacgcctgccagtacaacagctag

SEQ ID NO: 130695 - DNA, 345 bp, Artificial Sequence
  derived and/or modified sequence
atggacgccttcaagggcggcatgagcctggagagactgcccgagggcctgagacccccccccccccccccccacgacatgggccccgccttccacctggccagacccgccgaccccagagagcccctggagaacagcgccagcgagagcagcgacaccgagctgcccgagaaggagagaggcggcgagcccaagggccccgaggacagcggcgccggcggcaccggctgcggcggcgccgacgaccccgccaagaagaagaagcagagaagacagagaacccacttcaccagccagcagctgcaggagctggaggccaccttccagagaaacagatacccctag

SEQ ID NO: 130696 - DNA, 396 bp, Artificial Sequence
  derived and/or modified sequence
atggacgccttcaagggcggcatgagcctggagagactgcccgagggcctgagacccccccccccccccccccacgacatgggccccgccttccacctggccagacccgccgaccccagagagcccctggagaacagcgccagcgagagcagcgacaccgagctgcccgagaaggagagaggcggcgagcccaagggccccgaggacagcggcgccggcggcaccggctgcggcggcgccgacgaccccgccaagaagaagaagcagagaagacagagaacccacttcaccagccagcagctgcaggagctggaggccaccttccagagaaacagataccccgacatgagcatgagagaggagatcgccgtgtggaccaacctgaccgagccctag

SEQ ID NO: 130697 - DNA, 1596 bp, Artificial Sequence
  derived and/or modified sequence
atgtcaaagccacattcagaagccggcactgccttcatccagacccagcagctccatgccgccatggccgatacattcctggaacatatgtgcaggcttgatatcgactcacctcctattacagcccggaacaccgggatcatttgtaccatagggcccgcctctcgctcagtggagacactgaaggagatgatcaaatccggtatgaacgtggccagactgaacttttctcacgggacccacgagtaccatgcggaaacgattaagaatgtgcgcactgcaaccgagtcctttgcctcggacccaattctctacaggccagtggccgtggctctcgacaccaagggacccgagataaggacaggattgataaagggaagtggaactgccgaggtcgagctgaaaaaaggggcaacgttgaagattacattggataacgcttatatggaaaagtgcgacgagaacatcctgtggctggattacaagaatatctgtaaagtggtggaagtgggaagcaaaatctacgtagacgatggtctgatcagtctgcaggtaaagcagaagggggccgattttctggtcacagaagtcgaaaatgggggatccttaggttcaaaaaagggcgttaaccttccaggggcagctgtggacctccctgccgtgtctgaaaaagacatccaagatcttaaatttggcgttgagcaggacgtggacatggtttttgcctccttcatcagaaaggcttctgatgtgcatgaagtgcgaaaagtgctgggggagaagggaaaaaacattaaaattatctccaagatcgagaaccacgagggtgttcgacgatttgacgaaatcctggaagccagcgacgggattatggtcgcccgaggggacctcgggatcgaaattcctgccgagaaagtctttctggcccagaagatgatgatcggtagatgtaacagggctggtaagcctgtgatttgtgcaactcagatgctggaatccatgatcaaaaaaccaagaccgactcgtgccgaaggaagcgatgttgccaatgccgttctggacggcgcggactgcatcatgctctcaggtgaaacagctaaaggcgactacccgctggaagccgtgcggatgcagcacctaattgctagagaagccgaggccgcgatttatcatttgcagctgttcgaagaattaaggcgcttggccccaatcacttctgatcctactgaagctactgctgttggagctgtcgaagcttcctttaagtgttgctctggagcaatcatcgtactgaccaaaagtggacgctcagcccaccaggttgcaaggtatcgccccagagcgcctatcattgctgttacacgaaatccccagacagcgcgccaggctcacctatatagggggattttccctgtactgtgtaaggatcccgtgcaggaagcctgggcagaggatgtcgatctgcgcgtgaatttcgccatgaacgtgggtaaagccaggggcttcttcaagaaaggcgatgtcgtcatcgttctgacaggttggcgtccaggttccggttttacaaacactatgagggttgtacctgtcccatag

SEQ ID NO: 130698 - DNA, 1596 bp, Artificial Sequence
  derived and/or modified sequence
atgagcaagccccacagcgaggccggcacagccttcatccagacccagcagctgcacgccgccatggctgacaccttcctggagcacatgtgccgcctggacatcgacagcccccccatcacagccaggaacacaggcatcatctgcaccatcggccctgccagccgctctgtggagaccctgaaggagatgatcaagagcggcatgaatgtggcccggctgaacttcagccacggcacccatgagtaccacgccgagaccatcaagaatgtgaggacagccacagagagctttgccagtgaccccatcctgtacagacctgtggccgtggccctggacaccaagggccctgagatcagaacaggcctcatcaagggcagcggcacagctgaggtggagctgaagaagggggccaccctgaagatcaccctggacaatgcctacatggagaagtgtgatgagaacatcctgtggctggactacaagaacatctgcaaggtggtggaggtgggcagcaagatctacgtggatgatggcctcatcagcctgcaggtgaagcagaagggagctgacttcctggtgacagaggtggagaatggaggcagcctgggcagcaagaagggcgtgaacctgcccggggctgctgtggacctgcctgctgtgtctgagaaggacatccaggacctgaagtttggagtggagcaggatgtggacatggtgtttgccagcttcatcaggaaggccagtgatgtgcatgaggtgaggaaggtgctgggggagaagggcaagaacatcaagatcatcagcaagattgagaaccacgagggcgtgagaagatttgatgagatcctggaggccagtgatggcatcatggtggcccggggggacctgggcatcgagatcccagctgagaaggtgttcctggcccagaagatgatgattggccgctgcaacagagctgggaagcctgtgatctgtgccacccagatgctggagagcatgatcaagaagccccggcccaccagggctgagggcagtgatgtggccaatgctgtgctggatggagctgactgcatcatgctgagcggggagacagccaagggggactaccccctggaggccgtgaggatgcagcacctgattgcccgggaggccgaggccgccatctaccacctgcagctgtttgaggagctgcggcggctggcccccatcaccagtgaccccacagaggccacagctgtgggcgctgtggaggccagcttcaagtgctgcagcggggccatcatcgtgctgaccaagagcggccgcagcgcccaccaggtggcccgctaccggccccgggcccccatcatcgctgtgaccaggaacccccagacagcccggcaggcccacctgtaccggggcatcttccctgtgctgtgcaaggaccctgtgcaggaggcctgggccgaggatgtggacctgcgggtgaactttgccatgaatgtgggcaaggcccggggcttcttcaagaagggagatgtggtgattgtgctgaccggctggaggcctggcagcggcttcaccaacaccatgagggtggtgcctgtgccctag

SEQ ID NO: 130699 - DNA, 1596 bp, Artificial Sequence
  derived and/or modified sequence
atgagcaagccccacagcgaggccggcaccgccttcatccagacccagcaactccatgcggccatggctgacacctttcttgaacatatgtgtagactcgacatcgactctccccctatcacggcgaggaacacgggaatcatttgcactattggtcccgcatctcgaagcgtggagacgctcaaagaaatgatcaagtcggggatgaacgtggcccgcttaaacttttcacacgggacacacgagtatcacgcggagaccatcaaaaatgtccggaccgccactgagagttttgccagcgatccaatcctttatagacccgtcgcggttgcactcgataccaagggcccggaaatccggaccgggctgattaagggctctggaacggccgaggttgagctgaaaaagggagctacacttaagattacactagataatgcctatatggaaaagtgcgatgaaaatatattatggctggactataagaatatctgcaaggtagtcgaggtggggagcaagatctatgtggacgacggcctaatctccctgcaggtgaaacagaagggagcggactttcttgttaccgaagtggaaaacgggggatccctcggaagcaagaaaggagtgaaccttccgggcgctgccgtcgatctccccgccgtcagcgagaaagacattcaggatctgaaattcggcgtggaacaagacgtggatatggtgttcgccagtttcattaggaaggcctccgatgttcacgaagtgcggaaagtgcttggagagaagggcaagaatattaaaattatcagtaagattgagaaccatgaaggggtcagacggtttgatgagatactcgaagcttccgacggcattatggttgccaggggcgacctcggaatagagatcccggctgaaaaggtgttccttgcccaaaagatgatgataggacgatgcaaccgcgccggaaaaccagtgatctgcgcaacccagatgctcgagtccatgattaaaaaacccaggccaacaagagctgaggggtctgacgtggcaaatgcagttctggacggggcagattgcattatgctgtccggagaaacagccaaaggcgactatcctctcgaggctgtgcgaatgcaacacctgattgcaagggaggcggaggctgccatctaccacttacagttgttcgaggaacttcggagactagcacccattacctccgatcccaccgaggccacggctgtgggggctgtcgaggcctcttttaaatgctgtagcggtgctattatcgtgctgaccaaatccggaaggtcagctcaccaggttgcccgctacagacctagagcacctattattgccgttacccgaaatcctcagaccgcccgccaggcccacctatataggggcatttttcccgtgctctgcaaggatccagtgcaggaggcctgggcggaagatgttgatctgagagtgaattttgctatgaatgtgggaaaagcccgcggattctttaaaaagggcgatgttgtgatcgtgctgaccggctggagaccgggcagcggctttacaaatacaatgagagtagtcccagttccctag

SEQ ID NO: 130700 - DNA, 1596 bp, Artificial Sequence
  derived and/or modified sequence
atgtcaaagccacattccgaggccggtaccgctttcattcaaacacagcagttgcatgcagccatggccgacacctttttggaacacatgtgtcggttggacatagactctcccccaatcacagcccgtaataccgggatcatctgtacgattggaccggcttcccgatccgttgaaaccctgaaggaaatgatcaagagcggcatgaacgtggcacgccttaactttagtcacggcacccatgaatatcatgctgaaaccataaagaacgtcaggaccgctacggaatcattcgctagtgaccccatcctctaccgccctgttgcagtcgctcttgatactaaaggccctgaaatccgcaccgggctaatcaagggcagcggtacggcggaagttgagctcaaaaagggagcaacactgaagatcacacttgacaacgcctatatggagaaatgcgacgaaaatattttgtggctcgattacaagaatatatgtaaggtggtggaggtgggcagcaaaatttacgtggacgacggattgattagccttcaagttaagcagaagggggctgactttctcgtcactgaggtcgagaatggtggatcgctgggtagcaaaaaaggtgtcaacctgcccggagcagccgtcgatcttcctgccgtatccgagaaagatatacaggatctgaaatttggagtggagcaagacgttgatatggtgtttgcatcattcattaggaaggcctctgacgtgcatgaagttcgtaaggtcctgggtgagaaggggaaaaacattaagattatctctaagatcgaaaaccacgagggcgtaagacgcttcgacgagatcctggaagccagtgacggaataatggtagcacggggtgacctggggatcgagattccggctgaaaaggtctttctggcccaaaagatgatgattgggagatgcaatcgcgcaggaaagcccgttatctgtgcaacgcagatgctggaatcaatgatcaaaaaaccaagacccacgagggccgaaggcagcgacgttgccaacgccgtattagatggggcagactgcatcatgctgtcgggtgaaacagccaagggagactaccctctcgaggccgtgcgaatgcagcatctgatcgctcgcgaggcagaggccgctatttatcacctccagctctttgaagagttgaggaggttggcaccaattacgtctgaccctacagaagccacagcggttggggcagtggaggcttctttcaaatgctgttctggtgcaatcatagtactgaccaaaagcgggcgaagcgctcaccaggtagcgaggtaccggccaagagcccctattattgcagtgactcggaatccccaaaccgcgcgacaggcacacttatatcgtgggatattccccgtcctttgcaaagatccggtacaagaggcctgggctgaagatgtggatctccgcgtaaatttcgcgatgaacgtgggaaaggcacgcggattctttaaaaaaggcgatgttgtgatcgttctgaccggttggcgcccaggcagcggttttactaatactatgcgagtcgtcccggtcccctag

SEQ ID NO: 130701 - DNA, 1596 bp, Artificial Sequence
  derived and/or modified sequence
atgagcaagccccacagcgaggccggcaccgccttcatccagacccagcagctgcacgccgccatggccgacaccttcctggagcacatgtgcagactggacatcgacagcccccccatcaccgccagaaacaccggcatcatctgcaccatcggccccgccagcagaagcgtggagaccctgaaggagatgatcaagagcggcatgaacgtggccagactgaacttcagccacggcacccacgagtaccacgccgagaccatcaagaacgtgagaaccgccaccgagagcttcgccagcgaccccatcctgtacagacccgtggccgtggccctggacaccaagggccccgagatcagaaccggcctgatcaagggcagcggcaccgccgaggtggagctgaagaagggcgccaccctgaagatcaccctggacaacgcctacatggagaagtgcgacgagaacatcctgtggctggactacaagaacatctgcaaggtggtggaggtgggcagcaagatctacgtggacgacggcctgatcagcctgcaggtgaagcagaagggcgccgacttcctggtgaccgaggtggagaacggcggcagcctgggcagcaagaagggcgtgaacctgcccggcgccgccgtggacctgcccgccgtgagcgagaaggacatccaggacctgaagttcggcgtggagcaggacgtggacatggtgttcgccagcttcatcagaaaggccagcgacgtgcacgaggtgagaaaggtgctgggcgagaagggcaagaacatcaagatcatcagcaagatcgagaaccacgagggcgtgagaagattcgacgagatcctggaggccagcgacggcatcatggtggccagaggcgacctgggcatcgagatccccgccgagaaggtgttcctggcccagaagatgatgatcggcagatgcaacagagccggcaagcccgtgatctgcgccacccagatgctggagagcatgatcaagaagcccagacccaccagagccgagggcagcgacgtggccaacgccgtgctggacggcgccgactgcatcatgctgagcggcgagaccgccaagggcgactaccccctggaggccgtgagaatgcagcacctgatcgccagagaggccgaggccgccatctaccacctgcagctgttcgaggagctgagaagactggcccccatcaccagcgaccccaccgaggccaccgccgtgggcgccgtggaggccagcttcaagtgctgcagcggcgccatcatcgtgctgaccaagagcggcagaagcgcccaccaggtggccagatacagacccagagcccccatcatcgccgtgaccagaaacccccagaccgccagacaggcccacctgtacagaggcatcttccccgtgctgtgcaaggaccccgtgcaggaggcctgggccgaggacgtggacctgagagtgaacttcgccatgaacgtgggcaaggccagaggcttcttcaagaagggcgacgtggtgatcgtgctgaccggctggagacccggcagcggcttcaccaacaccatgagagtggtgcccgtgccctag

SEQ ID NO: 130702 - protein, 496 aa, Artificial Sequence
  derived and/or modified sequence
MTTFFTSVPPWIQDAKQEEEVGWKLVPRPRGREAESQVKCQCEISGTPFSNGEKLRPHSLPQPEQRPYSCPQLHCGKAFASKYKLYRHMATHSAQKPHQCMYCDKMFHRKDHLRNHLQTHDPNKEALHCSECGKNYNTKLGYRRHLAMHAASSGDLSCKVCLQTFESTQALLEHLKAHSRRVAGGAKEKKHPCDHCDRRFYTRKDVRRHLVVHTGRKDFLCQYCAQRFGRKDHLTRHVKKSHSQELLKIKTEPVDMLGLLSCSSTVSVKEELSPVLCMASRDVMGTKAFPGMLPMGMYGAHIPTMPSTGVPHSLVHNTLPMGMSYPLESSPISSPAQLPPKYQLGSTSYLPDKLPKVEVDSFLAELPGSLSLSSAEPQPASPQPAAAAALLDEALLAKSPANLSEALCAANVDFSHLLGFLPLNLPPCNPPGATGGLVMGYSQAEAQPLLTTLQAQPQDSPGAGGPLNFGPLHSLPPVFTSGLSSTTLPRFHQAFQ

SEQ ID NO: 130703 - DNA, 5656 bp, Artificial Sequence
  derived and/or modified sequence
acaatgcaccgcacaatggcccgaccgccgccactaccggggcctgagggggcctggcggagcccgagcgcggcccggcccgcagcgtggggccccgagcgcggtgaagagattgttttctgaaagctgcgttggaggctgtgacagagctgagagcctgtgtggagcggatggggaggctttctcaataacatggccctttgccattagccttgccatgaccacatttttcaccagcgtccccccctggattcaagatgcaaagcaggaggaggaagtgggctggaaactagttcccaggcctcggggccgggaggcggagagtcaagtgaagtgccaatgtgaaatttcgggaacacctttctcaaatggggagaagctgaggcctcacagcctcccgcaaccagagcagagaccatatagctgccctcagctgcactgtggcaaggcttttgcttccaaatacaagctgtataggcacatggccacccactcagcccagaaaccccaccagtgtatgtactgtgataagatgtttcaccgcaaggaccatctgcggaaccatctgcagacccatgatcctaacaaagaggccctccactgctctgagtgcggtaagaattacaatacgaagctgggctaccggcgccacctggccatgcatgctgccagcagcggtgacctcagctgcaaggtgtgcctgcagacctttgagagtacccaggccctgctagagcacctgaaggcccactcacgccgggtagcaggcggtgccaaggagaagaagcacccctgtgaccactgcgaccggcggttctatactcgtaaggatgtacggcggcacctagtggtgcacacaggccgtaaggacttcctgtgccagtactgtgcccagcggtttggccgtaaggaccacctgacgcgtcatgtcaagaagagccactcgcaggagctgctcaagatcaagacagagcccgtggacatgttaggcctactcagctgcagctccacagtcagtgtgaaggaagagctgagccctgtgctgtgcatggcctctcgggacgtaatggggaccaaggccttccctggcatgttgcccatgggcatgtatggtgcccacatccctaccatgcccagcacgggcgtgccacactccctggtgcacaacacgctgcccatgggtatgagctaccctctggaatcctcacctatctcttccccagctcagctccctccaaaataccagcttggatctacctcatacttgcccgacaaattgcccaaagtggaggtggatagttttctggcggagcttcctggaagcctgtctctctcatccgctgaaccccagcccgcctcacctcagccggcggcagctgcggccctcctagatgaagcactgcttgccaagagccccgccaacctctctgaggccctctgcgctgctaatgtggacttctcccacctactgggctttcttccactcaacctgcccccgtgtaacccacctggggccacaggaggcctggtcatgggctactcccaggctgaggcacagcccctgcttaccactttgcaagctcagcctcaagattccccaggagctgggggaccactgaactttgggcctctgcactccttgcctcctgtcttcacgtctggcctgagtagcaccaccctgcctcgtttccatcaagcattccagtagcccccacagaggccctcagctcagtttttggctctgttatggagccttagtacccaccccgtctgtgtcccccatgaaggcagctgagctttcagagctgggttcaaaaaaaaaaattccagtgtctgtatacaggagcacttggtttgggggttcaggctctaggatcgattccagaaggagccttgagccccaaccccgtgaaaagatctcataccgtaggacttcaggtattatttacttttatttttttgacctgaatcgggagccacacttggccctcttcctctccaaagcgccagaacctccttctctttggagaatggggaggcctcttggagacacagagggtttcaccttggatgacctctagagaaattgcccaagaagcccaccttctggtcccaacctgcagaccccacagcagtcagttggtcaggccctgctgtagaaggtcacttggctccattgcctgcttccaaccaatgggcaggagagaaggcctttatttctcgcccacccattcctcctgtaccagcacctccgttttcagtcagtgttgtccagcaacggtaccgtttacacagtcacctcagacacaccatttcacctcccttgccaagctgttagccttagagtgattgcagtgaacactgtttacacaccgtgaatccattcccatcagtccattccagttggcaccagcctgaaccatttggtacctggtgttaactggagtcctgtttacaaggtggagtcggggcttgctgacttctcttcatttgaggtcacatttttcccccgtggggaaataaactgactttggactgcttcagtctctgccatcttccatgactgcatttgttcctgcctgcctcggcggtatccacagaagacaggcaagaggattggagcagttttctcacaggtctgcaattctgtttttctccaagtacattatgaccccctcatccttctcttgaactggagaggggaagaaatgaaaggcatgcccacgtccgtcacctccccatcccctagtccccaccttgaacatcatgagctgttgttattagtcttggaagcagagtctgggttggtgtggatagcaaaggaggaagtctgagcccctcattggtcttcctcccacctgtcccttttccgggaagttgtggaattgttggaagaagagtttgcagaaggttaggaatgggtagatagctaagtcctaatctatgggtacattgttgtgtcccaaaccaaaattttccttatccacaatgtcccttctgtctcttccactttacagtggactcggccactgtgcataggcttctctgctctccatcaaatcacttccactttcctgtgcccccacccccgcctccagttttccgctagtatccggcaaggtttcttgcaacaaatgattagttcttttcttctgactcgtggggctccctgctgcagagagcacagcccttgcctggagcccaggaaccccatccttgcttcatctcagttcttcatgggcttcactcttcccactcacggaagggaggtagctcagggacctccactgtgggacccttgagacgcttccactctgattcagaaacacacttctacctctttactgttaactcttaacagatgcagtcagcagtttctgggcacttctctcagtaggtgcctcatgctgacttctccagtagggtttcaggacaaactaccaaggaattgcctcagcctcctaccagtcctccctcacccaccttctgtctaggttcacttggtttgtcatcaggaactgagcaggtccaggactcagctttctgcttcagcctaagccagtactccttgtttgaggtaaaagccttaaaatttagctccctagctcttgattagaagcaatttggagtaagtgtgttttgatttaggcagggtagcttgggatacctttttaaaaacaccagatattaaaatgtctggcaaggttagaatcagactagatgatttgcttctaaaaattagtttcagtgagtcccagggactaattaaggtttattttaaaaagtgtctaccttggtacgcagccacctcctgcatgctgtgcatgttattgggacttgtattataggtgatggtatgtgagaatccagttgggactcgctgttgccatcctctttgttgtatctggttttcatcactagactcagcaacccttctcaccttaactgccaccttccctacactctcagtttacagaggccactgggcctctggctgcagaatacaaagtcccgggctgttagaggagtcctttcctctctgcctgccctttcctgtccctccctcgaattctctctccccgtaagtgatgctggaaaagtcataggactggcaaagcaactgtttaaaccctttgtaaccggggccttgcccccacctcctgtcttttctccttgccttccccactcctgtgtcctcccatctatcctgtctttcctttcctcctctcagtgtcctcagcacccacaaggaattttcctatcactgtgaactttgctggtacagaggaataatatctgccttcacctttttttttttggaccatagctagccagtcatttcttaaacctcccttcctaaaatctggggggtcggggggaaagaaaaaaaaagccttagtggcctggttgttcaaaggataagaatagctttatcctgcactcagtacccgaactcacttcagtatgcttactgaggccatgagaacctgaggggcatctgcccaggacaggagccatggcatatgacaaagaccaatgagggaccaggaaaaaaagtgatgtcccctttccctgccacctccagcctctgccagcaatgagctgtccccctcccaccctacacagtagctggtcagggctgagtacagtcctgggggtaaggggatgacatgcccaggtgtcagctcaaaggatctctgcatcatcttgaggtgggaggcagggaaaggagcgccaatgaggttccctgcaacccccgccctccagcccaccgcccaaccttttacaaatggcattttcttaattgaaaatccgggaagcaggtgtgattacttttttgctcgtagatattgtcctaagttggaattctcccactgccctaaaactttccctagtagtcctttaaactcccccctccctttttggtagctgttttctccgtcctctctccacctgccctcttatctaggagctgtttgtaagcacgatttttttaacaggttatattgtacaggatcaatattttgctttttaacaaggatatttatgtaataagaaactttgccttaggcaggtgttggccagaaaagtccagattcctctgggatcccaccctggcctctcctggaactctgaacctgctgtggaaggaattggccatgaccttcacctctggagagtagggtctatggcgagggaaaagggtgttcaccatgataacctagtgcctccatagaggggtttggaaaaattccagtccgatttctttgtgtgtcagctgacttccttagctgattgttcccacttgcacctctccacctttggcactagaactcctgagacaccacttctcatgcttctccctccctaccagcggtcaaggctttggagccactcttttgtaactccagattatttaaagagaaaagtacaagacagaaatcttctagcactttgtaaacacagtgaataacctcttggagtatttttggctttatataaaacaaggtttttaattgtaaagtataagtgccattagaaaatgcacagggcatatctttgttaaagtagatttttcaatgttttacagaattacattttcaaaaaaaggtttttataatgaagttgtttattaaaaacttctgaatgatgtgtt

SEQ ID NO: 130704 - DNA, 1491 bp, Artificial Sequence
  derived and/or modified sequence
atgacaaccttcttcacctctgtgccaccatggattcaagatgccaagcaggaagaagaggtgggatggaagctggttccgagacctcggggccgcgaggcagagagccaagtcaagtgccaatgcgagatctccggaacaccattttcgaatggggagaagctgcggccgcacagcctgccccagccagaacagcggccctattcatgtcctcaactgcactgtgggaaagcctttgccagtaagtataagctctatcgacatatggccacccactcagcacagaagcctcaccaatgcatgtattgcgacaaaatgtttcaccggaaagaccacctcaggaaccacctccaaacgcatgatccgaacaaagaggcattgcattgcagtgagtgtggaaaaaactacaacaccaagctggggtataggagacatctggccatgcacgctgcttcatccggcgaccttagttgcaaggtttgcctgcagaccttcgagtcgacacaggctcttttggagcatctgaaagcccattccaggcgagtggctggcggggccaaggaaaagaagcacccctgcgaccattgcgacagacgattctatacacggaaggacgtgcgccgacaccttgtggtccatactggcaggaaggatttcctctgtcaatactgcgcccagaggtttgggcggaaagaccacctgaccaggcacgtcaaaaagtctcacagccaggagctgctcaagattaaaactgagcccgtcgatatgctgggcctcctaagctgctcctccacagtgtccgtaaaagaggaactttcgcctgtgctctgcatggcttcccgggacgtgatgggcaccaaggccttcccagggatgctgcctatgggtatgtatggagctcatattccaaccatgccaagcactggtgttccacactcattggtccacaacaccttgccaatgggaatgtcatacccccttgaatccagtccaatctcgtcgcccgcacagttgcctcctaagtatcagctagggagtacttcgtatctgcccgacaaactcccaaaggtggaggtggacagctttctggctgaacttcccggctctctttctctgtcatcggccgagcctcagcctgccagcccacagcctgccgctgccgcagcgctgttagatgaggccctgttggctaaatcccctgccaacctctccgaggcactgtgcgccgcgaacgtggacttctcacacctgttggggtttttaccgctgaacttgcccccatgtaacccacctggcgccacaggtggccttgttatgggatacagccaggcggaggcccagcctctacttactaccttgcaggcccagccacaagactcaccaggagccgggggccccttgaattttggcccccttcattctctgccgcctgttttcacctcggggctgtcaagcaccaccctgcccagatttcaccaggctttccaatag

SEQ ID NO: 130705 - DNA, 1491 bp, Artificial Sequence
  derived and/or modified sequence
atgaccaccttcttcacctctgtgcccccctggatccaggatgccaagcaggaggaggaggtgggctggaagctggtgccccggccccggggccgggaggccgagagccaggtgaagtgccagtgtgagatcagcggcacccccttcagcaatggagagaagctgcggccccacagcctgccccagcctgagcagaggccctacagctgcccccagctgcactgcggcaaggcctttgccagcaagtacaagctgtaccgccacatggccacccacagcgcccagaagccccaccagtgcatgtactgtgacaagatgttccacaggaaggaccacctgaggaaccacctgcagacccatgaccccaacaaggaggccctgcactgcagtgaatgtgggaagaactacaacaccaagctgggctacagaagacacctggccatgcacgccgccagcagcggggacctgagctgcaaggtgtgcctgcagacctttgagagcacccaggccctgctggagcacctgaaggcccacagccggcgggtggccggcggggccaaggagaagaagcacccctgtgaccactgtgaccggcgcttctacaccaggaaggatgtgagaagacacctggtggtgcacacaggcaggaaggacttcctgtgccagtactgtgcccagcgcttcggcaggaaggaccacctgaccaggcatgtgaagaagagccacagccaggagctgctgaagatcaagacagagcctgtggacatgctgggcctgctgagctgcagcagcacagtgtctgtgaaggaggagctgagccctgtgctgtgcatggccagcagagatgtgatgggcaccaaggccttccctggcatgctgcccatgggcatgtacggggcccacatccccaccatgcccagcactggagtgccccacagcctggtgcacaacaccctgcccatgggcatgagctaccccctggagagcagccccatcagcagccctgcccagctgccccccaagtaccagctgggcagcaccagctacctgcctgacaagctgcccaaggtggaggtggacagcttcctggccgagctgcccggcagcctgagcctgagcagcgctgagccccagcctgccagcccccagcctgctgctgctgctgccctgctggatgaggccctgctggccaagagccctgccaacctgtctgaggccctgtgtgccgccaacgtggacttcagccacctgctgggcttcctgcccctgaacctgcccccctgcaaccccccaggggccaccggcggcctggtgatgggctacagccaggccgaggcccagcccctgctgaccaccctgcaggcccagccccaggacagccctggagctgggggccccctgaactttggccccctgcacagcctgccccctgtgttcaccagcggcctgagcagcaccaccctgccccgcttccaccaggccttccagtag

SEQ ID NO: 130706 - DNA, 1491 bp, Artificial Sequence
  derived and/or modified sequence
atgaccaccttcttcaccagcgtgcccccctggatccaggacgccaagcaggaagaggaggtgggctggaagctcgtgcccagacctcgaggcagagaggccgagagtcaagtcaaatgccagtgcgagatttccggcacacctttctctaatggagagaaactgcgacctcactccctgccccagccagagcagaggccctacagctgtccccagctgcattgcgggaaggcttttgccagtaagtacaagctgtatcgccacatggccacgcactccgcacagaagccacaccaatgtatgtactgtgataagatgtttcacagaaaggatcacctgcgcaaccacctgcagactcatgatcccaacaaggaagcgttgcactgttctgaatgtggcaagaactataatacgaaactgggatacaggcggcatctggccatgcacgctgcatcttctggagatctgagctgtaaagtttgcctccagacatttgaatcaactcaagctctgcttgagcacctgaaggcccatagtaggagagttgcaggaggtgcaaaggaaaagaaacacccatgcgaccactgcgaccggcgcttctatacgcggaaagacgtgcgtagacatttggtagtccataccggccggaaggacttcctctgtcagtattgcgcccagcgcttcgggcgcaaagatcacctgacgcgtcatgtgaagaaatctcatagccaggaattgttaaagattaagactgagcccgtggatatgctgggtctgctgtcatgctcctcaacggtatctgtaaaggaagaactcagccccgtgttatgtatggcttctcgcgatgtgatgggcaccaaagcgtttcccggtatgctgcctatgggaatgtatggggcccacattccaactatgccgtccaccggggtgccacactctctggttcataacacactgcctatgggaatgtcatatcctctggaatccagtcctatctcatctccggctcagctccccccaaagtaccagctaggttcaacttcttatttgcctgataaactgcccaaagtggaagtggattcgtttcttgccgaactacccgggtctctgtcactctcttccgcagaacctcagcccgccagccctcagcctgcggccgctgccgcactgctggatgaggccctgctggccaagagcccggcaaatctgtccgaggctttgtgcgccgctaatgtagacttctcacacctcctcggattcctgccactcaatctgccaccttgcaacccacctggcgcaaccggtgggcttgtaatgggatactcccaggcagaagcacagcctctgctgaccactctccaggcccagcctcaggatagccctggagcaggtggccccctcaacttcggcccgctccatagtcttccccctgtatttactagcggactgtccagtaccactctgcctcgctttcaccaggcgttccagtag

SEQ ID NO: 130707 - DNA, 5705 bp, Artificial Sequence
  derived and/or modified sequence
cgcggcaccgccccctccacgacccgagcgcccgctcgcgcggctcccacaatgcaccgcacaatggcccgaccgccgccactaccggggcctgagggggcctggcggagcccgagcgcggcccggcccgcagcgtggggccccgagcgcggtgaagagattgttttctgaaagctgcgttggaggctgtgacagagctgagagcctgtgtggagcggatggggaggctttctcaataacatggccctttgccattagccttgccatgaccacatttttcaccagcgtccccccctggattcaagatgcaaagcaggaggaggaagtgggctggaaactagttcccaggcctcggggccgggaggcggagagtcaagtgaagtgccaatgtgaaatttcgggaacacctttctcaaatggggagaagctgaggcctcacagcctcccgcaaccagagcagagaccatatagctgccctcagctgcactgtggcaaggcttttgcttccaaatacaagctgtataggcacatggccacccactcagcccagaaaccccaccagtgtatgtactgtgataagatgtttcaccgcaaggaccatctgcggaaccatctgcagacccatgatcctaacaaagaggccctccactgctctgagtgcggtaagaattacaatacgaagctgggctaccggcgccacctggccatgcatgctgccagcagcggtgacctcagctgcaaggtgtgcctgcagacctttgagagtacccaggccctgctagagcacctgaaggcccactcacgccgggtagcaggcggtgccaaggagaagaagcacccctgtgaccactgcgaccggcggttctatactcgtaaggatgtacggcggcacctagtggtgcacacaggccgtaaggacttcctgtgccagtactgtgcccagcggtttggccgtaaggaccacctgacgcgtcatgtcaagaagagccactcgcaggagctgctcaagatcaagacagagcccgtggacatgttaggcctactcagctgcagctccacagtcagtgtgaaggaagagctgagccctgtgctgtgcatggcctctcgggacgtaatggggaccaaggccttccctggcatgttgcccatgggcatgtatggtgcccacatccctaccatgcccagcacgggcgtgccacactccctggtgcacaacacgctgcccatgggtatgagctaccctctggaatcctcacctatctcttccccagctcagctccctccaaaataccagcttggatctacctcatacttgcccgacaaattgcccaaagtggaggtggatagttttctggcggagcttcctggaagcctgtctctctcatccgctgaaccccagcccgcctcacctcagccggcggcagctgcggccctcctagatgaagcactgcttgccaagagccccgccaacctctctgaggccctctgcgctgctaatgtggacttctcccacctactgggctttcttccactcaacctgcccccgtgtaacccacctggggccacaggaggcctggtcatgggctactcccaggctgaggcacagcccctgcttaccactttgcaagctcagcctcaagattccccaggagctgggggaccactgaactttgggcctctgcactccttgcctcctgtcttcacgtctggcctgagtagcaccaccctgcctcgtttccatcaagcattccagtagcccccacagaggccctcagctcagtttttggctctgttatggagccttagtacccaccccgtctgtgtcccccatgaaggcagctgagctttcagagctgggttcaaaaaaaaaaattccagtgtctgtatacaggagcacttggtttgggggttcaggctctaggatcgattccagaaggagccttgagccccaaccccgtgaaaagatctcataccgtaggacttcaggtattatttacttttatttttttgacctgaatcgggagccacacttggccctcttcctctccaaagcgccagaacctccttctctttggagaatggggaggcctcttggagacacagagggtttcaccttggatgacctctagagaaattgcccaagaagcccaccttctggtcccaacctgcagaccccacagcagtcagttggtcaggccctgctgtagaaggtcacttggctccattgcctgcttccaaccaatgggcaggagagaaggcctttatttctcgcccacccattcctcctgtaccagcacctccgttttcagtcagtgttgtccagcaacggtaccgtttacacagtcacctcagacacaccatttcacctcccttgccaagctgttagccttagagtgattgcagtgaacactgtttacacaccgtgaatccattcccatcagtccattccagttggcaccagcctgaaccatttggtacctggtgttaactggagtcctgtttacaaggtggagtcggggcttgctgacttctcttcatttgaggtcacatttttcccccgtggggaaataaactgactttggactgcttcagtctctgccatcttccatgactgcatttgttcctgcctgcctcggcggtatccacagaagacaggcaagaggattggagcagttttctcacaggtctgcaattctgtttttctccaagtacattatgaccccctcatccttctcttgaactggagaggggaagaaatgaaaggcatgcccacgtccgtcacctccccatcccctagtccccaccttgaacatcatgagctgttgttattagtcttggaagcagagtctgggttggtgtggatagcaaaggaggaagtctgagcccctcattggtcttcctcccacctgtcccttttccgggaagttgtggaattgttggaagaagagtttgcagaaggttaggaatgggtagatagctaagtcctaatctatgggtacattgttgtgtcccaaaccaaaattttccttatccacaatgtcccttctgtctcttccactttacagtggactcggccactgtgcataggcttctctgctctccatcaaatcacttccactttcctgtgcccccacccccgcctccagttttccgctagtatccggcaaggtttcttgcaacaaatgattagttcttttcttctgactcgtggggctccctgctgcagagagcacagcccttgcctggagcccaggaaccccatccttgcttcatctcagttcttcatgggcttcactcttcccactcacggaagggaggtagctcagggacctccactgtgggacccttgagacgcttccactctgattcagaaacacacttctacctctttactgttaactcttaacagatgcagtcagcagtttctgggcacttctctcagtaggtgcctcatgctgacttctccagtagggtttcaggacaaactaccaaggaattgcctcagcctcctaccagtcctccctcacccaccttctgtctaggttcacttggtttgtcatcaggaactgagcaggtccaggactcagctttctgcttcagcctaagccagtactccttgtttgaggtaaaagccttaaaatttagctccctagctcttgattagaagcaatttggagtaagtgtgttttgatttaggcagggtagcttgggatacctttttaaaaacaccagatattaaaatgtctggcaaggttagaatcagactagatgatttgcttctaaaaattagtttcagtgagtcccagggactaattaaggtttattttaaaaagtgtctaccttggtacgcagccacctcctgcatgctgtgcatgttattgggacttgtattataggtgatggtatgtgagaatccagttgggactcgctgttgccatcctctttgttgtatctggttttcatcactagactcagcaacccttctcaccttaactgccaccttccctacactctcagtttacagaggccactgggcctctggctgcagaatacaaagtcccgggctgttagaggagtcctttcctctctgcctgccctttcctgtccctccctcgaattctctctccccgtaagtgatgctggaaaagtcataggactggcaaagcaactgtttaaaccctttgtaaccggggccttgcccccacctcctgtcttttctccttgccttccccactcctgtgtcctcccatctatcctgtctttcctttcctcctctcagtgtcctcagcacccacaaggaattttcctatcactgtgaactttgctggtacagaggaataatatctgccttcacctttttttttttggaccatagctagccagtcatttcttaaacctcccttcctaaaatctggggggtcggggggaaagaaaaaaaaagccttagtggcctggttgttcaaaggataagaatagctttatcctgcactcagtacccgaactcacttcagtatgcttactgaggccatgagaacctgaggggcatctgcccaggacaggagccatggcatatgacaaagaccaatgagggaccaggaaaaaaagtgatgtcccctttccctgccacctccagcctctgccagcaatgagctgtccccctcccaccctacacagtagctggtcagggctgagtacagtcctgggggtaaggggatgacatgcccaggtgtcagctcaaaggatctctgcatcatcttgaggtgggaggcagggaaaggagcgccaatgaggttccctgcaacccccgccctccagcccaccgcccaaccttttacaaatggcattttcttaattgaaaatccgggaagcaggtgtgattacttttttgctcgtagatattgtcctaagttggaattctcccactgccctaaaactttccctagtagtcctttaaactcccccctccctttttggtagctgttttctccgtcctctctccacctgccctcttatctaggagctgtttgtaagcacgatttttttaacaggttatattgtacaggatcaatattttgctttttaacaaggatatttatgtaataagaaactttgccttaggcaggtgttggccagaaaagtccagattcctctgggatcccaccctggcctctcctggaactctgaacctgctgtggaaggaattggccatgaccttcacctctggagagtagggtctatggcgagggaaaagggtgttcaccatgataacctagtgcctccatagaggggtttggaaaaattccagtccgatttctttgtgtgtcagctgacttccttagctgattgttcccacttgcacctctccacctttggcactagaactcctgagacaccacttctcatgcttctccctccctaccagcggtcaaggctttggagccactcttttgtaactccagattatttaaagagaaaagtacaagacagaaatcttctagcactttgtaaacacagtgaataacctcttggagtatttttggctttatataaaacaaggtttttaattgtaaagtataagtgccattagaaaatgcacagggcatatctttgttaaagtagatttttcaatgttttacagaattacattttcaaaaaaaggtttttataatgaagttgtttattaaaaacttctgaatgatgtgttt

SEQ ID NO: 130708 - DNA, 1491 bp, Artificial Sequence
  derived and/or modified sequence
atgaccactttcttcacctcggtgcccccttggatccaggacgcaaaacaggaggaggaggtcgggtggaaacttgtgcccagaccaaggggaagggaagctgaatctcaggtgaagtgtcagtgtgagatctctggcaccccatttagtaatggagagaagctcagacctcacagtctgcctcagcctgagcaacggccttattcctgtccccagttacattgcggaaaagccttcgccagtaaatacaaactgtatagacacatggcgacacacagcgcacagaaaccccatcagtgcatgtattgcgacaagatgtttcaccggaaagaccacctcagaaatcacctccagactcacgatcccaacaaggaggccctgcattgttcagaatgtggaaagaactacaataccaagctgggctaccgacgccacctcgccatgcacgccgcaagtagtggggacttgagttgtaaagtctgcttacaaacctttgagtccactcaggcactactcgagcacctcaaggctcattcacggcgtgtcgccggaggtgcgaaagagaaaaaacatccgtgcgatcattgcgacagaaggttttatacaaggaaagacgtcaggagacacctggtggtccacaccggccgtaaagatttcctctgccagtactgtgcccaacgattcgggaggaaagaccacctaacaagacacgtgaagaagtcacactcacaggagctgctcaaaatcaagaccgagccagtcgacatgctgggtcttctgtcttgctccagcaccgtcagcgttaaggaggaactgtccccagttctgtgtatggcctctagggacgtgatggggaccaaagcctttcctggaatgctccccatgggcatgtacggtgctcatataccgaccatgccttcgaccggcgtcccccattcgttagttcataacaccctccccatggggatgagctaccctttagagagtagtcctatctctagtcccgcacaactccccccaaagtaccagctcggatcaacgagctacctgcccgataaattacccaaggtggaagtggactccttcctggcagagcttcctggatctttgtccctgagttcagctgagccccagcctgcttccccccagccagccgctgccgcagctctgctggatgaggcactgttagccaagagccctgccaacctgtcagaagctctctgtgccgctaatgtggacttctctcacctgcttggattcttaccgcttaacctccctccatgtaatcctcccggtgcgaccggaggcctggttatgggctacagccaggctgaagcacaacctctactcaccaccttacaggcccagccacaggattctcctggagccggagggccactgaacttcggacctcttcactcactgcctccagtttttacatcggggctgagctccactactctgccaaggttccatcaggcctttcagtag

SEQ ID NO: 130709 - DNA, 1491 bp, Artificial Sequence
  derived and/or modified sequence
atgaccaccttcttcaccagcgtgcccccctggatccaggacgccaagcaggaggaggaggtgggctggaagctggtgcccagacccagaggcagagaggccgagagccaggtgaagtgccagtgcgagatcagcggcacccccttcagcaacggcgagaagctgagaccccacagcctgccccagcccgagcagagaccctacagctgcccccagctgcactgcggcaaggccttcgccagcaagtacaagctgtacagacacatggccacccacagcgcccagaagccccaccagtgcatgtactgcgacaagatgttccacagaaaggaccacctgagaaaccacctgcagacccacgaccccaacaaggaggccctgcactgcagcgagtgcggcaagaactacaacaccaagctgggctacagaagacacctggccatgcacgccgccagcagcggcgacctgagctgcaaggtgtgcctgcagaccttcgagagcacccaggccctgctggagcacctgaaggcccacagcagaagagtggccggcggcgccaaggagaagaagcacccctgcgaccactgcgacagaagattctacaccagaaaggacgtgagaagacacctggtggtgcacaccggcagaaaggacttcctgtgccagtactgcgcccagagattcggcagaaaggaccacctgaccagacacgtgaagaagagccacagccaggagctgctgaagatcaagaccgagcccgtggacatgctgggcctgctgagctgcagcagcaccgtgagcgtgaaggaggagctgagccccgtgctgtgcatggccagcagagacgtgatgggcaccaaggccttccccggcatgctgcccatgggcatgtacggcgcccacatccccaccatgcccagcaccggcgtgccccacagcctggtgcacaacaccctgcccatgggcatgagctaccccctggagagcagccccatcagcagccccgcccagctgccccccaagtaccagctgggcagcaccagctacctgcccgacaagctgcccaaggtggaggtggacagcttcctggccgagctgcccggcagcctgagcctgagcagcgccgagccccagcccgccagcccccagcccgccgccgccgccgccctgctggacgaggccctgctggccaagagccccgccaacctgagcgaggccctgtgcgccgccaacgtggacttcagccacctgctgggcttcctgcccctgaacctgcccccctgcaacccccccggcgccaccggcggcctggtgatgggctacagccaggccgaggcccagcccctgctgaccaccctgcaggcccagccccaggacagccccggcgccggcggccccctgaacttcggccccctgcacagcctgccccccgtgttcaccagcggcctgagcagcaccaccctgcccagattccaccaggccttccagtag

SEQ ID NO: 130710 - protein, 335 aa, Artificial Sequence
  derived and/or modified sequence
MGHPPLLPLLLLLHTCVPASWGLRCMQCKTNGDCRVEECALGQDLCRTTIVRLWEEGEELELVEKSCTHSEKTNRTLSYRTGLKITSLTEVVCGLDLCNQGNSGRAVTYSRSRYLECISCGSSDMSCERGRHQSLQCRSPEEQCLDVVTHWIQEGEEGRPKDDRHLRGCGYLPGCPGSNGFHNNDTFHFLKCCNTTKCNEGPILELENLPQNGRQCYSCKGNSTHGCSSEETFLIDCRGPMNQCLVATGTHEPKNQSYMVRGCATASMCQHAHLGDAFSMNHIDVSCCTKSGCNHPDLDVQYRSGAAPQPGPAHLSLTITLLMTARLWGGTLLWT

SEQ ID NO: 130711 - DNA, 1008 bp, Artificial Sequence
  derived and/or modified sequence
atgggccacccccccctgctgcccctgctgctgctgctgcacacctgcgtgcccgccagctggggcctgagatgcatgcagtgcaagaccaacggcgactgcagagtggaggagtgcgccctgggccaggacctgtgcagaaccaccatcgtgagactgtgggaggagggcgaggagctggagctggtggagaagagctgcacccacagcgagaagaccaacagaaccctgagctacagaaccggcctgaagatcaccagcctgaccgaggtggtgtgcggcctggacctgtgcaaccagggcaacagcggcagagccgtgacctacagcagaagcagatacctggagtgcatcagctgcggcagcagcgacatgagctgcgagagaggcagacaccagagcctgcagtgcagaagccccgaggagcagtgcctggacgtggtgacccactggatccaggagggcgaggagggcagacccaaggacgacagacacctgagaggctgcggctacctgcccggctgccccggcagcaacggcttccacaacaacgacaccttccacttcctgaagtgctgcaacaccaccaagtgcaacgagggccccatcctggagctggagaacctgccccagaacggcagacagtgctacagctgcaagggcaacagcacccacggctgcagcagcgaggagaccttcctgatcgactgcagaggccccatgaaccagtgcctggtggccaccggcacccacgagcccaagaaccagagctacatggtgagaggctgcgccaccgccagcatgtgccagcacgcccacctgggcgacgccttcagcatgaaccacatcgacgtgagctgctgcaccaagagcggctgcaaccaccccgacctggacgtgcagtacagaagcggcgccgccccccagcccggccccgcccacctgagcctgaccatcaccctgctgatgaccgccagactgtggggcggcaccctgctgtggacctag

SEQ ID NO: 130712 - DNA, 1008 bp, Artificial Sequence
  derived and/or modified sequence
atgggacaccctcctctgctgccactcctgctcttgctacacacctgcgtaccggcctcttggggtctccgctgcatgcagtgcaaaaccaacggagactgccgcgtcgaagagtgtgcactcggccaagatctatgtcgcactaccatagtgcggctgtgggaagagggagaggaattagaactggtagaaaaaagctgtacccattcggagaaaaccaatcgtacactgagctatagaactgggcttaaaataacatccctcaccgaggtggtctgtggcctggacctctgcaaccagggcaactcaggacgcgccgtgacatactccagatcccggtatctggagtgcatcagttgcggcagttccgacatgagctgcgagaggggccgacatcagtctcttcagtgtcggtcccccgaagaacagtgtctggatgtggtcacccattggattcaagaaggagaggagggccggcctaaagacgataggcatctgcgtgggtgtggatatttgcccggatgtccaggatcgaacggttttcacaataacgatacattccatttcctgaagtgctgcaatactaccaagtgcaatgaggggcccatcctggagctcgagaatctaccacagaatgggagacagtgctatagttgcaaagggaactctacacacggctgctcctcggaagagacttttctcattgactgtaggggaccaatgaaccagtgcctggtagctaccgggacccacgagccgaagaatcaatcatatatggtgcggggatgcgcaacggctagcatgtgtcagcatgcccacctaggagacgccttttccatgaaccacatcgatgtgtcgtgctgcactaaatctgggtgcaatcatcctgatctcgatgtccaatatcgctcgggcgccgcccctcagcccgggccagcccacctatcactcaccatcacgcttctgatgactgctcgcctttggggaggcacactgctctggacatag

SEQ ID NO: 130713 - DNA, 1008 bp, Artificial Sequence
  derived and/or modified sequence
atgggccacccccccctgctgcccctgctgctgctgctgcacacctgtgtgcctgcctcctggggcctgcgctgcatgcagtgcaagaccaatggagactgccgggtggaggagtgtgccctgggccaggacctgtgcaggaccaccatcgtgcggctgtgggaggagggggaggagctggagctggtggagaagagctgcacccacagcgagaagaccaacagaaccctgagctacagaacaggcctgaagatcaccagcctgacagaggtggtgtgtggcctggacctgtgcaaccagggcaacagcggccgggctgtgacctacagccgcagccgctacctggagtgcatcagctgtggcagcagtgacatgagctgtgagcggggccgccaccagagcctgcagtgccgcagccctgaggagcagtgcctggatgtggtgacccactggatccaggagggggaggagggccggcccaaggatgacagacacctgcggggctgcggctacctgcccggctgccccggcagcaatggcttccacaacaatgacaccttccacttcctgaagtgctgcaacaccaccaagtgcaatgaaggccccatcctggagctggagaacctgccccagaatggccggcagtgctacagctgcaagggcaacagcacccacggctgcagcagcgaggagaccttcctgattgactgccggggccccatgaaccagtgcctggtggccaccggcacccatgagcccaagaaccagagctacatggtgcggggctgtgccacagcctccatgtgccagcacgcccacctgggagatgccttctccatgaaccacattgatgtgtcctgctgcaccaagagcggctgcaaccacccagacctggatgtgcagtaccgcagcggggccgccccccagcccggccctgcccacctgagcctgaccatcaccctgctgatgacagcccggctgtggggcggcaccctgctgtggacctag

SEQ ID NO: 130714 - DNA, 1008 bp, Artificial Sequence
  derived and/or modified sequence
atgggccacccccccctgctgcccctgctgctgctgctgcacacctgtgtgccagcatcatggggcttacgatgcatgcagtgtaagacaaacggcgactgccgcgtcgaagaatgcgccctgggtcaggacctctgtcggacgaccatcgtacggttgtgggaagagggggaagagttagaacttgtcgagaagtcatgtacacacagcgagaaaaccaaccggaccctgagctaccgcaccgggcttaagatcacgtctttaacagaagtcgtctgcggactcgatctgtgtaaccaaggaaactctggacgcgctgtgacttactccaggagtaggtacctcgagtgtatttcatgcgggtcttcagatatgagttgcgaacgcggccgtcaccagagcctgcagtgtcgctcacccgaggagcaatgccttgatgttgttacccattggatacaagagggtgaagagggaaggccgaaggacgaccgacacttgagaggctgcggctatttgcccggatgtcctggctccaacggcttccacaataatgacactttccatttcttgaagtgctgcaacaccaccaagtgtaatgaagggccgattctggagctggagaatctccctcaaaatggccgccagtgttatagctgcaagggcaatagcactcatggctgctcgtcagaagagacttttctcattgactgccgggggccgatgaaccaatgtctggtcgctaccggtacccacgagcctaagaaccagagctacatggtgcgggggtgcgcgacagccagcatgtgccaacatgcacacctgggagacgctttctcaatgaatcatattgacgtttcctgctgtaccaagagcggatgcaatcaccctgacctcgacgtgcagtatcgcagcggcgccgcaccccagcctgggcctgcccacctttcacttacaataaccctgctgatgacagctcgactctggggcgggaccctgctgtggacctag

SEQ ID NO: 130715 - DNA, 1008 bp, Artificial Sequence
  derived and/or modified sequence
atgggccacccacccttgttgccgctgttactgttgctccacacgtgtgtgcccgcttcatgggggttgcgctgcatgcagtgtaagacgaacggcgactgtcgggtggaggagtgcgcactgggtcaggacctgtgtcgtacaactattgtaagactctgggaggaaggcgaagagctcgagctggtcgaaaagtcatgcacacattccgagaagacaaaccgtacactgtcatatagaaccggactgaagatcacaagcctaacagaggttgtctgcggtttggatttgtgcaaccagggcaatagcggcagagctgtgacttactcgcggagccgatacctcgaatgcatatcttgcggttcaagtgacatgagttgtgagaggggccgacatcagtcactgcaatgccggagccccgaggagcagtgcctggatgtggttacccattggatacaggagggcgaagagggtcggccaaaggacgatcggcacctgagggggtgtggttacctaccgggttgtccaggatccaatgggttccataataacgataccttccacttcctgaagtgctgcaacactactaaatgtaatgagggcccaatccttgaactggaaaacctaccccagaatgggcgtcagtgctattcttgtaagggcaactcaacgcatgggtgcagctctgaggagacctttctcattgactgccgcggacctatgaaccagtgtctggtggctactggaacacatgagccaaagaatcagtcatacatggttcggggttgtgctacagcttcaatgtgccagcatgcacaccttggggatgcgttcagcatgaaccatatcgacgtgtcttgttgcaccaagagcggatgcaaccaccctgatttggacgttcagtacaggtctggggcagccccacaaccaggcccagcccatctgagcttgacaatcactctgctgatgactgcaagactgtggggcggaacgctgctgtggacctag

SEQ ID NO: 130716 - DNA, 1548 bp, Artificial Sequence
  derived and/or modified sequence
cagggccgagccagccccttcaccaccagccggccgcgccccgggaagggaagtttgtggcggaggaggttcgtacgggaggagggggaggcgcccacgcatctggggctgactcgctctttcgcaaaacgtctgggaggagtccctggggccacaaaactgcctccttcctgaggccagaaggagagaagacgtgcagggaccccgcgcacaggagctgccctcgcgacatgggtcacccgccgctgctgccgctgctgctgctgctccacacctgcgtcccagcctcttggggcctgcggtgcatgcagtgtaagaccaacggggattgccgtgtggaagagtgcgccctgggacaggacctctgcaggaccacgatcgtgcgcttgtgggaagaaggagaagagctggagctggtggagaaaagctgtacccactcagagaagaccaacaggaccctgagctatcggactggcttgaagatcaccagccttaccgaggttgtgtgtgggttagacttgtgcaaccagggcaactctggccgggctgtcacctattcccgaagccgttacctcgaatgcatttcctgtggctcatcagacatgagctgtgagaggggccggcaccagagcctgcagtgccgcagccctgaagaacagtgcctggatgtggtgacccactggatccaggaaggtgaagaagggcgtccaaaggatgaccgccacctccgtggctgtggctaccttcccggctgcccgggctccaatggtttccacaacaacgacaccttccacttcctgaaatgctgcaacaccaccaaatgcaacgagggcccaatcctggagcttgaaaatctgccgcagaatggccgccagtgttacagctgcaaggggaacagcacccatggatgctcctctgaagagactttcctcattgactgccgaggccccatgaatcaatgtctggtagccaccggcactcacgaaccgaaaaaccaaagctatatggtaagaggctgtgcaaccgcctcaatgtgccaacatgcccacctgggtgacgccttcagcatgaaccacattgatgtctcctgctgtactaaaagtggctgtaaccacccagacctggatgtccagtaccgcagtggggctgctcctcagcctggccctgcccatctcagcctcaccatcaccctgctaatgactgccagactgtggggaggcactctcctctggacctaaacctgaaatccccctctctgccctggctggatccgggggacccctttgcccttccctcggctcccagccctacagacttgctgtgtgacctcaggccagtgtgccgacctctctgggcctcagttttcccagctatgaaaacagctatctcacaaagttgtgtgaagcagaagagaaaagctggaggaaggccgtgggccaatgggagagctcttgttattattaatattgttgccgctgttgtgttgttgttattaattaatattcatattatttattttatacttacataaagattttgtaccagtgg

SEQ ID NO: 130717 - protein, 1291 aa, Artificial Sequence
  derived and/or modified sequence
MAGAASPCANGCGPGAPSDAEVLHLCRSLEVGTVMTLFYSKKSQRPERKTFQVKLETRQITWSRGADKIEGAIDIREIKEIRPGKTSRDFDRYQEDPAFRPDQSHCFVILYGMEFRLKTLSLQATSEDEVNMWIKGLTWLMEDTLQAPTPLQIERWLRKQFYSVDRNREDRISAKDLKNMLSQVNYRVPNMRFLRERLTDLEQRSGDITYGQFAQLYRSLMYSAQKTMDLPFLEASTLRAGERPELCRVSLPEFQQFLLDYQGELWAVDRLQVQEFMLSFLRDPLREIEEPYFFLDEFVTFLFSKENSVWNSQLDAVCPDTMNNPLSHYWISSSHNTYLTGDQFSSESSLEAYARCLRMGCRCIELDCWDGPDGMPVIYHGHTLTTKIKFSDVLHTIKEHAFVASEYPVILSIEDHCSIAQQRNMAQYFKKVLGDTLLTKPVEISADGLPSPNQLKRKILIKHKKLAEGSAYEEVPTSMMYSENDISNSIKNGILYLEDPVNHEWYPHYFVLTSSKIYYSEETSSDQGNEDEEEPKEVSSSTELHSNEKWFHGKLGAGRDGRHIAERLLTEYCIETGAPDGSFLVRESETFVGDYTLSFWRNGKVQHCRIHSRQDAGTPKFFLTDNLVFDSLYDLITHYQQVPLRCNEFEMRLSEPVPQTNAHESKEWYHASLTRAQAEHMLMRVPRDGAFLVRKRNEPNSYAISFRAEGKIKHCRVQQEGQTVMLGNSEFDSLVDLISYYEKHPLYRKMKLRYPINEEALEKIGTAEPDYGALYEGRNPGFYVEANPMPTFKCAVKALFDYKAQREDELTFIKSAIIQNVEKQEGGWWRGDYGGKKQLWFPSNYVEEMVNPVALEPEREHLDENSPLGDLLRGVLDVPACQIAIRPEGKNNRLFVFSISMASVAHWSLDVAADSQEELQDWVKKIREVAQTADARLTEGKIMERRKKIALELSELVVYCRPVPFDEEKIGTERACYRDMSSFPETKAEKYVNKAKGKKFLQYNRLQLSRIYPKGQRLDSSNYDPLPMWICGSQLVALNFQTPDKPMQMNQALFMTGRHCGYVLQPSTMRDEAFDPFDKSSLRGLEPCAISIEVLGARHLPKNGRGIVCPFVEIEVAGAEYDSTKQKTEFVVDNGLNPVWPAKPFHFQISNPEFAFLRFVVYEEDMFSDQNFLAQATFPVKGLKTGYRAVPLKNNYSEDLELASLLIKIDIFPAKQENGDLSPFSGTSLRERGSDASGQLFHGRAREGSFESRYQQPFEDFRISQEHLADHFDSRERRAPRRTRVNGDNRL

SEQ ID NO: 130718 - DNA, 3876 bp, Artificial Sequence
  derived and/or modified sequence
atggccggcgccgccagcccctgcgccaacggctgcggccccggcgcccccagcgacgccgaggtgctgcacctgtgcagaagcctggaggtgggcaccgtgatgaccctgttctacagcaagaagagccagagacccgagagaaagaccttccaggtgaagctggagaccagacagatcacctggagcagaggcgccgacaagatcgagggcgccatcgacatcagagagatcaaggagatcagacccggcaagaccagcagagacttcgacagataccaggaggaccccgccttcagacccgaccagagccactgcttcgtgatcctgtacggcatggagttcagactgaagaccctgagcctgcaggccaccagcgaggacgaggtgaacatgtggatcaagggcctgacctggctgatggaggacaccctgcaggcccccacccccctgcagatcgagagatggctgagaaagcagttctacagcgtggacagaaacagagaggacagaatcagcgccaaggacctgaagaacatgctgagccaggtgaactacagagtgcccaacatgagattcctgagagagagactgaccgacctggagcagagaagcggcgacatcacctacggccagttcgcccagctgtacagaagcctgatgtacagcgcccagaagaccatggacctgcccttcctggaggccagcaccctgagagccggcgagagacccgagctgtgcagagtgagcctgcccgagttccagcagttcctgctggactaccagggcgagctgtgggccgtggacagactgcaggtgcaggagttcatgctgagcttcctgagagaccccctgagagagatcgaggagccctacttcttcctggacgagttcgtgaccttcctgttcagcaaggagaacagcgtgtggaacagccagctggacgccgtgtgccccgacaccatgaacaaccccctgagccactactggatcagcagcagccacaacacctacctgaccggcgaccagttcagcagcgagagcagcctggaggcctacgccagatgcctgagaatgggctgcagatgcatcgagctggactgctgggacggccccgacggcatgcccgtgatctaccacggccacaccctgaccaccaagatcaagttcagcgacgtgctgcacaccatcaaggagcacgccttcgtggccagcgagtaccccgtgatcctgagcatcgaggaccactgcagcatcgcccagcagagaaacatggcccagtacttcaagaaggtgctgggcgacaccctgctgaccaagcccgtggagatcagcgccgacggcctgcccagccccaaccagctgaagagaaagatcctgatcaagcacaagaagctggccgagggcagcgcctacgaggaggtgcccaccagcatgatgtacagcgagaacgacatcagcaacagcatcaagaacggcatcctgtacctggaggaccccgtgaaccacgagtggtacccccactacttcgtgctgaccagcagcaagatctactacagcgaggagaccagcagcgaccagggcaacgaggacgaggaggagcccaaggaggtgagcagcagcaccgagctgcacagcaacgagaagtggttccacggcaagctgggcgccggcagagacggcagacacatcgccgagagactgctgaccgagtactgcatcgagaccggcgcccccgacggcagcttcctggtgagagagagcgagaccttcgtgggcgactacaccctgagcttctggagaaacggcaaggtgcagcactgcagaatccacagcagacaggacgccggcacccccaagttcttcctgaccgacaacctggtgttcgacagcctgtacgacctgatcacccactaccagcaggtgcccctgagatgcaacgagttcgagatgagactgagcgagcccgtgccccagaccaacgcccacgagagcaaggagtggtaccacgccagcctgaccagagcccaggccgagcacatgctgatgagagtgcccagagacggcgccttcctggtgagaaagagaaacgagcccaacagctacgccatcagcttcagagccgagggcaagatcaagcactgcagagtgcagcaggagggccagaccgtgatgctgggcaacagcgagttcgacagcctggtggacctgatcagctactacgagaagcaccccctgtacagaaagatgaagctgagataccccatcaacgaggaggccctggagaagatcggcaccgccgagcccgactacggcgccctgtacgagggcagaaaccccggcttctacgtggaggccaaccccatgcccaccttcaagtgcgccgtgaaggccctgttcgactacaaggcccagagagaggacgagctgaccttcatcaagagcgccatcatccagaacgtggagaagcaggagggcggctggtggagaggcgactacggcggcaagaagcagctgtggttccccagcaactacgtggaggagatggtgaaccccgtggccctggagcccgagagagagcacctggacgagaacagccccctgggcgacctgctgagaggcgtgctggacgtgcccgcctgccagatcgccatcagacccgagggcaagaacaacagactgttcgtgttcagcatcagcatggccagcgtggcccactggagcctggacgtggccgccgacagccaggaggagctgcaggactgggtgaagaagatcagagaggtggcccagaccgccgacgccagactgaccgagggcaagatcatggagagaagaaagaagatcgccctggagctgagcgagctggtggtgtactgcagacccgtgcccttcgacgaggagaagatcggcaccgagagagcctgctacagagacatgagcagcttccccgagaccaaggccgagaagtacgtgaacaaggccaagggcaagaagttcctgcagtacaacagactgcagctgagcagaatctaccccaagggccagagactggacagcagcaactacgaccccctgcccatgtggatctgcggcagccagctggtggccctgaacttccagacccccgacaagcccatgcagatgaaccaggccctgttcatgaccggcagacactgcggctacgtgctgcagcccagcaccatgagagacgaggccttcgaccccttcgacaagagcagcctgagaggcctggagccctgcgccatcagcatcgaggtgctgggcgccagacacctgcccaagaacggcagaggcatcgtgtgccccttcgtggagatcgaggtggccggcgccgagtacgacagcaccaagcagaagaccgagttcgtggtggacaacggcctgaaccccgtgtggcccgccaagcccttccacttccagatcagcaaccccgagttcgccttcctgagattcgtggtgtacgaggaggacatgttcagcgaccagaacttcctggcccaggccaccttccccgtgaagggcctgaagaccggctacagagccgtgcccctgaagaacaactacagcgaggacctggagctggccagcctgctgatcaagatcgacatcttccccgccaagcaggagaacggcgacctgagccccttcagcggcaccagcctgagagagagaggcagcgacgccagcggccagctgttccacggcagagccagagagggcagcttcgagagcagataccagcagcccttcgaggacttcagaatcagccaggagcacctggccgaccacttcgacagcagagagagaagagcccccagaagaaccagagtgaacggcgacaacagactgtag

SEQ ID NO: 130719 - DNA, 3876 bp, Artificial Sequence
  derived and/or modified sequence
atggccggagccgcttcaccatgcgccaacggatgtggtcctggcgcaccgagcgatgccgaggtgttgcacctgtgccgatcattggaggtgggtaccgttatgaccttgttctattcaaagaagtcccagagacctgaacgtaaaacatttcaggtgaaactggaaactcggcaaattacgtggagtcgtggggcagataagattgaaggcgctattgatattagggagattaaggaaattagaccaggcaagacctcccgagacttcgatcgctatcaggaagacccggctttccgcccagaccagagtcattgctttgtcattttatacggcatggaatttaggttaaaaactctcagcctgcaggctacatcagaggatgaagttaatatgtggatcaagggactgacttggctaatggaagacaccctgcaggcccctacccctttacagatcgagaggtggctgcggaagcagttctactcagtggacaggaacagggaagacaggatctccgctaaggatctcaaaaacatgttaagccaagtcaactacagggttcccaacatgcgctttctgcgcgagcggctgactgatctcgaacagcgaagcggagatatcacctacggacagtttgcgcagctttataggtctctcatgtacagcgcacagaagactatggacctgccctttctggaggcgagcaccctgagggcaggtgaacgtcccgagctctgccgcgtgtctctgccagagtttcaacagttcctacttgactaccagggagaactgtgggccgtggaccgcctgcaggtgcaggagttcatgttgagcttcctccgtgatcccctgcgcgaaatagaggagccttactttttcctcgacgaatttgtaactttcctcttttccaaagagaactccgtgtggaacagtcaactcgatgctgtgtgccccgatactatgaataaccctctgtcccactactggatcagttccagtcataatacctacctcaccggggaccagttcagctctgagagcagccttgaggcatatgcacgctgcctgaggatgggttgtcgatgtatcgagttggattgttgggatggacccgacgggatgccagtcatataccacgggcacacactaaccacaaaaattaaatttagtgacgtacttcataccattaaggaacacgcgtttgttgcgagcgagtaccccgtgatcctctcaattgaagaccattgtagtatcgcacagcagcgcaacatggctcagtacttcaagaaggttcttggcgatactcttctaactaaaccagtggagatcagcgccgacgggttaccatcccccaatcaactaaagcgcaaaatcctgatcaaacacaagaaactggccgagggctctgcatatgaagaggtgcctaccagcatgatgtactcagaaaatgacatttcgaacagcattaagaacggcatactgtacctcgaggatccagtcaaccacgaatggtacccccactactttgtgctcacgtccagtaagatttactatagcgaggagacctcctctgaccagggtaacgaagacgaagaggaaccaaaagaggtatcgtcttccaccgagttacacagtaatgaaaagtggtttcatggcaaactgggcgccggccgcgacggcagacacattgcagagcgactcctgacagagtattgcatcgagacaggcgccccggacggcagttttctggtaagggagtctgaaaccttcgttggggactataccctctcattttggcggaacggcaaagtgcaacactgcagaattcattcacggcaggatgctgggaccccaaaattctttctgaccgacaacctagtgtttgactccctgtacgatctcataacgcactatcaacaggtgcccttgaggtgcaatgagttcgagatgagattatcagaaccagtaccccaaactaacgcacacgaatccaaagagtggtatcacgcttcgctgacaagagcacaggcagagcatatgctgatgcgggtaccaagggacggggctttcctggtcagaaaacgaaatgaacccaactcatatgctataagctttagggctgagggcaagatcaaacactgccgagtacagcaagaaggtcagaccgttatgctgggcaactccgaatttgactcactcgtcgatctaatcagctactatgagaagcaccccctgtatagaaaaatgaagctgcgatacccaatcaacgaggaggctctggagaagatcggcacagcagagcctgactatggtgcactgtacgaggggaggaaccccggattctatgtggaggccaatcctatgcccacattcaagtgtgccgtgaaagccctctttgactacaaagcccagagggaggatgagctaaccttcatcaaatccgcaatcattcagaatgtggagaagcaagagggaggatggtggcgcggcgactacggtggaaaaaagcagttgtggttcccctccaattacgtcgaagagatggtcaatccggtggccctggaacccgagagggagcacctggacgagaactctccgctgggcgacttactcaggggtgtgttggacgtcccagcctgccagattgctattcgtcccgagggtaagaacaaccgtctctttgtcttctccatctccatggccagcgtggcacattggtccctagatgtcgcggctgattctcaggaggagcttcaagattgggttaagaaaattcgagaagtagctcagactgccgatgctcgccttacagaaggcaaaatcatggaaagacgtaaaaagatcgctctagaattatcggagttggttgtctactgccgccctgtgcctttcgatgaagagaagatcgggactgagcgagcctgttacagagacatgtcaagtttcccggagactaaagctgaaaaatacgtgaacaaggcgaaaggaaagaaatttcttcagtataataggttacaactgagtcgcatctatcccaagggccagcggctagattcttccaactatgaccctctcccgatgtggatttgtgggtctcaactcgtcgccctgaatttccagacccctgacaagccaatgcaaatgaatcaggcactgtttatgactggacggcattgtggatatgtgcttcaaccttccaccatgcgagatgaagcgttcgatccattcgataagtcatccctgcggggactggaaccctgcgcaatcagcatagaggtcctcggggcccgccacctgcctaagaacggcagaggcatcgtttgcccattcgtcgaaatcgaggtagccggcgccgaatacgattccaccaagcagaaaacggaattcgtagtggataacgggctcaatccagtgtggcctgcaaagcccttccatttccagatctccaatcccgagttcgcctttctgcggtttgttgtgtatgaggaagacatgttctctgatcagaactttctcgcccaagccaccttccctgtcaagggcctgaagaccggttacagagccgtgccactaaagaataactattcagaagacctggaactggcatcgctccttataaaaatagatatctttccagctaaacaggaaaatggtgacctcagccccttctccgggacctcactcagagagcgggggtcagacgcttcaggccagctctttcacggtcgagcacgggagggttcattcgaatctaggtatcagcagccatttgaggattttaggatatcccaggagcacctagctgaccattttgactcaagagagagacgagccccccggcggacacgggtgaacggtgacaatcgcctgtag

SEQ ID NO: 130720 - DNA, 3876 bp, Artificial Sequence
  derived and/or modified sequence
atggcaggtgccgcctcgccgtgcgctaacggatgcggaccgggggccccctccgatgccgaggtgctgcacctctgcaggtccttagaggtgggcactgttatgacattgttttattccaagaagtcacaacggcccgagaggaaaaccttccaggtgaagttggaaacccgacagatcacgtggagccgaggcgccgacaaaattgagggcgctattgatatcagagaaatcaaagagatccgaccagggaagacaagccgagatttcgatcgctatcaggaagaccctgctttcaggcccgaccagtcccattgctttgtgatcctatacggcatggagtttagacttaaaacgttgtccctccaggctacctctgaggatgaggtcaacatgtggatcaaaggtctaacatggctgatggaagataccttgcaggcccctactcccttgcagattgagaggtggctgaggaagcagttttactcggttgacagaaacagagaggacagaatctccgccaaggatttgaagaatatgttatctcaagtgaattaccgtgtccctaatatgagatttctgcgcgagcggctgacagacctggagcaaagaagcggagacatcacctatggccaattcgctcagctctaccggtctttaatgtacagcgctcagaagacaatggatctaccatttttagaagccagcactctgcgcgccggcgaacgcccagaactatgtagagtgtcgctgccagagtttcagcagttcctgctggactatcagggggaactgtgggcagtagaccgacttcaggtacaggagtttatgctctcatttctgcgcgaccccctccgggagattgaggaaccatacttctttctagatgagttcgttaccttccttttttctaaagaaaattcagtgtggaacagccaactggatgcagtctgccctgacactatgaacaatccgctgagccactactggatctcctcctcgcacaacacttaccttaccggggatcaattctcatcagagtcatctctagaggcctacgcaaggtgtctccggatgggatgcagatgcatcgaactcgactgctgggatggccctgacggcatgcccgtgatctaccacggacacacactgaccactaaaattaaattctccgatgtgttacacaccataaaagagcacgcttttgtggccagcgaatatcctgtaatcttaagtattgaggaccattgctcaatcgctcagcaacgcaacatggcccagtatttcaaaaaggtactgggcgatactttactgacaaaacctgtggagatctcggcagacggtctgcctagccccaaccaactgaaacgaaaaatactcatcaaacataaaaagctcgcagaaggcagtgcgtacgaagaggtccctacttcgatgatgtacagcgagaatgacatttccaactcaatcaagaacgggatcttatacctcgaagatccagtgaatcatgaatggtacccccactattttgtgctgaccagtagcaagatctattatagtgaggagacaagttcagatcaaggcaatgaagacgaagaagaaccaaaagaagtgagctcatccactgagctccatagtaatgagaagtggtttcacgggaagctcggcgcggggcgggacggccgccacattgcagaacgactgcttacagagtactgcattgagacaggcgctccagacggctcattccttgtgcgcgaatccgaaacattcgtgggcgactacacgctcagtttctggagaaatgggaaagtccagcattgccgaatacactctcggcaggacgctggaacaccaaagttttttctcaccgataatctggtcttcgattcgctgtacgacctcattacccactaccaacaggtccctcttcgttgtaacgaattcgaaatgcgcctatccgagccggtcccccaaaccaatgctcacgagtcaaaggaatggtaccatgccagtctgacccgagcgcaggctgagcacatgctcatgcgtgtcccccgcgacggcgcctttctggtcagaaagcgtaatgagcccaattcatacgctataagcttcagggccgaagggaagattaaacactgcagagttcagcaggaaggccagacagtgatgcttggcaattccgagtttgattcattggtagacctcatctcctattatgaaaaacatcccctctatcgtaagatgaagctccgctaccccattaacgaggaggcgctggaaaagattggcacagctgaaccggactacggagctctgtatgagggcagaaacccaggtttttatgtggaggctaacccaatgcctacctttaagtgtgccgtaaaagcgttgtttgattataaagctcagcgggaagatgagttaacatttatcaagtcggcaattatccagaacgtcgagaagcaagaagggggctggtggcggggagattatgggggtaagaaacaactgtggtttccatctaactacgtggaggagatggtgaacccagtagctttggagccagagagggagcacctggatgagaattcaccgttgggagatctactgagaggcgtgctggatgtgcccgcttgccaaattgcgatcaggcctgagggaaaaaacaaccgcttgtttgtcttttccatctctatggcttccgttgcccactggagtctggatgtcgcagccgattctcaagaggaactgcaggactgggtcaagaaaataagggaggtcgctcagactgccgatgccaggctgaccgagggaaaaatcatggaacgaagaaaaaaaatcgctctggagttgtctgagctcgtcgtctattgtcgacctgtgcccttcgatgaggagaagatcggcactgaaagggcttgttaccgcgatatgtcctctttcccagagactaaggcagagaagtacgtgaacaaggcaaagggaaaaaagttcctccagtacaatagactccagctgagtcgaatctaccccaaagggcagcgcttagacagtagcaattacgaccccctcccaatgtggatctgcggctctcaattggtggcgctcaattttcagacaccagataaaccaatgcagatgaatcaagctctgttcatgaccggccggcattgcggatacgttctacaaccctccacaatgcgcgacgaagccttcgatccattcgataaatcatccttaaggggattagagccctgtgcaatttccatcgaggtactgggagcgcgccacttgcccaagaacggacgaggcattgtgtgcccatttgtcgagatcgaagtagccggggccgagtacgattctacaaaacagaagacggagttcgttgttgacaacggcctgaacccagtgtggcctgccaagcctttccacttccagatcagcaatccggaattcgctttcctccgattcgtcgtgtatgaagaagatatgttcagtgaccagaacttcctggcacaggctactttccctgtgaaaggcctgaagaccggctacagagccgtcccccttaagaataattatagcgaagatctcgaactcgcctcactgctcataaaaattgacattttcccggctaagcaagagaatggggatttgtcaccattctcagggacgtccttgcgagagagaggatcagatgcatccgggcagctgtttcatggcagagcccgtgagggatcattcgaatcccgctatcagcagccctttgaggactttcgaatctcccaggagcacctggcagatcactttgactctcgcgagcgccgcgccccccgaagaaccagggttaacggcgacaatagactgtag

SEQ ID NO: 130721 - DNA, 3876 bp, Artificial Sequence
  derived and/or modified sequence
atggccggggccgccagcccctgtgccaacggctgcggccctggggcccccagtgatgctgaggtgctgcacctgtgccgcagcctggaggtgggcaccgtgatgaccctcttctacagcaagaagagccagaggcctgagaggaagaccttccaggtgaagctggagacccggcagatcacctggagcagaggagctgacaagattgaaggagccatcgacatccgggagatcaaggagatccggcctgggaagaccagccgggactttgaccgctaccaggaggaccctgccttccggccagaccagagccactgctttgtgatcctgtatggcatggagttccggctgaagaccctgagcctgcaggccaccagtgaagatgaggtgaacatgtggatcaagggcctgacctggctgatggaggacaccctgcaggcccccacccccctgcagatcgagcgctggctgaggaagcagttctacagcgtggacaggaacagagaagatcgcatcagcgccaaggacctgaagaacatgctgagccaggtgaactacagagtgcccaacatgaggttcctgcgggagcggctgacagacctggagcagaggtctggggacatcacctacggccagtttgcccagctgtaccgcagcctgatgtacagcgcccagaagaccatggacctgcccttcctggaggccagcaccctgcgggccggggagaggcctgagctgtgccgggtgtccctgcctgagttccagcagttcctgctggactaccagggcgagctgtgggccgtggaccggctgcaggtgcaggagttcatgctgtccttcctgcgggaccccctgcgggagattgaggagccctacttcttcctggatgaatttgtgaccttcctgttcagcaaggagaacagcgtgtggaacagccagctggatgctgtgtgcccagacaccatgaacaaccccctgagccactactggatcagcagcagccacaacacctacctgaccggggaccagttcagcagcgagagcagcctggaggcctatgcccgctgcctgaggatgggctgccgctgcatcgagctggactgctgggatggcccagatggcatgcctgtgatctaccacggccacaccctgaccaccaagatcaagttcagtgatgtgctgcacaccatcaaggagcacgcctttgtggccagcgagtaccctgtgatcctgagcattgaggaccactgcagcatcgcccagcagaggaacatggcccagtacttcaagaaggtgctgggggacaccctgctgaccaagcctgtggagatctctgcagatggcctgcccagccccaaccagctgaagaggaagatcctgatcaagcacaagaagctggccgagggcagcgcctatgaggaggtgcccacctccatgatgtacagtgaaaatgacatcagcaacagcatcaagaatggcatcctgtacctggaggaccctgtgaaccacgagtggtacccccactactttgtgctgaccagcagcaagatctactacagcgaggagaccagcagtgaccagggcaatgaagatgaggaggagcccaaggaggtgagcagcagcacagagctgcacagcaatgagaagtggttccacggcaagctgggcgccggcagagatggccgccacatcgccgagcggctgctgacagagtactgcatcgagaccggggccccagatggcagcttcctggtgcgggagagcgagacctttgtgggggactacaccctgtccttctggagaaatggcaaggtgcagcactgccgcatccacagccggcaggatgctggcacccccaagttcttcctgacagacaacctggtgtttgacagcctgtatgacctgatcacccactaccagcaggtgcccctgcgctgcaatgaatttgagatgaggctgtctgagcctgtgccccagaccaatgcccacgagagcaaggagtggtaccacgccagcctgacccgggcccaggccgagcacatgctgatgagggtgcccagagatggagccttcctggtgaggaagagaaatgagcccaacagctatgccatctccttccgggcagagggcaagatcaagcactgccgggtgcagcaggagggccagacagtgatgctgggcaacagcgagtttgacagcctggtggacctgatctcctactatgagaagcaccccctgtacaggaagatgaagctgcgctaccccatcaatgaggaggccctggagaagattggaacagctgagccagactatggagccctgtatgagggcaggaaccctggcttctacgtggaggccaaccccatgcccaccttcaagtgtgctgtgaaggccctgtttgactacaaggcccagagagaagatgagctgaccttcatcaagagcgccatcatccagaatgtggagaagcaggagggcggctggtggaggggggactatggaggcaagaagcagctgtggttccccagcaactacgtggaggagatggtgaaccctgtggccctggagcctgagcgggagcacctggatgagaacagccccctgggggacctgctgcggggcgtgctggatgtgcctgcctgccagatcgccatccggcctgagggcaagaacaaccggctgtttgtgttcagcatctccatggcctctgtggcccactggagcctggatgtggccgctgacagccaggaggagctgcaggactgggtgaagaagatccgggaggtggcccagacagcagatgcccggctgacagagggcaagatcatggagaggaggaagaagatcgccctggagctgtctgagctggtggtgtactgcaggcctgtgccctttgatgaggagaagattggaacagagcgggcctgctacagagacatgagcagcttccctgagaccaaggccgagaagtatgtgaacaaggccaagggcaagaagttcctgcagtacaaccggctgcagctgagccgcatctaccccaagggccagaggctggacagcagcaactatgaccccctgcccatgtggatctgtggcagccagctggtggccctgaacttccagaccccagacaagcccatgcagatgaaccaggccctcttcatgacaggccgccactgcggctacgtgctgcagcccagcaccatgagagatgaggcctttgacccctttgacaagagcagcctgcggggcctggagccctgtgccatcagcattgaggtgctgggcgcccggcacctgcccaagaatggccggggcatcgtgtgcccctttgtggagattgaggtggccggggctgaatatgacagcaccaagcagaagacagaatttgtggtggacaatggcctgaaccctgtgtggccagccaagcccttccacttccagatcagcaaccctgagtttgccttcctgcgctttgtggtgtatgaggaggacatgttcagtgaccagaacttcctggcccaggccaccttccctgtgaagggcctgaagacaggctacagagctgtgcccctgaagaacaactacagcgaggacctggagctggccagcctgctgatcaagattgacatcttccctgccaagcaggagaatggagacctgagccccttcagcggcaccagcctgcgggagcggggcagtgatgccagcggccagctgttccacggccgggcccgggagggcagctttgagagccgctaccagcagccctttgaggacttccgcatcagccaggagcacctggccgaccactttgacagccgggagcggcgggcccccaggaggaccagggtgaatggagacaaccggctgtag

SEQ ID NO: 130722 - DNA, 3876 bp, Artificial Sequence
  derived and/or modified sequence
atggccggcgccgccagcccctgcgccaacggctgcggccccggcgctccaagtgatgctgaggtactccacctctgtagatcacttgaagtcggcactgttatgacgctcttctactctaagaaaagccaaaggccagaaagaaagacattccaggtgaagttggagacacggcaaattacctggtccagaggcgccgacaaaatcgagggggccatcgacattcgtgagataaaagaaatccgccccggaaagacttctcgagacttcgatcgctaccaggaagatcccgcctttagacccgatcagagccactgctttgttattctctacggcatggaattccggctgaagactctgtccctccaggctacttctgaggatgaggtgaatatgtggatcaaggggctgacctggctgatggaggacaccctacaggctcccactccgctgcagattgagagatggttgcggaagcaattctactcagtcgatcggaacagagaggacagaatcagcgctaaagacctgaagaacatgctgtctcaggttaattatcgcgtgcccaacatgcgctttttgcgggagcggctgaccgatctggagcagagaagtggagatataacatacggtcagttcgctcaactgtacagatccttgatgtactcggctcaaaaaaccatggacctgccgtttctggaggcttctactctgagagccggggagcgtcctgaactgtgtagagtgagtcttcctgagtttcaacaatttcttctggactatcagggcgagttgtgggcggtggatcgccttcaggtccaggaatttatgctcagcttcctcagagacccactcagagaaatcgaagagccctatttcttcctggatgagtttgtcactttcttgttcagtaaagagaattccgtgtggaactcccagctggatgccgtctgtccagataccatgaacaatcccctgagtcattattggattagctcatctcacaacacctaccttactggagaccagttttcaagtgaaagcagccttgaggcatacgcacgctgcctccgcatggggtgcagatgcattgaactggattgttgggatgggccggatggaatgcctgttatctatcacggacacaccctgactaccaagataaaattcagcgacgtattgcatactatcaaagagcacgcatttgtagccagcgaatacccagtgatactgtcaatagaggaccactgctccattgcacaacagcgcaatatggctcaatacttcaagaaggtactgggcgacaccctcttaactaagcccgtggagatatctgcggacgggctcccatctcctaaccaactgaaacggaaaatcctgattaagcataaaaagctcgccgagggcagcgcatatgaagaagtgccaaccagcatgatgtatagcgaaaacgatatcagtaattccatcaaaaacggaatattatacttggaggaccccgttaaccacgaatggtacccacattatttcgtgctaacctcatctaaaatctattatagcgaggagacctccagtgatcaggggaacgaggatgaggaggagcctaaagaagtgagctcatctaccgaactccactccaacgagaagtggtttcacggaaagctgggtgccggccgggacggaaggcacatagccgaaaggctcctgaccgagtattgtatcgagacaggggcacctgatggatcctttctggtgagagagagcgaaacttttgtgggcgactacaccttgagtttctggcgcaacgggaaggtccagcactgtaggatccactcacgccaagatgctggaaccccgaagttcttcctgactgataacctggtttttgatagtctctatgatttgatcacacattaccagcaggtgcctctgcgctgtaatgagttcgagatgcggttatcagagccagtgccccaaacaaacgctcatgaatccaaagagtggtaccacgcttccctgacccgggcacaggcagagcacatgctcatgcgggtccctcgcgatggtgctttcctcgtacgcaaaaggaacgagcccaactcctacgcgattagtttccgtgccgaggggaaaatcaaacactgccgggtgcagcaagagggacaaactgtgatgctggggaactccgaatttgacagtctggtggatctgatctcgtactatgaaaagcaccctctttatcggaagatgaaactcaggtatccaatcaacgaggaagccctcgaaaagattggaacggcagagcccgactatggagccctttatgagggcagaaaccctggcttttacgttgaggccaacccgatgccgaccttcaagtgcgcagtaaaggcattgtttgattataaagcccaacgggaagacgagctaacattcataaagtccgcgataatccaaaacgtggaaaaacaggagggaggatggtggcggggggactacgggggcaaaaaacaactctggtttccatcgaattatgtggaagaaatggtcaatccagtagccctcgagcccgaacgcgagcacctggatgaaaactctcctctcggtgatttactcagaggcgtgcttgacgttccagcatgtcagatagccattagacctgagggcaagaataatagactttttgtcttcagtatttctatggcttctgtggcacattggtcccttgatgtggccgctgattctcaggaggagctgcaggactgggtcaaaaaaatcagagaggtggcccaaactgctgacgccaggctcactgagggtaaaatcatggaacgccgcaaaaagatcgccctcgaactgtcggaactggtggtttactgcaggcccgtccctttcgacgaggaaaagatagggactgagagagcatgctacagggatatgtcatccttcccagaaactaaggcagaaaagtacgtaaacaaggcaaaaggaaaaaagttcttacagtacaacagacttcagttatcccgaatttatccaaaggggcagcggttggattcctctaattatgacccacttcctatgtggatctgcggcagccagctggtcgcacttaattttcagaccccggataagccaatgcagatgaatcaagcattatttatgacagggcgacattgtgggtatgtgcttcagccatctacgatgcgtgacgaggcattcgatcccttcgataagtcatctctcaggggcctggagccttgcgccattagtatagaagtactaggtgcaaggcacctgcccaagaacggaaggggcatcgtctgtccattcgtcgagattgaggtggcaggcgcggaatacgactccacaaaacaaaagacggagttcgtggtcgataacggacttaatcccgtctggccagccaagccgttccatttccagatcagcaatcctgaattcgccttcctgaggttcgtagtttatgaagaggacatgttctccgatcagaatttccttgcgcaagctaccttccctgtgaaggggctcaagacgggctaccgcgctgtgcccctaaagaataattattccgaagatcttgagttagcgtcactcctcatcaagattgatattttccctgctaagcaggaaaacggagatctgtctcccttttccggcacaagcctgcgggagcgggggagtgatgcaagtggccaactgttccatggccgcgctcgggagggcagcttcgaaagtaggtatcagcagccatttgaggacttccgcatttcacaagaacatcttgcagaccacttcgattctcgcgagcgtagagccccccggcgaaccagggtgaacggggataatcgcctttag

SEQ ID NO: 130723 - DNA, 3876 bp, Artificial Sequence
  derived and/or modified sequence
atggccggcgccgccagcccctgcgccaacggctgcggccccggcgctccgagtgatgccgaggtgctccatctgtgtagatcgctggaggtgggcaccgtgatgacgttattttactcgaagaaatctcaaagacctgagcgtaagaccttccaggtcaaattggaaacccggcagataacctggagtaggggagcggacaaaattgaaggtgcaattgatatccgggagatcaaagagatccgacctggaaagacctctcgtgacttcgacaggtatcaggaggaccccgccttccgcccggaccagtctcactgcttcgtgatcctatatggcatggagtttagactgaagaccctatccttacaggcaaccagtgaggacgaagttaatatgtggatcaagggcctgacgtggctgatggaggataccctgcaagcccctaccccacttcagatcgaaagatggctccggaagcagttctactccgtggaccggaacagggaggaccggatctctgcaaaagatttgaagaatatgctgagtcaggtcaattatagagtccccaatatgagattcctgcgtgagcgcctcacagatctggaacagcggtcaggtgatataacctatggccagtttgcgcaactctaccgctccctcatgtatagcgcccagaagacaatggatcttcccttcctggaggcatctactctccgcgcaggggaaaggcccgaactctgtcgcgtttccctacccgaatttcagcaatttctgctcgactaccagggggaactgtgggctgtggatagactgcaggtccaggagtttatgttgtcctttcttagagatcccctgagggagatagaggagccatactttttcctagacgagtttgtcacctttcttttcagcaaggaaaattccgtctggaatagccagctcgatgccgtctgcccagacactatgaataatcccctcagtcactactggatcagttcctcacacaacacatacctgactggcgatcagttcagttccgagagctccctggaagcttacgcccggtgtctaagaatgggatgcaggtgtatcgagctggactgctgggacgggcccgatgggatgcctgtcatctatcacggccacaccctgactaccaagatcaaattctctgacgtgctgcacacgattaaagaacacgctttcgtcgcaagcgagtatcctgttatcttatctatcgaggaccattgttcaatcgctcaacaacgaaacatggcacaatattttaagaaagtattaggggatactctcctcacaaagccagtcgaaatttctgctgacggactcccttctccaaaccagcttaaacgtaagattcttataaaacacaagaaactggctgagggaagcgcatatgaggaagtgcccacatccatgatgtacagcgaaaatgacattagtaattccattaagaacggaatcctgtacctcgaggacccagttaatcacgagtggtatcctcattatttcgtattgacctcgagcaagatctactattctgaggaaacgagttctgatcagggaaatgaagacgaggaagaacccaaggaggtgagcagtagcactgaattgcatagcaatgagaaatggtttcacggtaaactcggggccggacgtgacggccgacatattgccgagcgccttttaacagaatactgtattgaaaccggagcccctgacggcagcttcttggtcagggagtcagagacattcgttggagactataccttatctttctggcggaacggaaaggtccagcactgtagaatccacagtagacaagacgccggtactcccaagttctttttgaccgacaatcttgtcttcgattccctctacgaccttataactcactaccagcaggtgccgctccgctgtaatgaattcgaaatgaggttgagcgaacctgttcctcagaccaacgcacacgagagcaaagaatggtatcacgcatcactgacccgcgcccaggctgaacacatgctgatgcgggtcccccgggatggtgcttttctggttcgcaagaggaatgagcctaacagctatgccatcagctttagagccgagggaaaaattaaacactgtcgtgtgcagcaggagggccagacagtgatgttaggaaattccgaatttgactcgctggtggatttaatatcttactatgagaaacacccactatacagaaagatgaagctccgatacccaataaacgaagaggctctggagaagataggaactgcagagcccgattacggtgctctctatgaggggcgaaaccccggcttttacgtggaagcaaatcccatgcctaccttcaaatgcgccgttaaggcactttttgactacaaagcacagcgcgaagatgagctgacattcataaaatccgcaatcatccagaacgttgagaaacaggaaggaggttggtggcgaggagactacggggggaagaaacagctgtggttcccttccaattacgtcgaggagatggtcaacccggttgcactggaacccgaaagagaacacttggacgagaactcgccactgggagacctcctgcgcggagtcctggacgtgcccgcctgtcagattgccataagaccggaaggaaagaacaaccggctgttcgtgttcagcattagcatggcctcagtcgcccactggtcgctcgacgtggccgcggattcccaggaggagctgcaggattgggtgaaaaagattcgggaagtggcccagacagccgatgcccgtttgacggaaggaaaaataatggagcggcggaagaaaattgccctggagttaagtgagctggttgtctactgccgtccagttcctttcgatgaggagaagatcgggacagaaagggcatgctaccgcgatatgtctagctttccagaaacgaaggccgaaaagtatgtcaataaggcaaaagggaaaaagttcctgcagtacaataggcttcagctgagccggatataccccaagggacagcggttggattcttcaaactatgacccactgcctatgtggatttgcggatcgcagctggtcgccctcaacttccaaactcccgacaaacctatgcaaatgaaccaggccttgttcatgaccggccgtcattgcgggtatgtgcttcagccgagcacaatgcgagacgaagcctttgacccatttgataagagtagcctgcggggcttggaaccatgcgcaattagtattgaggtgctgggtgccaggcacctgcctaagaacggcagagggatcgtctgtccttttgtcgaaatagaggtcgcgggcgcggaatacgattcgaccaagcagaagacagagtttgtggttgataatggtctgaaccccgtctggccagccaagccatttcacttccagatctccaatccagaatttgcctttctgagattcgtcgtgtacgaggaggacatgttttcagatcaaaatttcctagcccaggctacgttcccagtcaaaggcttgaagaccgggtaccgggccgtgcctctgaagaacaattacagtgaggacctcgaactggccagtcttctcattaaaatagacatctttccggctaagcaggagaacggagacttgagccctttcagcggtaccagtttgcgggaacgagggtctgacgcttccggacagctttttcacgggagagccagggaagggtcctttgagtcaagataccagcagcccttcgaagatttcaggatcagccaggaacacctggccgatcacttcgacagcagagagcggagggcccctcggcgaacccgtgtgaacggggacaaccgactctag

SEQ ID NO: 130724 - DNA, 3876 bp, Artificial Sequence
  derived and/or modified sequence
atggctggcgctgctagcccttgcgctaacggatgcggaccaggcgcacctagtgatgcagaggtactgcatctgtgtagatctctggaagtgggtacagtgatgaccctcttctacagcaagaagagccagcgccctgaacggaagaccttccaggtgaaattggaaacaaggcagattacttggtccagaggagctgacaaaattgaaggcgctatcgatataagggagatcaaggaaattcgtcctggcaagacatctcgcgactttgaccgctaccaggaggacccagcattccgcccagaccagagccactgttttgtgattctctacggtatggaatttaggctgaaaactttaagtctccaggcaacttctgaggatgaggttaacatgtggataaagggactaacctggctgatggaggacacattgcaagcccctacgcctctccaaatcgagcgctggctacgaaagcaattctattcagttgatcgcaacagagaggatagaatttcggccaaggacttgaaaaacatgcttagccaggtcaattaccgagtcccaaacatgcgatttcttcgagaaaggctgacagacctagaacagcgaagtggcgacataacctacggccaatttgcgcagttgtatagaagcctgatgtacagcgcacagaaaaccatggacctcccgttcctggaggccagcaccctgcgcgctggagaacgccctgaactctgccgcgttagcctgccagagtttcagcagtttctactagattatcagggcgagttatgggccgttgatagacttcaggttcaggagttcatgttgagtttcttgcgagaccctctgagggagattgaagaaccctatttcttcctcgacgagttcgttaccttcctgttttctaaagaaaacagtgtgtggaattcccaattggatgctgtttgtcctgatacaatgaataacccgctgagccactattggatctcttcgagccataatacttacctgaccggagaccaattcagttcagaatcttcccttgaggcgtatgcaagatgtctcaggatgggatgtcgctgcatcgagctggactgttgggacggacccgacggcatgcctgttatctaccatgggcacacgttgactacaaagattaaatttagcgatgtgcttcacaccatcaaagagcatgctttcgtggcttcggaatatccagtgattctgagcatcgaggaccactgtagcatcgcccaacagcggaacatggcacagtactttaagaaagtgctaggtgacacactgctcaccaagcccgtggagatctccgcagacggattgccatcacctaaccagctgaaacgcaagattcttattaagcataaaaagctcgcagagggtagcgcatatgaggaggtgccgacctccatgatgtattccgaaaacgatatctctaattcaatcaaaaatgggatactgtacctggaggatcccgtcaatcacgagtggtacccacactattttgtcctgactagctcgaagatttattatagtgaagaaacgagctcagaccaggggaacgaagacgaagaggagcccaaggaagtctctagtagtaccgaattgcacagtaacgagaaatggttccacggaaaactcggggcaggtcgggatggacgacatatcgcggagcggctgctgaccgaatactgcatcgaaacaggagcacctgatggttctttcttagttagagagtctgaaacattcgtaggagactatacactcagtttttggaggaatggtaaagttcagcactgcaggatccattctcgacaggatgctggaacaccgaaatttttcctcacagacaatctcgtgttcgactccctttacgatcttatcacgcattaccagcaggtaccactgcggtgcaacgaatttgagatgaggttgtcagaacctgtcccccaaaccaacgctcacgagagcaaagagtggtaccatgcttcgctgacgagagcacaggcagagcacatgcttatgcgcgtgccacgtgatggggcattcctggtacggaaacgtaacgagcccaactcctacgccatcagcttcagagcggagggaaaaattaagcactgtagggtgcagcaggaagggcagacagtcatgctggggaactccgagtttgacagtctagtcgatttgatcagttactatgaaaaacatcctctgtacaggaaaatgaaactgcgctatccaatcaatgaagaagccctggagaagatcggaacggccgagcctgattacggtgccctgtacgaaggacgaaacccaggcttttacgtcgaggctaatcctatgcctaccttcaaatgcgcagtcaaggcgctattcgattataaggctcagagagaggatgaacttacatttataaagtctgcaataattcagaatgtggaaaagcaggaaggcggatggtggcgaggtgactacggtgggaagaaacagttatggttcccaagtaattatgtggaggaaatggtaaatcccgtcgcattagagccggagagggagcatttggatgagaactctccactcggggacctcctgcgaggcgtactcgatgtgcccgcttgccagatcgccattcgtccagagggcaaaaacaaccgactgttcgtgttctcaattagtatggcttcagtagcccactggtccttggacgtggccgctgacagccaagaggaattacaggactgggtgaagaagattagggaggtcgctcagaccgcagacgccagattaacagagggaaaaattatggagaggaggaaaaagatcgctctggagctgtccgagctggtggtgtattgcagacctgttccattcgatgaagaaaaaattgggacggagagggcctgttaccgggacatgagtagttttccggaaacaaaggcagaaaagtacgtgaacaaggctaaagggaagaagtttttacaatataaccgactgcagctctccagaatttaccccaagggacagcgcctcgactcatccaattacgaccctctccccatgtggatctgcggtagccagttagtcgctctcaattttcagactccagacaaacctatgcagatgaaccaagctctattcatgacaggacgccattgtggctacgtgctccagccttctacaatgcgtgacgaggcctttgatccattcgacaaatcaagtttacgcggacttgaaccctgcgccatttcgatcgaggtacttggcgctcgtcaccttcctaaaaacggcagggggattgtgtgtccctttgtggagattgaagtggcaggggcagaatacgactctacgaaacagaaaactgaatttgtggtggataacggactcaacccagtctggccagcgaagccgttccactttcaaatcagtaatcctgaattcgcctttttgcgctttgtcgtgtatgaggaagatatgttctctgaccagaactttctggctcaagccaccttccctgttaaagggctgaagaccggctatagagccgtccctctcaagaataattactccgaagacttggagcttgcgtccctgttgataaaaatcgacatcttccccgcaaaacaagagaacggcgatctgtctccattcagtgggactagtctgagggagcggggttccgacgctagcggacaactatttcacggcagagccagggagggttcttttgagtcgaggtaccagcagccatttgaagacttccggattagccaggaacacttggccgaccatttcgactcacgagagcgcagagcccctcgtagaacacgtgtaaacggtgacaaccggctgtag

SEQ ID NO: 130725 - DNA, 3876 bp, Artificial Sequence
  derived and/or modified sequence
atggccggagccgcttcaccatgcgccaatggatgcgggccaggggctccttccgatgcggaggtcttgcacctttgcaggagtctggaggtgggaacagtgatgactctgttctatagcaagaagagccaacggcctgagcggaaaacattccaagtgaaactcgagacccggcagataacatggagtcgcggagcagataagattgaaggcgctattgacatccgggagattaaggagatcaggcccggtaagacaagtcgggattttgatcgatatcaggaagaccctgcattcagacctgaccaaagccactgttttgtaatcctctatgggatggaattccggctgaagactctgagcctgcaggccacgagcgaagacgaagtaaatatgtggattaaaggactcacctggctcatggaagatacactccaggccccaaccccccttcagatcgagaggtggctgcgaaagcagttctattctgtcgatcgcaaccgcgaagaccgaatcagcgctaaagacttgaaaaacatgttaagtcaggtgaattatcgcgttccaaatatgaggttcctcagagagagactcaccgacttggagcagaggtctggcgatattacgtatggccagtttgcacagctgtaccgcagcctcatgtatagtgcacaaaaaaccatggacctgccatttcttgaagcatcaaccctcagggccggtgaacgaccagagctctgtcgcgtatctctgcctgaatttcagcagttcttactcgactaccagggggaactgtgggctgttgaccgactacaagtccaggaatttatgctcagtttcctgcgagatccccttagagaaatagaggagccctatttctttttggacgagttcgttactttcttgttttctaaagagaacagcgtgtggaactctcagctcgacgcagtttgtcccgataccatgaacaatcctttgtctcattattggattagctccagccataacacctatctgacaggtgatcagttcagcagtgaatcttcattagaagcttacgccaggtgcctccggatgggctgtcgctgcatcgagctcgactgttgggatggcccagatggaatgccagtgatttaccatgggcatacactgactaccaaaatcaaattcagcgatgtgcttcacacaattaaggagcacgcttttgtggcctctgagtatcctgtgatcctgtctatcgaggatcactgctctatagctcaacaaaggaatatggctcagtactttaaaaaagtactcggtgatactctgctcaccaagcccgtcgagataagtgccgatggccttccttctcctaaccagctgaagaggaagatcctgattaaacataaaaaactagccgaaggtagcgcttacgaggaggtaccaaccagcatgatgtatagcgagaacgatatctctaactcgatcaaaaatggtatcctctatctcgaggatccggtcaaccatgagtggtatccccactatttcgtcttgacttcttccaaaatttattactccgaagagaccagctccgatcagggcaacgaggacgaagaagaaccaaaggaagtttcctcttcaactgaactgcactccaatgaaaaatggttccatggcaagctgggggctggcagggacggcaggcacatcgcggagcgcctattgacggaatattgtattgaaactggggctccagatggatcttttcttgttcgagagagtgaaaccttcgtcggagattatacactcagcttctggcgcaatggcaaggtgcagcactgtaggatccattcaagacaggacgctggaacaccgaaattctttttgactgacaacttggtgttcgacagtctctacgatctgataacacactatcaacaggtacccttgcgctgtaacgagtttgagatgagactctcagagccagtgccccagactaatgcacatgaatctaaagagtggtatcatgcttccctcacgagggcccaggctgagcacatgctgatgagggtgccacgcgacggagccttcctggtccgcaaaagaaatgagcccaattcttacgccattagcttcagggccgagggtaaaatcaagcattgccgcgtgcagcaggaagggcagactgtgatgctaggcaattccgaatttgactctttggtggacctgatctcttactatgagaaacaccctctctatcgcaaaatgaagcttcgataccccatcaacgaggaagcgctggagaaaatcggtaccgctgagcccgattatggcgctctgtatgaaggtagaaaccctggattctatgtggaggccaaccccatgccaacttttaaatgtgcggtgaaagccctctttgattacaaagctcagagggaggatgaattgacatttataaaaagcgctattatccagaacgtagagaagcaggaaggcggttggtggcgcggagattatgggggaaagaagcaactctggtttccaagtaactacgttgaggaaatggttaatccagtggccctcgagcccgagcgggaacacctcgacgagaacagcccgctgggggacctccttcgcggagtgctggacgtccccgcttgtcagatcgcaatacgtcccgagggcaagaacaatcgcttgttcgtcttcagcatctcgatggcaagtgtcgcacactggagtcttgacgtggccgcagattcacaagaggaactgcaggattgggtgaaaaaaatacgtgaggtggctcagaccgctgatgcacgcctgaccgagggcaaaatcatggagcggcgaaaaaagattgcgttggagctatccgaactggtggtgtactgccgaccagtcccgttcgacgaggaaaaaattggaaccgaacgtgcttgctatagggatatgtcttccttcccagaaactaaggccgaaaaatacgtcaataaagctaaaggaaaaaaatttctccaatacaaccgcctgcagctttcgcgaatttacccaaagggccagcgccttgacagttcaaactacgatccattgccgatgtggatttgcgggtctcagttagtagcactaaactttcaaaccccagacaaaccgatgcagatgaatcaggcactgtttatgactggaaggcactgcggatatgtcctgcaaccatcgacaatgcgagatgaagccttcgatccatttgacaagtcgtctctaagaggcctggaaccttgtgctattagcatcgaggtcctgggggctcggcacctacctaagaacggccgaggtattgtttgccccttcgtggaaattgaagtcgccggagccgaatatgactctaccaagcagaagactgagttcgtcgtagacaatgggctaaaccctgtgtggccagctaagcctttccacttccagattagcaatccagaatttgcctttctacgcttcgtagtatacgaggaagacatgttcagcgatcaaaacttcctagcccaagctacatttccagtcaaggggttgaagacgggctaccgcgcagttcctctcaaaaataactactccgaagatctcgagctggcctccctcctaattaagatcgatatctttcctgctaagcaggaaaatggcgatttaagcccattctcgggcacatcactgcgcgagcgcggatccgacgcaagcgggcagttgttccacgggagagcccgagaaggaagcttcgaatcaagatatcagcagcctttcgaggactttcgaataagccaggagcacctggccgatcacttcgactcccgggagcggagagccccacgcaggactcgggtcaatggggacaatcgactatag

SEQ ID NO: 130726 - DNA, 5285 bp, Artificial Sequence
  derived and/or modified sequence
gagggcgcgcggaggacccgccgccgccggtgtgaggcggcccgtcctggctcccttgtccgggaagcccgcccaggagccgccgccgggtcccgctcgtctgccgcctcagcctcagccccaacctcagccgccgccgttgcgcttgctcccgggcggtcctggcctgtgccgccgccgcccccagcgtcggagccatggcgggcgccgcgtccccttgcgccaacggctgcgggcccggcgcgccctcggacgccgaggtgctgcacctctgccgcagcctcgaggtgggcaccgtcatgactttgttctactccaagaagtcgcagcgacccgagcggaagaccttccaggtcaagctggagacgcgccagatcacgtggagccggggcgccgacaagatcgagggggccattgacattcgtgaaattaaggagatccgcccagggaagacctcacgggactttgatcgctatcaagaggacccagctttccggccggaccagtcacattgctttgtcattctctatggaatggaatttcgcctgaaaacgctgagcctgcaagccacatctgaggatgaagtgaacatgtggatcaagggcttaacttggctgatggaggatacattgcaggcacccacacccctgcagattgagaggtggctccggaagcagttttactcagtggatcggaatcgtgaggatcgtatatcagccaaggacctgaagaacatgctgtcccaggtcaactaccgggtccccaacatgcgcttcctccgagagcggctgacggacctggagcagcgcagcggggacatcacctacgggcagtttgctcagctgtaccgcagcctcatgtacagcgcccagaagacgatggacctccccttcttggaagccagtactctgagggctggggagcggccggagctttgccgagtgtcccttcctgagttccagcagttccttcttgactaccagggggagctgtgggctgttgatcgcctccaggtgcaggagttcatgctcagcttcctccgagaccccttacgagagatcgaggagccatacttcttcctggatgagtttgtcaccttcctgttctccaaagagaacagtgtgtggaactcgcagctggatgcagtatgcccggacaccatgaacaaccctctttcccactactggatctcctcctcgcacaacacgtacctgaccggggaccagttctccagtgagtcctccttggaagcctatgctcgctgcctgcggatgggctgtcgctgcattgagttggactgctgggacggcccggatgggatgccagttatttaccatgggcacacccttaccaccaagatcaagttctcagatgtcctgcacaccatcaaggagcatgcctttgtggcctcagagtacccagtcatcctgtccattgaggaccactgcagcattgcccagcagagaaacatggcccaatacttcaagaaggtgctgggggacacactcctcaccaagcccgtggagatctctgccgacgggctcccctcacccaaccagcttaagaggaagatcctcatcaagcacaagaagctggctgagggcagtgcctacgaggaggtgcctacatccatgatgtactctgagaacgacatcagcaactctatcaagaatggcatcctctacctggaggaccctgtgaaccacgaatggtatccccactactttgttctgaccagcagcaagatctactactctgaggagaccagcagtgaccagggcaacgaggatgaggaggagcccaaggaggtcagcagcagcacagagctgcactccaatgagaagtggttccatgggaagctaggggcagggcgtgacgggcgtcacatcgctgagcgcctgcttactgagtactgcatcgagaccggagcccctgacggctccttcctcgtgcgagagagtgagaccttcgtgggcgactacacgctctctttctggcggaacgggaaagtccagcactgccgtatccactcccggcaagatgctgggacccccaagttcttcttgacagacaacctcgtctttgactccctctatgacctcatcacgcactaccagcaggtgcccctgcgctgtaatgagtttgagatgcgactttcagagcctgtcccacagaccaacgcccacgagagcaaagagtggtaccacgcgagcctgaccagagcacaggctgagcacatgctaatgcgcgtccctcgtgatggggccttcctggtgcggaagcggaatgaacccaactcatatgccatctctttccgggctgagggcaagatcaagcattgccgtgtccagcaagagggccagacagtgatgctagggaactcggagttcgacagccttgttgacctcatcagctactatgagaaacacccgctataccgcaagatgaagctgcgctatcccatcaacgaggaggcactggagaagattggcacagctgagcctgactacggggccctgtatgagggacgcaaccctggcttctatgtagaggcaaaccctatgccaactttcaagtgtgcagtcaaagccctctttgactacaaggcccagagggaggacgagctgaccttcatcaagagcgccatcatccagaatgtggagaagcaagagggaggctggtggcgaggggactacggagggaagaagcagctgtggttcccatcaaactacgtggaagagatggtcaaccccgtggccctggagccggagagggagcacttggacgagaacagccccctaggggacttgctgcggggggtcttggatgtgccggcttgtcagattgccatccgtcctgagggcaagaacaaccggctcttcgtcttctccatcagcatggcgtcggtggcccactggtccctggatgttgctgccgactcacaggaggagctgcaggactgggtgaaaaagatccgtgaagtggcccagacagcagacgccaggctcactgaagggaagataatggaacggaggaagaagattgccctggagctctctgaacttgtcgtctactgccggcctgttccctttgatgaagagaagattggcacagaacgtgcttgctaccgggacatgtcatccttcccggaaaccaaggctgagaaatacgtgaacaaggccaaaggcaagaagttccttcagtacaatcgactgcagctctcccgcatctaccccaagggccagcgactggattcctccaactacgatcctttgcccatgtggatctgtggcagtcagcttgtggccctcaacttccagacccctgacaagcctatgcagatgaaccaggccctcttcatgacgggcaggcactgtggctacgtgctgcagccaagcaccatgcgggatgaggccttcgacccctttgacaagagcagcctccgcgggctggagccatgtgccatctctattgaggtgctgggggcccgacatctgccaaagaatggccgaggcattgtgtgtccttttgtggagattgaggtggctggagctgagtatgacagcaccaagcagaagacagagtttgtggtggacaatggactcaaccctgtatggccagccaagcccttccacttccagatcagtaaccctgaatttgcctttctgcgcttcgtggtgtatgaggaagacatgtttagtgaccagaatttcctggctcaggctactttcccagtaaaaggcctgaagacaggatacagagcagtgcctttgaagaacaactacagtgaggacctggagttggcctccctgctgatcaagattgacattttccctgccaagcaggagaatggtgacctcagtcccttcagtggtacgtccctgcgggagcggggctcagatgcctcaggccagctgtttcatggccgagcccgggaaggctcctttgaatcccgctaccagcagccgtttgaggacttccgcatctcccaggagcatctcgcagaccattttgacagtcgagaacgaagggccccaagaaggactcgggtcaatggagacaaccgcctctagttgtaccccagcctcgttggagagcagcaggtgctgtgcgccttgtagaatgccgcgaactgggttctttggaagcagccccctgtggcggccttccgggtctcgcagcctgaagcctggattccagcagtgaatgctagacagaaaccaagccattaatgagatgttattactgttttgggcctccatgccccagctctggatgaaggcaaaaactgtactgtgtttcgcattaagcacacacatctggccctgacttctggagatggatccttccatcttgtggggccaggaccatggccgaagccccttggagagagaggctgcctcagccagtggcacaggagactccaaggagctactgacattcctaagagtggaggaggaggaggagccttgctgggccagggaaacaaagtttacattgtcctgtagctttaaaaccacagctgggcagggtgagaagctagatgcccctgcagtttggccctggagccagggcagaggaatgtagggcctgcatggagaagggttctgccctgcctgaggaggaggacacagcacaagggcacattgcccatggctgggaacatgacccagcctgaaagatacaggggatcatgttaaaaatagcagtattatttttcgtctcaatggtattgtaactaagttatttactcctcctgctcctcacccctgtagggaaaccttggagaggagagtggcaggtgggctgcctgctgtgttaagaggacttagtttgtgatgtaaggcactgtcaggaatggggggcgggccagggtgggaagagaagaaatagcagagcctattttggtgaggttttttgtttttaagtcaaagaagactcagtatgctttccctgaggaatgaaaaagggattgaggagttgcctgactcctgggtgggtggggtacaggcagttaggtgctgaatgaagctgccatccttgctgcagcttctaactggtaaaaagatccagggatggagatgggaaggttagaaaggcagccctcacctctgaggacagaggccggggtccaggcccgtgggcgcaaaggtgcctcatagcatagccagcattcagcacacacaaacctactgcccacatttgggctcagggttggccatttgctagttctgctgccctcttaagatctgactgccaaataaatcatcctcatgtcctttttc

SEQ ID NO: 130727 - DNA, 5493 bp, Artificial Sequence
  derived and/or modified sequence
gccgctcgtggccgccgggctgtgtccggggccgcgtgagaaagctctgcgggactgagggctgggtgggtcgaccgggaacggcgcgcgctcccgccgccatcgcgcctccgtccccgcctgcggcctgtctgggggtcgcggggcgcaggcgcggcgggccgacgggcgggggtcctccccacgggtgcgcgggcgcctttgttcccggcgccgaagcggggtggggcctcagggcagccccgccccgccgcgctgaggccccgccccgtgtccgcctgcaggagccgccgccgggtcccgctcgtctgccgcctcagcctcagccccaacctcagccgccgccgttgcgcttgctcccgggcggtcctggcctgtgccgccgccgcccccagcgtcggagccatggcgggcgccgcgtccccttgcgccaacggctgcgggcccggcgcgccctcggacgccgaggtgctgcacctctgccgcagcctcgaggtgggcaccgtcatgactttgttctactccaagaagtcgcagcgacccgagcggaagaccttccaggtcaagctggagacgcgccagatcacgtggagccggggcgccgacaagatcgagggggccattgacattcgtgaaattaaggagatccgcccagggaagacctcacgggactttgatcgctatcaagaggacccagctttccggccggaccagtcacattgctttgtcattctctatggaatggaatttcgcctgaaaacgctgagcctgcaagccacatctgaggatgaagtgaacatgtggatcaagggcttaacttggctgatggaggatacattgcaggcacccacacccctgcagattgagaggtggctccggaagcagttttactcagtggatcggaatcgtgaggatcgtatatcagccaaggacctgaagaacatgctgtcccaggtcaactaccgggtccccaacatgcgcttcctccgagagcggctgacggacctggagcagcgcagcggggacatcacctacgggcagtttgctcagctgtaccgcagcctcatgtacagcgcccagaagacgatggacctccccttcttggaagccagtactctgagggctggggagcggccggagctttgccgagtgtcccttcctgagttccagcagttccttcttgactaccagggggagctgtgggctgttgatcgcctccaggtgcaggagttcatgctcagcttcctccgagaccccttacgagagatcgaggagccatacttcttcctggatgagtttgtcaccttcctgttctccaaagagaacagtgtgtggaactcgcagctggatgcagtatgcccggacaccatgaacaaccctctttcccactactggatctcctcctcgcacaacacgtacctgaccggggaccagttctccagtgagtcctccttggaagcctatgctcgctgcctgcggatgggctgtcgctgcattgagttggactgctgggacggcccggatgggatgccagttatttaccatgggcacacccttaccaccaagatcaagttctcagatgtcctgcacaccatcaaggagcatgcctttgtggcctcagagtacccagtcatcctgtccattgaggaccactgcagcattgcccagcagagaaacatggcccaatacttcaagaaggtgctgggggacacactcctcaccaagcccgtggagatctctgccgacgggctcccctcacccaaccagcttaagaggaagatcctcatcaagcacaagaagctggctgagggcagtgcctacgaggaggtgcctacatccatgatgtactctgagaacgacatcagcaactctatcaagaatggcatcctctacctggaggaccctgtgaaccacgaatggtatccccactactttgttctgaccagcagcaagatctactactctgaggagaccagcagtgaccagggcaacgaggatgaggaggagcccaaggaggtcagcagcagcacagagctgcactccaatgagaagtggttccatgggaagctaggggcagggcgtgacgggcgtcacatcgctgagcgcctgcttactgagtactgcatcgagaccggagcccctgacggctccttcctcgtgcgagagagtgagaccttcgtgggcgactacacgctctctttctggcggaacgggaaagtccagcactgccgtatccactcccggcaagatgctgggacccccaagttcttcttgacagacaacctcgtctttgactccctctatgacctcatcacgcactaccagcaggtgcccctgcgctgtaatgagtttgagatgcgactttcagagcctgtcccacagaccaacgcccacgagagcaaagagtggtaccacgcgagcctgaccagagcacaggctgagcacatgctaatgcgcgtccctcgtgatggggccttcctggtgcggaagcggaatgaacccaactcatatgccatctctttccgggctgagggcaagatcaagcattgccgtgtccagcaagagggccagacagtgatgctagggaactcggagttcgacagccttgttgacctcatcagctactatgagaaacacccgctataccgcaagatgaagctgcgctatcccatcaacgaggaggcactggagaagattggcacagctgagcctgactacggggccctgtatgagggacgcaaccctggcttctatgtagaggcaaaccctatgccaactttcaagtgtgcagtcaaagccctctttgactacaaggcccagagggaggacgagctgaccttcatcaagagcgccatcatccagaatgtggagaagcaagagggaggctggtggcgaggggactacggagggaagaagcagctgtggttcccatcaaactacgtggaagagatggtcaaccccgtggccctggagccggagagggagcacttggacgagaacagccccctaggggacttgctgcggggggtcttggatgtgccggcttgtcagattgccatccgtcctgagggcaagaacaaccggctcttcgtcttctccatcagcatggcgtcggtggcccactggtccctggatgttgctgccgactcacaggaggagctgcaggactgggtgaaaaagatccgtgaagtggcccagacagcagacgccaggctcactgaagggaagataatggaacggaggaagaagattgccctggagctctctgaacttgtcgtctactgccggcctgttccctttgatgaagagaagattggcacagaacgtgcttgctaccgggacatgtcatccttcccggaaaccaaggctgagaaatacgtgaacaaggccaaaggcaagaagttccttcagtacaatcgactgcagctctcccgcatctaccccaagggccagcgactggattcctccaactacgatcctttgcccatgtggatctgtggcagtcagcttgtggccctcaacttccagacccctgacaagcctatgcagatgaaccaggccctcttcatgacgggcaggcactgtggctacgtgctgcagccaagcaccatgcgggatgaggccttcgacccctttgacaagagcagcctccgcgggctggagccatgtgccatctctattgaggtgctgggggcccgacatctgccaaagaatggccgaggcattgtgtgtccttttgtggagattgaggtggctggagctgagtatgacagcaccaagcagaagacagagtttgtggtggacaatggactcaaccctgtatggccagccaagcccttccacttccagatcagtaaccctgaatttgcctttctgcgcttcgtggtgtatgaggaagacatgtttagtgaccagaatttcctggctcaggctactttcccagtaaaaggcctgaagacaggatacagagcagtgcctttgaagaacaactacagtgaggacctggagttggcctccctgctgatcaagattgacattttccctgccaagcaggagaatggtgacctcagtcccttcagtggtacgtccctgcgggagcggggctcagatgcctcaggccagctgtttcatggccgagcccgggaaggctcctttgaatcccgctaccagcagccgtttgaggacttccgcatctcccaggagcatctcgcagaccattttgacagtcgagaacgaagggccccaagaaggactcgggtcaatggagacaaccgcctctagttgtaccccagcctcgttggagagcagcaggtgctgtgcgccttgtagaatgccgcgaactgggttctttggaagcagccccctgtggcggccttccgggtctcgcagcctgaagcctggattccagcagtgaatgctagacagaaaccaagccattaatgagatgttattactgttttgggcctccatgccccagctctggatgaaggcaaaaactgtactgtgtttcgcattaagcacacacatctggccctgacttctggagatggatccttccatcttgtggggccaggaccatggccgaagccccttggagagagaggctgcctcagccagtggcacaggagactccaaggagctactgacattcctaagagtggaggaggaggaggagccttgctgggccagggaaacaaagtttacattgtcctgtagctttaaaaccacagctgggcagggtgagaagctagatgcccctgcagtttggccctggagccagggcagaggaatgtagggcctgcatggagaagggttctgccctgcctgaggaggaggacacagcacaagggcacattgcccatggctgggaacatgacccagcctgaaagatacaggggatcatgttaaaaatagcagtattatttttcgtctcaatggtattgtaactaagttatttactcctcctgctcctcacccctgtagggaaaccttggagaggagagtggcaggtgggctgcctgctgtgttaagaggacttagtttgtgatgtaaggcactgtcaggaatggggggcgggccagggtgggaagagaagaaatagcagagcctattttggtgaggttttttgtttttaagtcaaagaagactcagtatgctttccctgaggaatgaaaaagggattgaggagttgcctgactcctgggtgggtggggtacaggcagttaggtgctgaatgaagctgccatccttgctgcagcttctaactggtaaaaagatccagggatggagatgggaaggttagaaaggcagccctcacctctgaggacagaggccggggtccaggcccgtgggcgcaaaggtgcctcatagcatagccagcattcagcacacacaaacctactgcccacatttgggctcagggttggccatttgctagttctgctgccctcttaagatctgactgccaaataaatcatcctcatgtcctttttc

SEQ ID NO: 130728 - protein, 1265 aa, Artificial Sequence
  derived and/or modified sequence
MSTTVNVDSLAEYEKSQIKRALELGTVMTVFSFRKSTPERRTVQVIMETRQVAWSKTADKIEGFLDIMEIKEIRPGKNSKDFERAKAVRQKEDCCFTILYGTQFVLSTLSLAADSKEDAVNWLSGLKILHQEAMNASTPTIIESWLRKQIYSVDQTRRNSISLRELKTILPLINFKVSSAKFLKDKFVEIGAHKDELSFEQFHLFYKKLMFEQQKSILDEFKKDSSVFILGNTDRPDASAVYLHDFQRFLIHEQQEHWAQDLNKVRERMTKFIDDTMRETAEPFLFVDEFLTYLFSRENSIWDEKYDAVDMQDMNNPLSHYWISSSHNTYLTGDQLRSESSPEAYIRCLRMGCRCIELDCWDGPDGKPVIYHGWTRTTKIKFDDVVQAIKDHAFVTSSFPVILSIEEHCSVEQQRHMAKAFKEVFGDLLLTKPTEASADQLPSPSQLREKIIIKHKKLGPRGDVDVNMEDKKDEHKQQGELYMWDSIDQKWTRHYCAIADAKLSFSDDIEQTMEEEVPQDIPPTELHFGEKWFHKKVEKRTSAEKLLQEYCMETGGKDGTFLVRESETFPNDYTLSFWRSGRVQHCRIRSTMEGGTLKYYLTDNLTFSSIYALIQHYRETHLRCAEFELRLTDPVPNPNPHESKPWYYDSLSRGEAEDMLMRIPRDGAFLIRKREGSDSYAITFRARGKVKHCRINRDGRHFVLGTSAYFESLVELVSYYEKHSLYRKMRLRYPVTPELLERYNMERDINSLYDVSRMYVDPSEINPSMPQRTVKALYDYKAKRSDELSFCRGALIHNVSKEPGGWWKGDYGTRIQQYFPSNYVEDISTADFEELEKQIIEDNPLGSLCRGILDLNTYNVVKAPQGKNQKSFVFILEPKQQGDPPVEFATDRVEELFEWFQSIREITWKIDTKENNMKYWEKNQSIAIELSDLVVYCKPTSKTKDNLENPDFREIRSFVETKADSIIRQKPVDLLKYNQKGLTRVYPKGQRVDSSNYDPFRLWLCGSQMVALNFQTADKYMQMNHALFSLNGRTGYVLQPESMRTEKYDPMPPESQRKILMTLTVKVLGARHLPKLGRSIACPFVEVEICGAEYDNNKFKTTVVNDNGLSPIWAPTQEKVTFEIYDPNLAFLRFVVYEEDMFSDPNFLAHATYPIKAVKSGFRSVPLKNGYSEDIELASLLVFCEMRPVLESEEELYSSCRQLRRRQEELNNQLFLYDTHQNLRNANRDALVKEFSVNENQLQLYQEKCNKRLREKRVSNSKFYS

SEQ ID NO: 130729 - protein, 178 aa, Artificial Sequence
  derived and/or modified sequence
  misc_feature (1)..(1): Xaa can be any naturally occurring amino acid
XNTDRPDASAVYLHDFQRFLIHEQQEHWAQDLNKVRERMTKFIDDTMRETAEPFLFVDEFLTYLFSRENSIWDEKYDAVDMQDMNNPLSHYWISSSHNTYLTGDQLRSESSPEAYIRCLRMGCRCIELDCWDGPDGKPVIYHGWTRTTKIKFDDVVQAIKDHAFVTSRCPLSWVEVLL

SEQ ID NO: 130730 - protein, 45 aa, Artificial Sequence
  derived and/or modified sequence
  misc_feature (1)..(1): Xaa can be any naturally occurring amino acid
XDMQDMNNPLSHYWISSSHNTGLLGRARWEAGHLPWLDADYQDQV

SEQ ID NO: 130731 - protein, 159 aa, Artificial Sequence
  derived and/or modified sequence
MSTTVNVDSLAEYEKSQIKRALELGTVMTVFSFRKSTPERRTVQVIMETRQVAWSKTADKIEGFLDIMEIKEIRPGKNSKDFERAKAVRQKEDCCFTILYGTQFVLSTLSLAADSKEDAVNWLSGLKILHQEAMNASTPTIIESWLRKQIYSVDQTRRN

SEQ ID NO: 130732 - DNA, 3798 bp, Artificial Sequence
  derived and/or modified sequence
atgagcaccaccgtgaacgtggacagcctggccgagtacgagaagagccagatcaagagagccctggagctgggcaccgtgatgaccgtgttcagcttcagaaagagcacccccgagagaagaaccgtgcaggtgatcatggagaccagacaggtggcctggagcaagaccgccgacaagatcgagggcttcctggacatcatggagatcaaggagatcagacccggcaagaacagcaaggacttcgagagagccaaggccgtgagacagaaggaggactgctgcttcaccatcctgtacggcacccagttcgtgctgagcaccctgagcctggccgccgacagcaaggaggacgccgtgaactggctgagcggcctgaagatcctgcaccaggaggccatgaacgccagcacccccaccatcatcgagagctggctgagaaagcagatctacagcgtggaccagaccagaagaaacagcatcagcctgagagagctgaagaccatcctgcccctgatcaacttcaaggtgagcagcgccaagttcctgaaggacaagttcgtggagatcggcgcccacaaggacgagctgagcttcgagcagttccacctgttctacaagaagctgatgttcgagcagcagaagagcatcctggacgagttcaagaaggacagcagcgtgttcatcctgggcaacaccgacagacccgacgccagcgccgtgtacctgcacgacttccagagattcctgatccacgagcagcaggagcactgggcccaggacctgaacaaggtgagagagagaatgaccaagttcatcgacgacaccatgagagagaccgccgagcccttcctgttcgtggacgagttcctgacctacctgttcagcagagagaacagcatctgggacgagaagtacgacgccgtggacatgcaggacatgaacaaccccctgagccactactggatcagcagcagccacaacacctacctgaccggcgaccagctgagaagcgagagcagccccgaggcctacatcagatgcctgagaatgggctgcagatgcatcgagctggactgctgggacggccccgacggcaagcccgtgatctaccacggctggaccagaaccaccaagatcaagttcgacgacgtggtgcaggccatcaaggaccacgccttcgtgaccagcagcttccccgtgatcctgagcatcgaggagcactgcagcgtggagcagcagagacacatggccaaggccttcaaggaggtgttcggcgacctgctgctgaccaagcccaccgaggccagcgccgaccagctgcccagccccagccagctgagagagaagatcatcatcaagcacaagaagctgggccccagaggcgacgtggacgtgaacatggaggacaagaaggacgagcacaagcagcagggcgagctgtacatgtgggacagcatcgaccagaagtggaccagacactactgcgccatcgccgacgccaagctgagcttcagcgacgacatcgagcagaccatggaggaggaggtgccccaggacatcccccccaccgagctgcacttcggcgagaagtggttccacaagaaggtggagaagagaaccagcgccgagaagctgctgcaggagtactgcatggagaccggcggcaaggacggcaccttcctggtgagagagagcgagaccttccccaacgactacaccctgagcttctggagaagcggcagagtgcagcactgcagaatcagaagcaccatggagggcggcaccctgaagtactacctgaccgacaacctgaccttcagcagcatctacgccctgatccagcactacagagagacccacctgagatgcgccgagttcgagctgagactgaccgaccccgtgcccaaccccaacccccacgagagcaagccctggtactacgacagcctgagcagaggcgaggccgaggacatgctgatgagaatccccagagacggcgccttcctgatcagaaagagagagggcagcgacagctacgccatcaccttcagagccagaggcaaggtgaagcactgcagaatcaacagagacggcagacacttcgtgctgggcaccagcgcctacttcgagagcctggtggagctggtgagctactacgagaagcacagcctgtacagaaagatgagactgagataccccgtgacccccgagctgctggagagatacaacatggagagagacatcaacagcctgtacgacgtgagcagaatgtacgtggaccccagcgagatcaaccccagcatgccccagagaaccgtgaaggccctgtacgactacaaggccaagagaagcgacgagctgagcttctgcagaggcgccctgatccacaacgtgagcaaggagcccggcggctggtggaagggcgactacggcaccagaatccagcagtacttccccagcaactacgtggaggacatcagcaccgccgacttcgaggagctggagaagcagatcatcgaggacaaccccctgggcagcctgtgcagaggcatcctggacctgaacacctacaacgtggtgaaggccccccagggcaagaaccagaagagcttcgtgttcatcctggagcccaagcagcagggcgacccccccgtggagttcgccaccgacagagtggaggagctgttcgagtggttccagagcatcagagagatcacctggaagatcgacaccaaggagaacaacatgaagtactgggagaagaaccagagcatcgccatcgagctgagcgacctggtggtgtactgcaagcccaccagcaagaccaaggacaacctggagaaccccgacttcagagagatcagaagcttcgtggagaccaaggccgacagcatcatcagacagaagcccgtggacctgctgaagtacaaccagaagggcctgaccagagtgtaccccaagggccagagagtggacagcagcaactacgaccccttcagactgtggctgtgcggcagccagatggtggccctgaacttccagaccgccgacaagtacatgcagatgaaccacgccctgttcagcctgaacggcagaaccggctacgtgctgcagcccgagagcatgagaaccgagaagtacgaccccatgccccccgagagccagagaaagatcctgatgaccctgaccgtgaaggtgctgggcgccagacacctgcccaagctgggcagaagcatcgcctgccccttcgtggaggtggagatctgcggcgccgagtacgacaacaacaagttcaagaccaccgtggtgaacgacaacggcctgagccccatctgggcccccacccaggagaaggtgaccttcgagatctacgaccccaacctggccttcctgagattcgtggtgtacgaggaggacatgttcagcgaccccaacttcctggcccacgccacctaccccatcaaggccgtgaagagcggcttcagaagcgtgcccctgaagaacggctacagcgaggacatcgagctggccagcctgctggtgttctgcgagatgagacccgtgctggagagcgaggaggagctgtacagcagctgcagacagctgagaagaagacaggaggagctgaacaaccagctgttcctgtacgacacccaccagaacctgagaaacgccaacagagacgccctggtgaaggagttcagcgtgaacgagaaccagctgcagctgtaccaggagaagtgcaacaagagactgagagagaagagagtgagcaacagcaagttctacagctag

SEQ ID NO: 130733 - DNA, 3798 bp, Artificial Sequence
  derived and/or modified sequence
atgtcaaccaccgttaatgtggatagtctcgccgaatacgaaaaaagtcagatcaagagggccttggagcttggcacagtaatgacagtcttcagttttagaaaatctacccctgaacggcggactgtgcaggtgataatggagactcgccaggttgcttggagcaagacggcggacaagatcgaagggttcttagatatcatggaaatcaaggagatccggccaggaaaaaactcgaaggactttgaacgggcaaaggctgtcagacagaaggaggactgttgctttacgattctttacgggacacagttcgttctatccacgttatcccttgccgcagatagtaaagaagatgcggtgaactggctctcgggactgaaaatattgcatcaggaagcaatgaatgccagcacccccaccatcatagaatcttggttgcggaaacaaatttattcggtggatcaaacgaggcgcaacagcatctcactcagggagttaaagactattcttcccctgatcaatttcaaggtatcgagtgccaaatttttaaaggacaagtttgtggaaatcggggcccacaaagatgagctatccttcgaacaattccatctgttttataagaagctgatgttcgagcagcaaaagagcatcctcgacgagtttaagaaagacagttctgtgtttattctgggaaacacggaccggccagacgcctcggcggtctacctccatgacttccagaggtttctaatccacgaacaacaggaacattgggcccaggacttgaacaaagtgagagagagaatgacgaagttcattgatgatacaatgcgcgagacagcagagcccttcctgtttgtggacgagttccttacctatctgttctcccgggaaaattccatctgggacgaaaagtacgacgccgtggacatgcaggatatgaacaatccgctgtcacactactggatcagttcgagccacaacacttacctcaccggcgatcagctcagatcagaatctagcccggaggcctatatacgttgcctgcgcatggggtgcagatgtattgagctggattgctgggacgggccggatggcaagcccgttatctaccacggatggaccagaactactaagatcaaatttgacgatgtcgtgcaagctattaaggatcatgcatttgtgacatccagcttcccagtcatactgtctatcgaggaacactgttctgtggagcaacagcgacatatggctaaagccttcaaggaagtgtttggagatctgctgctcaccaaacctacagaagcatccgctgaccagctcccatcaccgtcacaactcagggagaaaatcattattaagcacaagaaactggggccccgaggcgatgtcgacgttaacatggaagacaaaaaagatgagcataaacagcagggcgagttgtatatgtgggactcaatcgaccagaagtggacgcgtcattactgcgccatcgccgacgccaaactgtctttttcagacgacatcgagcaaactatggaggaagaagtgcctcaggatattccacccacagagttgcacttcggagagaaatggtttcacaagaaggtggaaaaacgcactagcgctgagaagctcttgcaggaatattgtatggagaccgggggtaaggacggcacattcctggtgcgggaatcggaaactttccctaatgattatacactcagcttttggcgttcaggcagagtgcagcattgcaggattaggagtacaatggagggaggaaccctgaagtattatttgactgacaatcttaccttctcatctatctatgccctcattcagcattatagggagacacacttgagatgtgccgagtttgagctgcgcctgaccgatcctgtccccaaccctaatccgcatgaatcgaagccatggtactatgatagcctgtcccgtggagaggccgaggatatgctgatgagaatcccccgtgatggggcctttctcatccggaagagggaaggaagcgactcttatgccattaccttccgagcaagaggaaaggtgaaacactgccggattaaccgtgacgggcggcatttcgtcctgggtaccagcgcctattttgaatccctcgtggaactggttagctactacgagaaacattccctgtacagaaaaatgcggctgcggtaccccgtgaccccagagctgctcgagaggtacaatatggagagagacatcaattctctttacgacgtgtcaaggatgtacgtcgatcccagcgagattaacccttcaatgccacagaggacagtgaaggccctctatgactacaaggccaaacgatctgacgagttatctttctgtagaggcgccctcattcataatgtgagcaaagagccaggggggtggtggaagggggattatgggacccgaatacagcagtattttccatcgaattacgtggaggacatctctacagctgatttcgaagaactcgagaaacagatcatagaggacaatcctctgggctcactgtgtcggggaatccttgatctgaacacctataacgtagtgaaggctccacaggggaagaaccagaagagctttgtctttatcttggagcctaaacagcagggcgacccacccgtcgaattcgcaacagacagggtagaggaattgtttgaatggtttcaatccatcagagagataacatggaagattgataccaaggaaaacaacatgaagtactgggagaagaaccagtctattgccattgaactctctgacctagttgtgtattgtaaacctacctctaagactaaggacaacctcgaaaaccctgactttcgcgagatcaggagctttgttgagaccaaagctgacagcataattagacaaaagcctgtggacctgctgaaatataatcagaagggtttgacgagagtgtaccccaagggtcagcgtgtcgatagttcaaactacgacccattcagactttggctatgtggatctcagatggtcgccttaaattttcagacggcagataaatatatgcagatgaaccatgccctgtttagtctgaacggccgcaccgggtacgtgctgcagccagaaagcatgcgcacagagaagtatgatccaatgcctccagagtcgcagaggaaaatcttgatgaccctgaccgtaaaagtactgggggccagacacttgcccaagctaggcaggagtatagcctgcccatttgtcgaggtggagatatgcggggctgaatacgataataataagtttaagactaccgttgttaatgacaatggcctgagcccaatatgggcccctacccaggaaaaagtcaccttcgagatctatgatccaaacctggcttttcttcgcttcgtcgtgtacgaagaggacatgttctcagaccccaatttcctggcccacgccacgtacccaatcaaggccgtcaagtcaggttttcggtccgtgccactgaaaaatggctattccgaggatatcgagcttgcatctttgttagttttttgcgaaatgcgcccagttctagagagtgaggaggagttgtattcttcctgccggcagttacgcaggagacaggaagagctgaataatcagttattcctatacgatacgcaccagaacttgagaaatgctaaccgggatgcactcgtgaaggagtttagcgtcaacgagaatcagttgcaactgtatcaggaaaaatgcaataaacgcctcagagagaaacgtgtgtcaaactccaagttctatagctag

SEQ ID NO: 130734 - DNA, 3798 bp, Artificial Sequence
  derived and/or modified sequence
atgagcaccaccgtgaatgtggacagcctggccgagtatgagaagagccagatcaagagggccctggagctgggcaccgtgatgacagtgttctccttcaggaagagcaccccagagaggagaacagtgcaggtgatcatggagacccggcaggtggcctggagcaagacagctgacaagattgagggcttcctggacatcatggagatcaaggagatccggcctgggaagaacagcaaggactttgagcgggccaaggctgtgcggcagaaggaggactgctgcttcaccatcctgtatggcacccagtttgtgctgagcaccctgagcctggccgctgacagcaaagaagatgctgtgaactggctgagcggcctgaagatcctgcaccaggaggccatgaatgccagcacccccaccatcatcgagagctggctgaggaagcagatctacagcgtggaccagaccaggaggaacagcatcagcctgcgggagctgaagaccatcctgcccctcatcaacttcaaggtgtcctctgccaagttcctgaaggacaagtttgtggagatcggggcccacaaggatgagctgagctttgagcagttccacctgttctacaagaagctgatgtttgagcagcagaagagcatcctggatgagttcaagaaggacagcagcgtcttcatcctgggcaacacagacagaccagatgccagcgctgtgtacctgcatgacttccagcgcttcctgatccacgagcagcaggagcactgggcccaggacctgaacaaggtgcgggagaggatgaccaagttcattgatgacaccatgagggagacagctgagcccttcctgtttgtggatgagttcctgacctacctgttcagccgggagaacagcatctgggatgagaagtatgatgctgtggacatgcaggacatgaacaaccccctgagccactactggatcagcagcagccacaacacctacctgaccggggaccagctgcggtctgagagcagccctgaggcctacatccgctgcctgaggatgggctgccgctgcatcgagctggactgctgggatggcccagatggcaagcctgtgatctaccacggctggaccaggaccaccaagatcaagtttgatgatgtggtgcaggccatcaaggaccacgcctttgtgaccagcagcttccctgtgatcctgagcattgaggagcactgcagcgtggagcagcagaggcacatggccaaggccttcaaggaggtgtttggagacctgctgctgaccaagcccacagaggccagcgctgaccagctgcccagccccagccagctgcgggagaagatcatcatcaagcacaagaagctgggccccagaggagatgtggatgtgaacatggaggacaagaaggatgagcacaagcagcagggcgagctgtacatgtgggacagcattgaccagaagtggaccaggcactactgtgccatcgcagatgccaagctgtccttcagtgatgacatcgagcagaccatggaggaggaggtgccccaggacatccccccaacagagctgcactttggagagaagtggttccacaagaaggtggagaagaggaccagcgctgagaagctgctgcaggagtactgcatggagaccggcggcaaggatggcaccttcctggtgcgggagagcgagaccttccccaatgactacaccctgtccttctggaggagcggccgggtgcagcactgccgcatccgcagcaccatggagggcggcaccctgaagtactacctgacagacaacctgaccttcagcagcatctatgccctgatccagcactaccgggagacccacctgcgctgtgccgagtttgagctgcggctgacagatcctgtgcccaaccccaacccccatgagagcaagccctggtactatgacagcctgagcagaggagaggccgaggacatgctgatgaggatccccagagatggagccttcctgatcaggaagcgggagggcagtgacagctatgccatcaccttccgggcccggggcaaggtgaagcactgccgcatcaacagagatggccgccactttgtgctgggcaccagcgcctactttgagagcctggtggagctggtgtcctactatgagaagcacagcctgtacaggaagatgaggctgcgctaccctgtgaccccagagctgctggagcgctacaacatggagcgggacatcaacagcctgtatgatgtgtccaggatgtatgtggaccccagcgagatcaaccccagcatgccccagaggacagtgaaggccctgtatgactacaaggccaagagaagtgatgagctgtccttctgccgcggggccctgatccacaacgtgtccaaggagcccggcggctggtggaagggggactatggcacccgcatccagcagtacttccccagcaactacgtggaggacatcagcacagctgactttgaggagctggagaagcagatcatcgaggacaaccccctgggcagcctgtgccggggcatcctggacctgaacacctacaacgtggtgaaggccccccagggcaagaaccagaagagctttgtgttcatcctggagcccaagcagcagggcgacccccctgtggagtttgccacagacagagtggaggagctgtttgagtggttccagagcatccgggagatcacctggaagattgacaccaaggagaacaacatgaagtactgggagaagaaccagagcatcgccatcgagctgagtgacctggtggtgtactgcaagcccaccagcaagaccaaggacaacctggagaacccagacttccgggagatccgcagctttgtggagaccaaggctgacagcatcatccggcagaagcctgtggacctgctgaagtacaaccagaagggcctgaccagggtgtaccccaagggccagagggtggacagcagcaactatgaccccttccggctgtggctgtgtggcagccagatggtggccctgaacttccagacagctgacaagtacatgcagatgaaccacgccctcttcagcctgaatggaagaacaggctacgtgctgcagcctgagagcatgaggacagagaagtatgaccccatgcctcctgagagccagaggaagatcctgatgaccctgactgtgaaggtgctgggcgcccggcacctgcccaagctgggccgcagcatcgcctgcccctttgtggaggtggagatctgtggggctgaatatgacaacaacaagttcaagaccaccgtggtgaatgacaatggcctgagccccatctgggcccccacccaggagaaggtgacctttgagatctatgaccccaacctggccttcctgcgctttgtggtgtatgaggaggacatgttcagtgaccccaacttcctggcccacgccacctaccccatcaaggctgtgaagagcggcttccgctctgtgcccctgaagaatggctacagtgaagatattgagctggccagcctgctggtgttctgtgagatgaggcctgtgctggagagcgaggaggagctgtacagcagctgccggcagctgcggcggcggcaggaggagctgaacaaccagctgttcctgtatgacacccaccagaacctgagaaatgccaacagagatgccctggtgaaggagttctctgtgaatgaaaaccagctgcagctgtaccaggagaagtgcaacaagaggctgcgggagaagagggtgagcaacagcaagttctacagctag

SEQ ID NO: 130735 - DNA, 3798 bp, Artificial Sequence
  derived and/or modified sequence
atgagcaccaccgtgaacgtggacagcctggccgagtacgagaagagccagatcaagcgcgctctggaactgggcacggtgatgacagtcttttcctttcggaaatccacaccggaacgccgtacagtacaagtgattatggaaaccaggcaagttgcctggagcaaaactgctgacaagatcgagggcttcctggacataatggaaattaaggaaatcaggcctggcaagaatagcaaagattttgagcgggcaaaggctgttcgtcagaaggaggactgctgctttacaatattatatggaactcagttcgtcctctcgactctctccctggccgccgacagcaaggaggatgcagtgaactggctcagtggtctcaagatcctgcatcaagaggctatgaatgctagcacccccacaataattgagagctggctgcgaaaacaaatttactctgtggatcaaactagacggaactctatcagtctcagagagttaaagacgatcctgcctttgataaactttaaagtgtcaagcgccaagtttctcaaagacaagtttgtggaaattggggcacacaaagatgagctgtctttcgagcagtttcatttgttttataagaaactgatgttcgagcagcagaagtcaatacttgatgagtttaagaaggattcctccgtttttatcctgggtaacacggataggcccgatgcatctgctgtgtacctccatgattttcagcggtttctcatccacgaacagcaggaacactgggcgcaggatctcaataaggtcagggagagaatgaccaagtttatcgatgacaccatgagggagaccgcagagccctttctattcgtggacgagttcctcacttatctttttagtcgggagaatagcatatgggacgaaaaatatgacgcagtggacatgcaagacatgaacaacccactctctcattactggatcagcagtagccataacacctacctcacgggtgaccaacttcgctcggagtcctcgccagaggcttatatccgttgtctgcgtatgggctgtagatgcatcgaattagactgttgggatggaccggatggaaagcctgtgatctatcacggatggactcgaaccactaagattaaattcgacgacgttgttcaggcaataaaggaccacgccttcgtgacgtccagcttccctgtgatattaagcatcgaggagcattgctctgttgaacaacagagacatatggcaaaggctttcaaggaagtgtttggagatctgctgctgactaaacctactgaggcctccgcagatcagctgccctctccaagccagctccgggagaaaattattattaaacacaagaagctgggaccccgcggtgacgtggacgttaacatggaggacaaaaaggatgaacacaaacagcagggtgagctctacatgtgggactccatcgatcagaagtggacgcgccattattgcgctattgccgacgctaagttaagtttctctgatgacatcgaacagacaatggaagaggaagtgcctcaagatataccccccactgagctgcattttggcgagaagtggtttcacaaaaaagtggaaaaaagaacctcagccgagaaactcctccaggagtactgtatggagaccggaggtaaggatggaacttttctggtgcgggaatctgagactttccctaacgactacaccctgagcttttggagaagcggtagagtccagcactgtagaatccgctccacaatggagggtggtaccctgaagtactatctgactgataacctcactttcagctctatttacgctctcatccaacactatcgggagacccacctgaggtgcgcagaattcgagttgcgcttgaccgatccggtgcctaaccccaatccacatgaatcgaagccctggtactacgattccctcagccgcggtgaggcagaagatatgttaatgagaatacccagagacggcgcatttctgattagaaagcgggaagggagtgatagctatgccatcacttttcgcgctagagggaaagttaaacattgtaggatcaaccgcgacggccggcacttcgtcctgggaaccagcgcatattttgagagcctggtggagcttgtgtcctactatgagaagcattccctctatagaaagatgcggctgcggtacccggtcactcctgagcttctagaaaggtataatatggagcgggacattaactcgctgtatgatgttagtcgaatgtatgtagatccctccgagattaacccttccatgccacagaggacagttaaagcactgtatgattataaagctaagaggagcgacgagctcagtttctgccggggagccctgatccataacgtgtccaaagagccaggcgggtggtggaagggtgattacgggacgcggattcagcagtacttcccaagcaattatgtggaggatatcagcacagcagatttcgaagaactcgagaaacagattatcgaggacaaccctctgggcagcctttgccgtggcatcctagacctcaatacatataatgtcgtgaaagcccctcaaggcaagaaccagaaatcattcgtgtttatactcgaacccaagcagcagggtgatccacccgttgagtttgctacagaccgcgtcgaagaattattcgagtggttccagtctatacgggaaatcacctggaaaatcgacacaaaggaaaataatatgaagtactgggagaagaatcaatctatagctattgaactcagcgatctggtggtgtattgtaagcccacctcgaagaccaaagacaatctggagaacccagatttcagggagatacggagcttcgttgaaacgaaagctgactcaattatccgccagaaacccgtggacctgctcaaatacaatcagaagggtctgacccgcgtgtaccctaagggacagagagtggattcatccaattacgaccctttccggctctggctatgcggctcgcagatggttgccctgaacttccagaccgcagataagtatatgcagatgaatcacgccttattctcactgaacggacgcaccggttacgtgttacaaccagaatctatgaggaccgaaaagtacgacccaatgcccccagaaagtcagcggaaaatcctgatgaccctgactgtgaaagtgttgggggcccgacacctgcccaagctgggaaggagcattgcttgtccctttgtggaagtggagatttgcggtgcagagtatgataacaataagtttaagacaacggtggtgaacgataacggcctcagccccatctgggcccctacacaggaaaaggtgacgtttgagatatacgaccccaacttggcattcctgcgctttgtggtctacgaagaagacatgttttccgaccccaactttttggcgcacgctacatatccgatcaaagccgtaaaatctgggttccggagtgtacctttgaagaatggctatagcgaggacatcgaacttgcatcacttttggtgttctgcgagatgcgcccggtcctggaatctgaagaggagctctatagtagctgcaggcaacttaggcgccgccaggaagagctcaacaaccagctttttctgtacgatactcaccagaatctcaggaacgctaatagggatgcgctagtaaaagagttctcagtgaatgagaaccagctgcaactgtatcaagagaagtgtaacaaacgcctgcgcgagaaaagggtgtcaaattctaaattttacagctag

SEQ ID NO: 130736 - DNA, 3798 bp, Artificial Sequence
  derived and/or modified sequence
atgtccactaccgttaatgtcgatagcctcgccgaatacgagaagtcacagattaaacgagcgctcgaactgggaacggtcatgactgtgttcagctttcgcaaatccacaccagaacgtaggacagtccaggtgattatggaaacgaggcaagtggcatggagcaagaccgcagataagattgagggttttctcgacatcatggaaataaaggaaattagaccaggaaagaacagcaaagatttcgaacgcgcaaaagctgtaaggcaaaaggaggactgctgttttacaatactgtacggaacacagtttgtgctgagtactctcagcctcgccgcagattcaaaagaggacgcggtgaactggctgagcggcctgaaaatccttcatcaggaggccatgaatgcctctaccccaaccattatagaaagttggcttcgcaaacaaatctatagcgttgatcagacgcgacgtaattcaatctctctgcgcgaacttaaaacaattctgcccctgattaatttcaaggtttcaagcgccaagttcctgaaagataagtttgttgagattggagcacacaaggatgaactgtcattcgagcagtttcatctcttttacaaaaaattgatgtttgagcagcaaaagtccattcttgatgaatttaaaaaggacagctccgtatttatattgggtaatacggaccggcctgacgcaagcgctgtgtatctgcacgatttccaaagatttctgatccacgagcagcaagagcactgggcccaggatttgaataaggtcagagaaagaatgacaaagttcattgacgataccatgcgggaaaccgccgaacccttcctctttgtagatgaattcctgacttacctgttcagcagggagaactccatatgggatgagaaatatgatgcggtcgacatgcaggacatgaacaatcctctgagccactattggatcagttcttcccataatacctacttaaccggagatcagcttcgctctgagtcatcaccagaggcctacatcagatgcctccggatggggtgtcggtgtatcgagctcgactgttgggatggccctgacggcaagccagtcatctaccatggttggactagaacgactaaaatcaaatttgatgacgtggtgcaggccatcaaggaccatgcatttgtcacatcaagcttcccagtcattctgtcaatagaagaacattgtagcgtcgagcaacaacgccacatggctaaggcctttaaggaggttttcggtgatttattgctgactaaaccgacggaggcctctgctgaccagctcccatcaccgagccagctgcgggagaagattatcatcaagcacaaaaaactcggacctagaggcgatgtcgatgtgaacatggaggacaaaaaagatgagcacaaacagcagggagaactgtacatgtgggactcaatcgatcagaagtggactcgccactattgtgccattgccgacgcaaagctgtcgttctccgacgacatcgaacagacaatggaggaggaagtcccacaggacataccacccacagagctgcacttcggggaaaaatggttccacaagaaggttgaaaagcgaactagcgctgaaaaacttctgcaggaatactgtatggaaacaggcggaaaggacggaacattcctcgtgagagagagcgagacgtttccgaatgactacacactgtccttttggcgttcagggagagtccagcattgcaggatacggtccaccatggaaggcggaacactcaagtattatttgaccgacaatctgacctttagttcgatctacgccctcattcagcattaccgagaaacccacttgcggtgtgcagaatttgagcttcggttgacagacccggtcccaaacccaaatcctcatgaatctaagccctggtattatgattctctgtcccgcggagaggccgaagacatgctgatgcgcatccccagagacggggctttcttgatcaggaaacgtgaggggagcgactcatacgccatcacctttcgcgctagaggaaaggtgaagcactgtcggatcaatagagacggcagacatttcgtgctaggaacctccgcttactttgagtcactggtcgaactggtgtcctactacgagaaacattccctttacaggaaaatgcggctgagatacccggtgactcccgaattgctggagcgctacaatatggaacgggatataaactccctctatgacgtttcccggatgtacgtagatcctagtgagataaacccctcaatgccacagaggaccgtgaaggccttgtacgattacaaggcaaagagatccgatgagctgtccttttgtaggggtgcattaatccataacgtttccaaggagcccggaggttggtggaaaggcgattacggtactagaattcagcagtactttcctagtaactatgtggaggatatttcaacagcagactttgaggagcttgaaaagcagattatcgaggacaatcccttggggtcgctctgccgtggcatccttgacctgaacacctacaacgtcgtgaaagccccacagggtaagaaccagaaaagtttcgtcttcatcctagaaccaaagcaacaaggggaccctcccgtagagttcgcaacggacagggtggaagagttgttcgaatggtttcagtctatccgggagattacatggaagattgacacgaaggaaaacaatatgaaatactgggagaaaaaccagtcgattgcaatagaactgtccgacctggttgtttactgcaaaccgaccagtaaaaccaaggacaatttagaaaaccccgacttcagagaaattcggagctttgtggagactaaggcagacagcattattcgccaaaaacctgtggaccttctgaagtacaaccagaaaggccttaccagagtgtacccaaaggggcagcgggttgattcctctaattacgatcccttccgcctttggctgtgtggctctcagatggtggcattgaacttccagactgcagacaaatacatgcagatgaaccacgctctcttcagtttgaacgggaggacaggctacgtgctgcaacccgaatctatgcgtaccgaaaagtatgacccaatgcctccagaaagccagcggaaaattctcatgactctcacggtgaaagtcctaggcgctcgccatctcccaaagctaggaaggtctatcgcctgtccattcgtggaggtggagatttgcggggcagaatatgataataataagttcaagactactgtggtgaacgacaacggtctgtcccctatctgggctcctacccaggaaaaggtaacatttgaaatttacgaccctaatttagcttttctgaggtttgtggtgtatgaggaggatatgttcagtgaccctaatttccttgcccacgctacttaccctatcaaggccgtcaaaagtggcttcaggagcgtcccactgaaaaacggttacagcgaggatatcgagctcgcttccctgctcgttttttgtgaaatgcggccagtgcttgaatccgaagaagagctctattcgtcttgtcgtcagcttagacgacggcaagaagagctgaacaatcagctgtttctctatgacacgcaccagaacttgcggaatgccaaccgcgacgcccttgtcaaagagtttagtgtgaatgagaaccaattgcagctttatcaagagaagtgcaataagcgccttcgagagaagcgtgtcagtaatagtaagttctacagctag

SEQ ID NO: 130737 - DNA, 4263 bp, Artificial Sequence
  derived and/or modified sequence
gcgccggcggcggagggcgtgagcggcgctgagtgacccgagtcgggacgcgggctgcgcgcgcgggaccccggagcccaaacccggggcaggcgggcagctgtgcccgggcggcacggccagcttcctgatttctcccgattccttccttctccctggagcggccgacaatgtccaccacggtcaatgtagattcccttgcggaatatgagaagagccagatcaagagagccctggagctggggacggtgatgactgtgttcagcttccgcaagtccacccccgagcggagaaccgtccaggtgatcatggagacgcggcaggtggcctggagcaagaccgctgacaagatcgagggcttcttggatatcatggaaataaaagaaatccgcccagggaagaactccaaagatttcgagcgagcaaaagcagttcgccagaaagaagactgctgcttcaccatcctatatggcactcagttcgtcctcagcacgctcagcttggcagctgactctaaagaggatgcagttaactggctctctggcttgaaaatcttacaccaggaagcgatgaatgcgtccacgcccaccattatcgagagttggctgagaaagcagatatattctgtggatcaaaccagaagaaacagcatcagtctccgagagttgaagaccatcttgcccctgatcaactttaaagtgagcagtgccaagttccttaaagataagtttgtggaaataggagcacacaaagatgagctcagctttgaacagttccatctcttctataaaaaacttatgtttgaacagcaaaaatcgattctcgatgaattcaaaaaggattcgtccgtgttcatcctggggaacactgacaggccggatgcctctgctgtttacctgcatgacttccagaggtttctcatacatgaacagcaggagcattgggctcaggatctgaacaaagtccgtgagcggatgacaaagttcattgatgacaccatgcgtgaaactgctgagcctttcttgtttgtggatgagttcctcacgtacctgttttcacgagaaaacagcatctgggatgagaagtatgacgcggtggacatgcaggacatgaacaaccccctgtctcattactggatctcctcgtcacataacacgtaccttacaggtgaccagctgcggagcgagtcgtccccagaagcttacatccgctgcctgcgcatgggctgtcgctgcattgaactggactgctgggacgggcccgatgggaagccggtcatctaccatggctggacgcggactaccaagatcaagtttgacgacgtcgtgcaggccatcaaagaccacgcctttgttacctcgagcttcccagtgatcctgtccatcgaggagcactgcagcgtggagcaacagcgtcacatggccaaggccttcaaggaagtatttggcgacctgctgttgacgaagcccacggaggccagtgctgaccagctgccctcgcccagccagctgcgggagaagatcatcatcaagcataagaagctgggcccccgaggcgatgtggatgtcaacatggaggacaagaaggacgaacacaagcaacagggggagctgtacatgtgggattccattgaccagaaatggactcggcactactgcgccattgccgatgccaagctgtccttcagtgatgacattgaacagactatggaggaggaagtgccccaggatataccccctacagaactacattttggggagaaatggttccacaagaaggtggagaagaggacgagtgccgagaagttgctgcaggaatactgcatggagacggggggcaaggatggcaccttcctggttcgggagagcgagaccttccccaatgactacaccctgtccttctggcggtcaggccgggtccagcactgccggatccgctccaccatggagggcgggaccctgaaatactacttgactgacaacctcaccttcagcagcatctatgccctcatccagcactaccgcgagacgcacctgcgctgcgccgagttcgagctgcggctcacggaccctgtgcccaaccccaacccccacgagtccaagccgtggtactatgacagcctgagccgcggagaggcagaggacatgctgatgaggattccccgggacggggccttcctgatccggaagcgagaggggagcgactcctatgccatcaccttcagggctaggggcaaggtaaagcattgtcgcatcaaccgggacggccggcactttgtgctggggacctccgcctattttgagagtctggtggagctcgtcagttactacgagaagcattcactctaccgaaagatgagactgcgctaccccgtgacccccgagctcctggagcgctacaatatggaaagagatataaactccctctacgacgtcagcagaatgtatgtggatcccagtgaaatcaatccgtccatgcctcagagaaccgtgaaagctctgtatgactacaaagccaagcgaagcgatgagctgagcttctgccgtggtgccctcatccacaatgtctccaaggagcccgggggctggtggaaaggagactatggaaccaggatccagcagtacttcccatccaactacgtcgaggacatctcaactgcagacttcgaggagctagaaaagcagattattgaagacaatcccttagggtctctttgcagaggaatattggacctcaatacctataacgtcgtgaaagcccctcagggaaaaaaccagaagtcctttgtcttcatcctggagcccaagcagcagggcgatcctccggtggagtttgccacagacagggtggaggagctctttgagtggtttcagagcatccgagagatcacctggaagattgacaccaaggagaacaacatgaagtactgggagaagaaccagtccatcgccatcgagctctctgacctggttgtctactgcaaaccaaccagcaaaaccaaggacaacttagaaaatcctgacttccgagaaatccgctcctttgtggagacgaaggctgacagcatcatcagacagaagcccgtcgacctcctgaagtacaatcaaaagggcctgacccgcgtctacccaaagggacaaagagttgactcttcaaactacgaccccttccgcctctggctgtgcggttctcagatggtggcactcaatttccagacggcagataagtacatgcagatgaatcacgcattgttttctctcaatgggcgcacgggctacgttctgcagcctgagagcatgaggacagagaaatatgacccgatgccacccgagtcccagaggaagatcctgatgacgctgacagtcaaggttctcggtgctcgccatctccccaaacttggacgaagtattgcctgtccctttgtagaagtggagatctgtggagccgagtatgacaacaacaagttcaagacgacggttgtgaatgataatggcctcagccctatctgggctccaacacaggagaaggtgacatttgaaatttatgacccaaacctggcatttctgcgctttgtggtttatgaagaagatatgttcagcgatcccaactttcttgctcatgccacttaccccattaaagcagtcaaatcaggattcaggtccgttcctctgaagaatgggtacagcgaggacatagagctggcttccctcctggttttctgtgagatgcggccagtcctggagagcgaagaggaactttactcctcctgtcgccagctgaggaggcggcaagaagaactgaacaaccagctctttctgtatgacacacaccagaacttgcgcaatgccaaccgggatgccctggttaaagagttcagtgttaatgagaaccagctccagctgtaccaggagaaatgcaacaagaggttaagagagaagagagtcagcaacagcaagttttactcatagaagctggggtatgtgtgtaagggtattgtgtgtgtgcgcatgtgtgtttgcatgtaggagaacgtgccctattcacactctgggaagacgctaatctgtgacatcttttcttcaagcctgccatcaaggacatttcttaagacccaactggcatgagttggggtaatttcctattattttcatcttggacaactttcttaacttatattctttatagaggattccccaaaatgtgctcctcatttttggcctctcatgttccaaacctcattgaataaaagcaatgaaaaccttg

SEQ ID NO: 130738 - DNA, 1282 bp, Artificial Sequence
  derived and/or modified sequence
gaacactgacaggccggatgcctctgctgtttacctgcatgacttccagaggtttctcatacatgaacagcaggagcattgggctcaggatctgaacaaagtccgtgagcggatgacaaagttcattgatgacaccatgcgtgaaactgctgagcctttcttgtttgtggatgagttcctcacgtacctgttttcacgagaaaacagcatctgggatgagaagtatgacgcggtggacatgcaggacatgaacaaccccctgtctcattactggatctcctcgtcacataacacgtaccttacaggtgaccagctgcggagcgagtcgtccccagaagcttacatccgctgcctgcgcatgggctgtcgctgcattgaactggactgctgggacgggcccgatgggaagccggtcatctaccatggctggacgcggactaccaagatcaagtttgacgacgtcgtgcaggccatcaaagaccacgcctttgttacctcgagatgtcccttgagctgggtggaggtgttgctgtgagacaatgaaattatggacgtcttttcgcacttggtgaaaacctttcaatgaaggcatatgatttctccatcgcagcattctcccctgtggggtcctagcccttctaagtgccaacctccatcaggcagatggaaggagctggtattaacagacactgtgcagtggcagcttacactctgctttgagagtttgctttcatttgcaggacataggtgcttatggttgtgagctgacagtcattcatcgaacattatctcattcatgactagaggaagttttttctggttaaaatagggctggaatcatctaacacctatagggctagaactctgtaatcaaacattaatgcattaatgttttggcagcaaaagccatccttattggtattaagagggatttaagaaaatgattgcaagcagcgttcattcgaatggttcagattttgctgtcagttacattttgataccaacttactaggtagcctttgttgtaaaagctttttagctgttatgttctagtaagggtgtgtggatcaggatcggggagtgagctgggtccacgcttcccaggagtgatgaggctatgatttacttgagctggaacatggttaaggattttatttttatcatcgtcactttattttcacatttgccttcatttctattgagtgacgtgatttcctatttatggaagtgacatagctgcctttagaataattttgtttcatagtaaatgccatgcacaagc

SEQ ID NO: 130739 - DNA, 454 bp, Artificial Sequence
  derived and/or modified sequence
ggacatgcaggacatgaacaaccccctgtctcattactggatctcctcgtcacataacactggactgctgggacgggcccgatgggaagccggtcatctaccatggctggacgcggactaccaagatcaagtttgacgacgtcgtgcaggccatcaaagaccacgcctttgttacctcgagcataagaagctgggcccccgaggcgatgtggatgtcaacatggaggacaagaaggacgaacacaagcaacagggggagctgtacatgtgggattccattgaccaggatccagtacccggtgctgccgtgcatttaggttgtcctgactccttcgtgtcctccaactgggggtcgttccaccagaaaccttatttttcagactttaatgctgcctctatccctttacctaatgtgtatatccattttgagtatatttttacatgtccgttctta

SEQ ID NO: 130740 - DNA, 912 bp, Artificial Sequence
  derived and/or modified sequence
tccctccaggggcccaagagccactggtactcagtgtctgggtgggggcaggggggatttttgttctcccagcacctgcggctgttgagaccagagaagctggtggtcgaccacagcctggggtattagttcacccctagcttctccccagcgagaccccagggcccttgggcacaggggattaagcctctatctgcttacgtgcaagcggaagaaataggcccagagagcaacagtggcgggtctgcagtcacacagccaacttgcgcttgtggcagtggcaaggttgaagttctgagggtacccctcactcaagctccaggcgtcaggaaaagaacattccacgaagtccatctggaagacggtcctttccctgctgcccccagcttcctgatttctcccgattccttccttctccctggagcggccgacaatgtccaccacggtcaatgtagattcccttgcggaatatgagaagagccagatcaagagagccctggagctggggacggtgatgactgtgttcagcttccgcaagtccacccccgagcggagaaccgtccaggtgatcatggagacgcggcaggtggcctggagcaagaccgctgacaagatcgagggcttcttggatatcatggaaataaaagaaatccgcccagggaagaactccaaagatttcgagcgagcaaaagcagttcgccagaaagaagactgctgcttcaccatcctatatggcactcagttcgtcctcagcacgctcagcttggcagctgactctaaagaggatgcagttaactggctctctggcttgaaaatcttacaccaggaagcgatgaatgcgtccacgcccaccattatcgagagttggctgagaaagcagatatattctgtggatcaaaccagaagaaacag

SEQ ID NO: 130741 - protein, 1074 aa, Artificial Sequence
  derived and/or modified sequence
MSLKNEPRVNTSALQKIAADMSNIIENLDTRELHFEGEEVDYDVSPSDPKIQEVYIPFSAIYNTQGFKEPNIQTYLSGCPIKAQVLEVERFTSTTRVPSINLYTIELTHGEFKWQVKRKFKHFQEFHRELLKYKAFIRIPIPTRRHTFRRQNVREEPREMPSLPRSSENMIREEQFLGRRKQLEDYLTKILKMPMYRNYHATTEFLDISQLSFIHDLGPKGIEGMIMKRSGGHRIPGLNCCGQGRACYRWSKRWLIVKDSFLLYMKPDSGAIAFVLLVDKEFKIKVGKKETETKYGIRIDNLSRTLILKCNSYRHARWWGGAIEEFIQKHGTNFLKDHRFGSYAAIQENALAKWYVNAKGYFEDVANAMEEANEEIFITDWWLSPEIFLKRPVVEGNRWRLDCILKRKAQQGVRIFIMLYKEVELALGINSEYTKRTLMRLHPNIKVMRHPDHVSSTVYLWAHHEKLVIIDQSVAFVGGIDLAYGRWDDNEHRLTDVGSVKRVTSGPSLGSLPPAAMESMESLRLKDKNEPVQNLPIQKSIDDVDSKLKGIGKPRKFSKFSLYKQLHRHHLHDADSISSIDSTSSYFNHYRSHHNLIHGLKPHFKLFHPSSESEQGLTRPHADTGSIRSLQTGVGELHGETRFWHGKDYCNFVFKDWVQLDKPFADFIDRYSTPRMPWHDIASAVHGKAARDVARHFIQRWNFTKIMKSKYRSLSYPFLLPKSQTTAHELRYQVPGSVHANVQLLRSAADWSAGIKYHEESIHAAYVHVIENSRHYIYIENQFFISCADDKVVFNKIGDAIAQRILKAHRENQKYRVYVVIPLLPGFEGDISTGGGNALQAIMHFNYRTMCRGENSILGQLKAELGNQWINYISFCGLRTHAELEGNLVTELIYVHSKLLIADDNTVIIGSANINDRSMLGKRDSEMAVIVQDTETVPSVMDGKEYQAGRFARGLRLQCFRVVLGYLDDPSEDIQDPVSDKFFKEVWVSTAARNATIYDKVFRCLPNDEVHNLIQLRDFINKPVLAKEDPIRAEEELKKIRGFLVQFPFYFLSEESLLPSVGTKEAIVPMEVWT

SEQ ID NO: 130742 - DNA, 3225 bp, Artificial Sequence
  derived and/or modified sequence
atgagcctgaagaacgagcccagagtgaacaccagcgccctgcagaagatcgccgccgacatgagcaacatcatcgagaacctggacaccagagagctgcacttcgagggcgaggaggtggactacgacgtgagccccagcgaccccaagatccaggaggtgtacatccccttcagcgccatctacaacacccagggcttcaaggagcccaacatccagacctacctgagcggctgccccatcaaggcccaggtgctggaggtggagagattcaccagcaccaccagagtgcccagcatcaacctgtacaccatcgagctgacccacggcgagttcaagtggcaggtgaagagaaagttcaagcacttccaggagttccacagagagctgctgaagtacaaggccttcatcagaatccccatccccaccagaagacacaccttcagaagacagaacgtgagagaggagcccagagagatgcccagcctgcccagaagcagcgagaacatgatcagagaggagcagttcctgggcagaagaaagcagctggaggactacctgaccaagatcctgaagatgcccatgtacagaaactaccacgccaccaccgagttcctggacatcagccagctgagcttcatccacgacctgggccccaagggcatcgagggcatgatcatgaagagaagcggcggccacagaatccccggcctgaactgctgcggccagggcagagcctgctacagatggagcaagagatggctgatcgtgaaggacagcttcctgctgtacatgaagcccgacagcggcgccatcgccttcgtgctgctggtggacaaggagttcaagatcaaggtgggcaagaaggagaccgagaccaagtacggcatcagaatcgacaacctgagcagaaccctgatcctgaagtgcaacagctacagacacgccagatggtggggcggcgccatcgaggagttcatccagaagcacggcaccaacttcctgaaggaccacagattcggcagctacgccgccatccaggagaacgccctggccaagtggtacgtgaacgccaagggctacttcgaggacgtggccaacgccatggaggaggccaacgaggagatcttcatcaccgactggtggctgagccccgagatcttcctgaagagacccgtggtggagggcaacagatggagactggactgcatcctgaagagaaaggcccagcagggcgtgagaatcttcatcatgctgtacaaggaggtggagctggccctgggcatcaacagcgagtacaccaagagaaccctgatgagactgcaccccaacatcaaggtgatgagacaccccgaccacgtgagcagcaccgtgtacctgtgggcccaccacgagaagctggtgatcatcgaccagagcgtggccttcgtgggcggcatcgacctggcctacggcagatgggacgacaacgagcacagactgaccgacgtgggcagcgtgaagagagtgaccagcggccccagcctgggcagcctgccccccgccgccatggagagcatggagagcctgagactgaaggacaagaacgagcccgtgcagaacctgcccatccagaagagcatcgacgacgtggacagcaagctgaagggcatcggcaagcccagaaagttcagcaagttcagcctgtacaagcagctgcacagacaccacctgcacgacgccgacagcatcagcagcatcgacagcaccagcagctacttcaaccactacagaagccaccacaacctgatccacggcctgaagccccacttcaagctgttccaccccagcagcgagagcgagcagggcctgaccagaccccacgccgacaccggcagcatcagaagcctgcagaccggcgtgggcgagctgcacggcgagaccagattctggcacggcaaggactactgcaacttcgtgttcaaggactgggtgcagctggacaagcccttcgccgacttcatcgacagatacagcacccccagaatgccctggcacgacatcgccagcgccgtgcacggcaaggccgccagagacgtggccagacacttcatccagagatggaacttcaccaagatcatgaagagcaagtacagaagcctgagctaccccttcctgctgcccaagagccagaccaccgcccacgagctgagataccaggtgcccggcagcgtgcacgccaacgtgcagctgctgagaagcgccgccgactggagcgccggcatcaagtaccacgaggagagcatccacgccgcctacgtgcacgtgatcgagaacagcagacactacatctacatcgagaaccagttcttcatcagctgcgccgacgacaaggtggtgttcaacaagatcggcgacgccatcgcccagagaatcctgaaggcccacagagagaaccagaagtacagagtgtacgtggtgatccccctgctgcccggcttcgagggcgacatcagcaccggcggcggcaacgccctgcaggccatcatgcacttcaactacagaaccatgtgcagaggcgagaacagcatcctgggccagctgaaggccgagctgggcaaccagtggatcaactacatcagcttctgcggcctgagaacccacgccgagctggagggcaacctggtgaccgagctgatctacgtgcacagcaagctgctgatcgccgacgacaacaccgtgatcatcggcagcgccaacatcaacgacagaagcatgctgggcaagagagacagcgagatggccgtgatcgtgcaggacaccgagaccgtgcccagcgtgatggacggcaaggagtaccaggccggcagattcgccagaggcctgagactgcagtgcttcagagtggtgctgggctacctggacgaccccagcgaggacatccaggaccccgtgagcgacaagttcttcaaggaggtgtgggtgagcaccgccgccagaaacgccaccatctacgacaaggtgttcagatgcctgcccaacgacgaggtgcacaacctgatccagctgagagacttcatcaacaagcccgtgctggccaaggaggaccccatcagagccgaggaggagctgaagaagatcagaggcttcctggtgcagttccccttctacttcctgagcgaggagagcctgctgcccagcgtgggcaccaaggaggccatcgtgcccatggaggtgtggacctag

SEQ ID NO: 130743 - DNA, 3225 bp, Artificial Sequence
  derived and/or modified sequence
atgagccttaaaaatgaacccagggtaaatacttcagcactgcagaaaatcgctgccgatatgtccaatattattgaaaacttggacactagggagctgcacttcgagggcgaggaagtcgactacgatgtttctcctagtgatcccaagatccaggaggtgtatatcccattcagcgctatatacaacacccagggctttaaggaacctaatatacaaacctatctgtcagggtgtcctattaaggctcaggtgctggaagttgaaagatttacatccactacaagagtccccagcatcaacttatatactatagagcttacacatggggagtttaaatggcaggtaaagcggaagttcaaacactttcaggagtttcatagagaactgcttaagtataaagcatttatccggatacccatcccaacacggaggcacaccttccgtaggcagaacgtccgggaggaacctagggagatgccctcattgcctcgtagttctgagaacatgattagggaagagcagttcctgggccgccgcaagcagttggaagactaccttaccaagatccttaaaatgccgatgtaccggaactatcacgcaactactgagtttttggacatctctcagctgagtttcatccatgatcttgggcccaaaggcatagaggggatgatcatgaagcgctccggaggccacaggattccagggctcaactgttgcgggcaggggcgggcttgctaccgctggtctaagcggtggctgatcgtgaaggactcttttctgctctacatgaagccagactccggggccattgcctttgtattgctcgtggacaaagaatttaagattaaagtggggaagaaggagactgagactaagtacgggattagaatcgacaatctgtctaggacgctgattctgaagtgcaattcctacaggcatgccagatggtggggtggtgcaattgaggaatttattcagaaacatggtaccaactttctgaaagaccataggtttggctcttatgctgcaatacaggaaaatgccctggctaaatggtatgtaaatgcgaagggttacttcgaagatgtggccaatgccatggaggaagcaaacgaggagattttcattactgactggtggctgtctcctgaaatatttttgaagcggcccgtcgtcgaaggcaacaggtggagactggactgtatcttaaaaagaaaagcccagcagggagttagaattttcatcatgctgtacaaggaagttgaattggcactcgggatcaacagtgagtacacaaagcggaccctcatgagactacatcccaatataaaggtaatgcggcaccctgaccatgtgagctccacagtctatttatgggcccatcacgaaaagctagtgataatcgaccagagcgtggcctttgtgggaggcattgatctggcctatggcaggtgggatgacaacgagcacagactcactgacgtgggctctgtcaagcgcgtgaccagtgggcctagcttgggcagtctgccacccgcagctatggaatcaatggaatcactgaggctcaaagacaaaaatgaacccgtgcagaatcttccgattcaaaagagcatcgatgatgttgacagcaagctgaagggaataggaaagccccggaaattttctaagttcagcctgtacaagcagttgcaccggcaccatctacacgatgctgactccatctcttctatcgattctacatccagctattttaatcattaccggagccaccacaatctgatccatgggctcaaaccacacttcaagctttttcacccctcttccgaatcagaacagggtctcactaggcctcacgctgacactggctcaatacgtagcctccagaccggggtcggggaactacacggtgaaactcggttctggcacggcaaggattattgtaatttcgtgttcaaggactgggtacaactggacaaacccttcgcagacttcatcgatcggtattctaccccaaggatgccatggcatgacattgcaagcgcagtccacggcaaggcagcccgagatgttgcacgtcattttatccagaggtggaatttcaccaagatcatgaaaagcaaatataggagcttatcctatccgttcctgctacctaaatctcagacaactgcacatgagctgcgttaccaggtacccggctcagttcatgccaacgttcagctgctgcggtcggctgctgattggagcgctgggatcaagtatcatgaagaatctatacacgctgcctacgtccatgtaattgagaactccaggcactacatttatatcgagaaccaattttttatatcttgcgctgacgacaaggtagtgtttaataaaatcggcgacgcgatcgcccagagaatcttaaaggctcacagagaaaatcagaaatatagagtgtatgtggtgattccactgctgccaggctttgaaggggatatctctaccggcgggggaaatgcactacaggcaatcatgcacttcaactaccgcacaatgtgtcggggtgagaactctattcttgggcagctgaaggcagaactgggaaatcaatggatcaattatatctccttctgtggactcagaacgcatgccgagctcgagggtaatttagtcacagaattgatttacgtccactcaaagcttttgattgcagacgacaacacagtaatcatcgggagcgcaaatattaacgacagatccatgctgggcaaaagagacagcgagatggccgttattgtccaggataccgagaccgtgccatcagtgatggacggcaaggaataccaggctggccgattcgccagggggctgcgcctccagtgtttccgcgttgtgctggggtacttagacgatccaagcgaggacattcaggatcccgtgtcagataagttcttcaaggaggtgtgggtttctactgctgctcgaaatgcaaccatttacgataaagtctttcgatgtttgcccaacgacgaggtacataacctaattcaactgagggacttcatcaacaaacccgttctagccaaagaagaccccattcgagccgaagaggaattaaagaagatccgaggatttctcgtacaattcccattctatttcctgagcgaggaaagcctcctgcccagcgttgggactaaggaggcgatcgtgccaatggaagtgtggacctag

SEQ ID NO: 130744 - DNA, 3225 bp, Artificial Sequence
  derived and/or modified sequence
atgagcctgaagaatgagccccgggtgaacaccagcgccctgcagaagattgctgctgacatgagcaacatcatcgagaacctggacacccgggagctgcactttgaaggagaggaggtggactatgatgtgagccccagcgaccccaagatccaggaggtgtacatccccttcagcgccatctacaacacccagggcttcaaggagcccaacatccagacctacctgagcggctgccccatcaaggcccaggtgctggaggtggagcgcttcaccagcaccaccagggtgcccagcatcaacctgtacaccatcgagctgacccatggagagttcaagtggcaggtgaagaggaagttcaagcacttccaggagttccaccgggagctgctgaagtacaaggccttcatccgcatccccatccccacccggcggcacaccttccggcggcagaatgtgcgggaggagccccgggagatgcccagcctgcccaggagcagcgagaacatgatccgggaggagcagttcctgggccgcaggaagcagctggaggactacctgaccaagatcctgaagatgcccatgtacagaaactaccacgccaccacagagttcctggacatcagccagctgtccttcatccatgacctgggccccaagggcatcgagggcatgatcatgaagaggtctgggggccaccgcatccctggcctgaactgctgcggccagggccgggcctgctaccgctggagcaagcgctggctgattgtgaaggacagcttcctgctgtacatgaagccagattctggggccatcgcctttgtgctgctggtggacaaggagttcaagatcaaggtgggcaagaaggagacagagaccaagtatggcatcagaattgacaacctgagcaggaccctcatcctgaagtgcaacagctacagacatgcccgctggtggggcggggccatcgaggagttcatccagaagcacggcaccaacttcctgaaggaccaccgcttcggcagctatgctgccatccaggagaatgccctggccaagtggtacgtgaatgccaagggctactttgaagatgtggccaatgccatggaggaggccaatgaggagatcttcatcacagactggtggctgagccctgagatcttcctgaagaggcctgtggtggagggcaaccgctggaggctggactgcatcctgaagaggaaggcccagcagggcgtgcgcatcttcatcatgctgtacaaggaggtggagctggccctgggcatcaacagcgagtacaccaagaggaccctgatgaggctgcaccccaacatcaaggtgatgaggcacccagaccacgtgagcagcacagtgtacctgtgggcccaccacgagaagctggtgatcatcgaccagagcgtggcctttgtgggcggcatcgacctggcctacggccgctgggatgacaatgagcaccggctgacagatgtgggctctgtgaagagggtgaccagcggccccagcctgggcagcctgcccccagctgccatggagagcatggagagcctgcggctgaaggacaagaatgaacctgtgcagaacctgcccatccagaagagcattgatgatgtggacagcaagctgaagggcatcggcaagcccaggaagttcagcaagttcagcctgtacaagcagctgcaccgccaccacctgcatgatgctgacagcatcagcagcattgacagcaccagcagctacttcaaccactaccgcagccaccacaacctgatccacggcctgaagccccacttcaagctgttccaccccagcagcgagagcgagcagggcctgacccggccccacgccgacaccggcagcatccgcagcctgcagacaggagtgggggagctgcacggggagacccgcttctggcacggcaaggactactgcaactttgtgttcaaggactgggtgcagctggacaagccctttgctgacttcatcgaccgctacagcacccccaggatgccctggcatgacatcgccagcgctgtgcacggcaaggccgccagagatgtggcccggcacttcatccagcgctggaacttcaccaagatcatgaagagcaagtaccgcagcctgagctaccccttcctgctgcccaagagccagaccacagcccacgagctgcgctaccaggtgcccggctctgtgcacgccaacgtgcagctgctgcggtctgctgctgactggagcgctggcatcaagtaccacgaggagagcatccacgccgcctacgtgcacgtgattgagaacagccgccactacatctacatcgagaaccagttcttcatcagctgtgctgatgacaaggtggtgttcaacaagattggagatgccatcgcccagaggatcctgaaggcccaccgggagaaccagaagtacagagtgtatgtggtgatccccctgctgcccggctttgaaggagacatcagcactggaggcggcaatgccctgcaggccatcatgcacttcaactaccgcaccatgtgccgcggggagaacagcatcctgggccagctgaaggccgagctgggcaaccagtggatcaactacatctccttctgtggcctgcggacccacgccgagctggagggcaacctggtgacagagctgatctacgtgcacagcaagctgctgattgctgatgacaacacagtcatcatcggcagcgccaacatcaatgaccgctccatgctgggcaagagggacagcgagatggccgtcatcgtgcaggacacagagaccgtgcccagcgtgatggatggcaaggagtaccaggccggccgctttgcccggggcctgcggctgcagtgcttccgggtggtgctgggctacctggatgaccccagcgaggacatccaggaccctgtgtctgacaagttcttcaaggaggtgtgggtgtccacagctgccagaaatgccaccatctatgacaaggtgttccgctgcctgcccaatgatgaggtgcacaacctgatccagctgcgggacttcatcaacaagcctgtgctggccaaggaggaccccatccgggcagaggaggagctgaagaagatccggggcttcctggtgcagttccccttctacttcctgtctgaggagagcctgctgcccagcgtgggcaccaaggaggccatcgtgcccatggaggtgtggacctag

SEQ ID NO: 130745 - DNA, 3225 bp, Artificial Sequence
  derived and/or modified sequence
atgagcctgaagaacgagccccgggtgaacaccagcgccctgcagaagatcgccgcggacatgtctaatatcatagagaacttagacacgcgagagcttcatttcgagggcgaagaggttgactacgacgtctccccttctgatccgaagatccaggaggtttatatccctttctcagcaatatataacacgcagggcttcaaggaaccgaatatccagacttatctaagtggatgcccaataaaggcccaggttttagaggttgagcggtttacttctacaacacgcgtgcctagcatcaacctctataccatcgagttaacccacggcgaatttaaatggcaagttaagaggaagttcaaacattttcaggagtttcatagggagctgctgaaatacaaagctttcattaggattccaatcccaactagacgccataccttcaggcggcagaacgtccgggaagaacctagagaaatgccatccctgccccggagcagtgagaatatgatcagggaggaacagttcctcggcagaaggaaacagctggaagactatctgactaaaattctcaaaatgccaatgtataggaactatcacgctaccactgaattcctagacatttctcagttgtcatttatccacgacttagggcctaagggtattgaagggatgatcatgaaacgaagtggcggccataggattccaggacttaattgttgcggccagggacgagcatgctataggtggtcaaagcgttggctaatcgtgaaagattcctttctgctgtacatgaagccagattccggggcgatcgccttcgttttactggtcgacaaagagttcaaaatcaaagtggggaaaaaagaaaccgaaacaaaatacggaatccggatcgacaacttgtctagaacacttatcctcaagtgtaacagctaccgccacgcgcgatggtgggggggggccattgaggaattcatacagaaacacggcacaaacttcttgaaggatcaccggttcgggagctacgctgcgatccaagagaatgcactagctaagtggtacgtgaacgctaagggatacttcgaagatgtggcaaacgccatggaggaggcgaatgaggagatctttattactgattggtggctctcacctgaaatttttctcaagagacccgtggtggagggaaaccgatggcgactcgactgcattctcaagcgtaaagcccagcaaggcgttagaattttcatcatgctgtacaaagaagtggagcttgcactgggtatcaatagtgaatacacaaaaagaacactgatgcgtctgcaccctaatattaaagttatgcggcatccagatcatgtatcgagcactgtgtacctatgggctcaccatgagaagctggtgatcatagaccaaagcgtggccttcgtgggaggcatcgacctcgcgtatggtagatgggatgataacgagcaccgtctcaccgacgtgggatcagtgaaaagggtaacaagtgggccaagcctgggaagcctcccccccgcggccatggagtctatggagtcacttcggttaaaagataaaaatgagccagtacagaatttgcctattcagaagagtatagacgacgtggattctaagctgaaaggaattgggaagcctcggaagtttagcaaattttcactgtataagcagttgcatcgccaccatctgcatgatgcggattccataagctcgatcgactcaacatccagctacttcaatcactacagatctcaccataaccttatccacgggctgaaacctcatttcaagctgtttcatccttcctccgagtctgagcaagggttgactagaccgcacgcagacacgggctccatccgatcccttcagacaggagtgggggagctgcatggagagacccgcttttggcatggtaaggactactgtaatttcgtgtttaaagattgggtacaactcgacaaacctttcgccgactttatcgacaggtacagtactccaagaatgccatggcacgatatcgccagcgcagtgcatggtaaggcagccagagacgtggctcgccattttattcagcgatggaactttacgaagatcatgaagagcaagtaccgctccctgtcatatccatttctcctgcctaaaagccagactaccgctcacgaattaagataccaggttccaggctccgtgcatgccaatgtgcaactactgcgcagcgccgccgactggtctgctgggatcaagtaccacgaagagtccatacacgctgcttacgtacacgtgattgagaacagccgtcactatatctatattgagaaccaattcttcatctcgtgtgccgacgacaaggtggtgtttaataaaataggagatgccatcgcccagcggatcctgaaggcccacagagagaatcaaaagtacagagtgtacgtcgttattcctttgctacccggatttgaaggcgacatcagtacaggcggaggcaatgccttacaagccattatgcacttcaattaccggacaatgtgccgaggggagaactcgatactgggccaactgaaagccgaattgggcaaccagtggatcaactatatttccttctgtggattgaggacacacgccgaactcgagggtaacctggtgacggaactgatttacgtgcactccaagttgttgatcgccgacgacaatacggttatcatcggctcagccaatattaacgacagatcaatgttaggcaagcgagattctgagatggcagtgatcgttcaggataccgagacagtgccgagtgtcatggacggtaaagaatatcaggccgggaggttcgcccgaggcctgaggctccagtgtttccgggtggtcctcgggtacctggatgatccttccgaagatatccaggatccggtgtctgataagttttttaaggaagtctgggtttccacagcagctagaaatgctactatctacgataaggtcttccggtgtctgcctaatgatgaggtacataatctgattcagctcagggactttatcaataagccagtgttggcgaaggaggacccgattagagccgaagaagaactgaaaaaaatccgcggatttttagttcagtttcctttttatttcctcagcgaggagagcctgttacctagtgtgggcactaaagaggcaatcgtgcccatggaggtgtggacatag

SEQ ID NO: 130746 - DNA, 3225 bp, Artificial Sequence
  derived and/or modified sequence
atgtcactgaagaacgaaccacgggtaaatacaagcgccctccaaaaaatcgccgctgacatgtccaatataattgaaaatctcgacaccagagagctacatttcgagggagaggaggttgattatgatgtcagcccttccgatcctaaaatccaggaggtttatattccattctccgctatatacaatacccaggggttcaaagaacctaacattcagacttatctgtctggatgtcctattaaagcgcaggttctggaggtggagagattcacgtctaccactagagtaccttccataaacctgtataccattgagctgacccacggcgagttcaagtggcaagtcaagcggaagttcaagcattttcaggagttccacagagagctgctgaaatataaagcattcattaggatccctatcccaacccgtaggcacacctttcgacggcaaaatgttagggaagaaccccgagaaatgcccagtctgcccaggagtagtgaaaatatgatcagggaggaacagtttcttggccgaagaaagcagttggaggactatctgaccaagattctaaagatgccgatgtatagaaactaccacgcaacaactgaatttctggatatcagtcagctctccttcattcatgatttgggcccaaagggaattgagggtatgatcatgaagaggtccggcggacacagaatccccggacttaactgctgcgggcagggaagagcctgttatagatggagcaagagatggttaatcgtcaaggattccttcctgctctacatgaagcccgactctggcgcaatcgcttttgtcctgctcgttgataaagagttcaaaataaaggtgggcaagaaggaaactgagactaaatacggaatcagaatcgataacctaagtagaactctcatactgaaatgcaacagttatcgccacgcccgatggtggggaggggctatcgaggaatttatacaaaagcatggtactaactttctgaaagaccaccggtttgggtcatacgccgcaatccaagaaaatgcgctcgcaaagtggtacgtgaatgctaagggctattttgaagatgtggctaatgccatggaggaggcaaatgaagagatttttataactgattggtggctgtctcctgagattttcctgaagcggccagtcgtcgagggcaaccggtggcggctcgactgcatcttgaaaaggaaagcccaacaaggcgtgagaattttcatcatgctttataaggaggttgagctggctcttgggatcaattccgagtacactaagcggacccttatgcgactgcatccaaacatcaaagtgatgcgacaccccgaccacgtgtcttccactgtatacctgtgggcacaccacgaaaagcttgtgatcatcgaccaatcggtggcctttgtggggggaattgacctcgcctacgggaggtgggacgataacgaacaccggctgacggatgttggcagcgtgaagcgagtgaccagcggcccatccctgggctctctgccccctgctgctatggaatccatggaaagcttgcgtttaaaggacaagaacgagcctgtgcagaacctgcccatccagaagtctattgatgatgttgattcaaagttgaaagggataggtaagccaaggaaattttcgaagttttcactgtataagcaactgcaccggcaccatcttcatgatgctgattcaatttccagtatcgattctacctccagctatttcaatcactaccggtcacaccataatcttattcatggcctgaagccccatttcaagctgtttcatccttcgtccgaaagcgagcaaggtttgacaaggccacacgcagacaccggtagtatcagatcccttcagaccggtgtgggggagttgcatggagagacccgtttctggcacggcaaggactactgcaatttcgtgttcaaggactgggtgcagctggacaaacctttcgcagactttatagatcggtattcaacaccgaggatgccttggcatgacatcgcctcggccgtgcatggcaaggctgccagagatgttgcaaggcactttatacaaagatggaatttcacgaagatcatgaagtccaagtaccgctccctgtcgtacccctttttgctgcctaagtctcagaccaccgcccatgagttacgttatcaggtgcccggtagtgtccatgctaatgtccagctgctgagatccgccgctgattggtccgctggcattaagtatcatgaagaatccattcatgccgcttacgtgcacgtgatcgagaactctcggcattacatttatatcgagaaccaattcttcatctcttgcgcagacgacaaagtagtctttaataagataggggatgctattgcacagcgtattctgaaagctcaccgggagaaccagaaatacagagtgtacgtcgtcattccgctgctacccggtttcgagggggacattagcaccgggggtggaaacgcccttcaggccatcatgcactttaattacagaacaatgtgtagaggggagaattcaatcctcggccagctaaaagctgagctgggcaaccagtggattaattacatcagcttttgtgggctgcgcacacatgctgaacttgaaggcaacctggtgacagagttgatctacgtgcatagtaaacttcttatagctgacgataacacagtgattattggctcggccaatattaacgaccgcagtatgcttggaaaacgagacagcgagatggccgtcattgttcaggatactgagaccgtgccatcggtaatggacggcaaagagtatcaagccggtaggtttgccagaggcctacggctgcagtgcttccgggttgtccttgggtatttagacgaccctagtgaggacattcaggacccagtgtcagacaagttcttcaaagaggtctgggtgagcactgcagctcgaaatgccacaatttacgataaggtgtttagatgcttaccaaacgacgaagtacacaatctgattcagctcagagacttcatcaacaagcccgtgctcgccaaggaggaccccattagggccgaggaagagctgaagaagataaggggatttctggtgcagtttcctttttacttcctgtccgaggagtctctgctgccctcagtcggaacaaaggaagcgattgtgcctatggaagtctggacctag

SEQ ID NO: 130747 - DNA, 5604 bp, Artificial Sequence
  derived and/or modified sequence
ccctccctcccgctgagctccagctgtgccagaggcacccgagccctgagagtccgccgccaacgcgcaggtgctagcggccccttcgccctgcagcccctttgcttttactctgtccaaagttaacatgtcactgaaaaacgagccacgggtaaatacctctgcactgcagaaaattgctgctgacatgagtaatatcatagaaaatctggacacgcgggaactccactttgagggagaggaggtagactacgacgtgtctcccagcgatcccaagatacaagaagtgtatatccctttctctgctatttataacactcaaggatttaaggagcctaatatacagacgtatctctccggctgtccaataaaagcacaagttctggaagtggaacgcttcacatctacaacaagggtaccaagtattaatctttacactattgaattaacacatggggaatttaaatggcaagttaagaggaaattcaagcattttcaagaatttcacagagagctgctcaagtacaaagcctttatccgcatccccattcccactagaagacacacgtttaggaggcaaaacgtcagagaggagcctcgagagatgcccagtttgccccgttcatctgaaaacatgataagagaagaacaattccttggtagaagaaaacaactggaagattacttgacaaagatactaaaaatgcccatgtatagaaactatcatgccacaacagagtttcttgatataagccagctgtctttcatccatgatttgggaccaaagggcatagaaggtatgataatgaaaagatctggaggacacagaataccaggcttgaattgctgtggtcagggaagagcctgctacagatggtcaaaaagatggttaatagtgaaagattcctttttattgtatatgaaaccagacagcggtgccattgccttcgtcctgctggtagacaaagaattcaaaattaaggtggggaagaaggagacagaaacgaaatatggaatccgaattgataatctttcaaggacacttattttaaaatgcaacagctatagacatgctcggtggtggggaggggctatagaagaattcatccagaaacatggcaccaactttctcaaagatcatcgatttgggtcatatgctgctatccaagagaatgctttagctaaatggtatgttaatgccaaaggatattttgaagatgtggcaaatgcaatggaagaggcaaatgaagagatttttatcacagactggtggctgagtccagaaatcttcctgaaacgcccagtggttgagggaaatcgttggaggttggactgcattcttaaacgaaaagcacaacaaggagtgaggatcttcataatgctctacaaagaggtggaactcgctcttggcatcaatagtgaatacaccaagaggactttgatgcgtctacatcccaacataaaggtgatgagacacccggatcatgtgtcatccaccgtctatttgtgggctcaccatgagaagcttgtcatcattgaccaatcggtggcctttgtgggagggattgacctggcctatggaaggtgggacgacaatgagcacagactcacagacgtgggcagtgtgaagcgggtcacttcaggaccgtctctgggttccctcccacctgccgcaatggagtctatggaatccttaagactcaaagataaaaatgagcctgttcaaaacctacccatccagaagagtattgatgatgtggattcaaaactgaaaggaataggaaagccaagaaagttctccaaatttagtctctacaagcagctccacaggcaccacctgcacgacgcagatagcatcagcagcattgacagcacctccagttattttaatcactatagaagtcatcacaatttaatccatggtttaaaaccccacttcaaactctttcacccgtccagtgagtctgagcaaggactcactagacctcatgctgataccgggtccatccgtagtttacagacaggtgtgggagagctgcatggggaaaccagattctggcatggaaaggactactgcaatttcgtcttcaaagactgggttcaacttgataaaccttttgctgatttcattgacaggtactccacgccccggatgccctggcatgacattgcctctgcagtccacgggaaggcggctcgtgatgtggcacgtcacttcatccagcgctggaacttcacaaaaattatgaaatcaaaatatcggtccctttcttatccttttctgcttccaaagtctcaaacaacagcccatgagttgagatatcaagtgcctgggtctgtccatgctaacgtacagttgctccgctctgctgctgattggtctgctggtataaagtaccatgaagagtccatccacgccgcttacgtccatgtgatagagaacagcaggcactatatctatatcgaaaaccagtttttcataagctgtgctgatgacaaagttgtgttcaacaagataggcgatgccattgcccagaggatcctgaaagctcacagggaaaaccagaaataccgggtatatgtcgtgataccacttctgccagggttcgaaggagacatttcaaccggcggaggaaatgctctacaggcaatcatgcacttcaactacagaaccatgtgcagaggagaaaattccatccttggacagttaaaagcagagcttggtaatcagtggataaattacatatcattctgtggtcttagaacacatgcagagctcgaaggaaacctagtaactgagcttatctatgtccacagcaagttgttaattgctgatgataacactgttattattggctctgccaacataaatgaccgcagcatgctgggaaagcgtgacagtgaaatggctgtcattgtgcaagatacagagactgttccttcagtaatggatggaaaagagtaccaagctggccggtttgcccgaggacttcggctacagtgctttagggttgtccttggctatcttgatgacccaagtgaggacattcaggatccagtgagtgacaaattcttcaaggaggtgtgggtttcaacagcagctcgaaatgctacaatttatgacaaggttttccggtgccttcccaatgatgaagtacacaatttaattcagctgagagactttataaacaagcccgtattagctaaggaagatcccattcgagctgaggaggaactgaagaagatccgtggatttttggtgcaattccccttttatttcttgtctgaagaaagcctactgccttctgttgggaccaaagaggccatagtgcccatggaggtttggacttaagagatattcattggcagctcaaagacttccaccctggagaccacactgcacacagtgacttcctggggatgtcatagccaaagccaggcctgacgcattctcgtatccaacccaaggaccttttggaatgactggggagggctgcagtcacattgatgtaaggactgtaaacatcagcaagactttataattccttctgcctaacttgtaaaaagggggctgcattcttgttggtagcatgtactctgttgagtaaaacacatattcaaattccgtataccaaaatccatttcctttgtaacaagaatttaccagtaactgtgatctaggttgccaaaagttgtctgaatctccttattcttctctgatcttcatttatgcagccaatgtctagctggacctgccctcatcttgcagttcatacaggcactgtttgagagattgtttattattagatgttgtaatgctgcttcaagattcttcatggttacatgggatgcccctgctcatctggtcctgaagtagtaacattcacccaaatgaggatatagtcattattccttttcagtcactgtacgaacacggcagactttagcctacacagtagactgtgttaggcacttctggtaacattgacactgtatcttgacaccactaagcaacaggaaggaataaattccaatattgagacagagatttatttcattttgctcccaaaggcactgacaacatgagtccttgtgattaggcccacctgatcaaatgtaaaaacatgcatgggatatttgattacgtaacaaccagctaaaactgagagcacacagccttcggaaacccccaaggtgtcgaggaggatcagatccagataagagaagatgattccttctagtcctgtaaaatttcctgtcatccttagctgctgggttgattgaaatttgatctctacatttcaaaatcaaactagtgaatacagtttgtctttcaagagaatcagaggcatcgtaactcctaccaagttagtaagtatgagtctaaccttgtttgacattcaggtcttctgctacattatcttctttgagaaaaattaattgattataaaatatgtgctacttcacttacattattaaatatgtattaacgcctctcaccagggcttccagtgaagttacaatgccctagtctgtgaattagtctggaaacgtgtttttccttttcggatgttagagtaccctttgataaactaaattttactaagctgaacaactctgacagtctaaagagctaatgtgggttaccaaaaggcctgtacctgtaaaacaaaatgcaggtgtaatgattatacatgtctatggattacctggacatactctcatttgggttgttcttcaaagaagcaagcagccgatccctgttttcataaagctaatacttcagttggaaaaattaaacaggagcacaaagtcagggataggggttagcagaagagagaaatagtgtcacatcaagggcaggatctcatagctagggaacatttcacaaataaggtgagattttgtaaccaataataaaaatgaatgtttttataagtaaataacttatttttcatatggctaaagatggtaaaatgacttcattctatagccattgtaaataagaatttgctattgatgaaagaagttcagattggcatttgaagtattgagtgtatgggatctctaaggatttcttagattttatatttaaatattttttaaaccttagaggagtcaacaaactggctcttgattttcagcaccctactctcatgaaaaaagcctgaaaggaccctttcccttataagtaatttaatccaatttctccccattttatagatgaggaaactgaggctcagatcagatgagaactcacttaaatccactcaatgtgtagatggtagagctgggactagcaacattgctgcagcccattgttggcctctctcttcactttatcattgcccaagaatgaggatatgcagtaaacagaattcaggcaagatacctctaagctgttttgaaccctctgatattttgtatttatgtgtttgtctgtctccccctactagaatgtaagctccatggggcagggacttcactgtattttgttcatagtgtatccccagagcctggaccagtgcttggcacataggagatggcaataaatgcttgtagaattaataaacaaggtgaaggagagagctaatgaaatgaaaa

SEQ ID NO: 130748 - protein, 933 aa, Artificial Sequence
  derived and/or modified sequence
MTATPESLFPTGDELDSSQLQMESDEVDTLKEGEDPADRMHPFLAIYELQSLKVHPLVFAPGVPVTAQVVGTERYTSGSKVGTCTLYSVRLTHGDFSWTTKKKYRHFQELHRDLLRHKVLMSLLPLARFAVAYSPARDAGNREMPSLPRAGPEGSTRHAASKQKYLENYLNRLLTMSFYRNYHAMTEFLEVSQLSFIPDLGRKGLEGMIRKRSGGHRVPGLTCCGRDQVCYRWSKRWLVVKDSFLLYMCLETGAISFVQLFDPGFEVQVGKRSTEARHGVRIDTSHRSLILKCSSYRQARWWAQEITELAQGPGRDFLQLHRHDSYAPPRPGTLARWFVNGAGYFAAVADAILRAQEEIFITDWWLSPEVYLKRPAHSDDWRLDIMLKRKAEEGVRVSILLFKEVELALGINSGYSKRALMLLHPNIKVMRHPDQVTLWAHHEKLLVVDQVVAFLGGLDLAYGRWDDLHYRLTDLGDSSESAASQPPTPRPDSPATPDLSHNQFFWLGKDYSNLITKDWVQLDRPFEDFIDRETTPRMPWRDVGVVVHGLPARDLARHFIQRWNFTKTTKAKYKTPTYPYLLPKSTSTANQLPFTLPGGQCTTVQVLRSVDRWSAGTLENSILNAYLHTIRESQHFLYIENQFFISCSDGRTVLNKVGDEIVDRILKAHKQGWCYRVYVLLPLLPGFEGDISTGGGNSIQAILHFTYRTLCRGEYSILHRLKAAMGTAWRDYISICGLRTHGELGGHPVSELIYIHSKVLIADDRTVIIGSANINDRSLLGKRDSELAVLIEDTETEPSLMNGAEYQAGRFALSLRKHCFGVILGANTRPDLDLRDPICDDFFQLWQDMAESNANIYEQIFRCLPSNATRSLRTLREYVAVEPLATVSPPLARSELTQVQGHLVHFPLKFLEDESLLPPLGSKEGMIPLEVWT

SEQ ID NO: 130749 - DNA, 2802 bp, Artificial Sequence
  derived and/or modified sequence
atgactgctactccagagagcctctttcctacgggcgatgagctggactcatctcaactgcagatggaaagtgacgaggtggacactctgaaggaaggcgaagatcccgctgataggatgcacccattcttggcaatctacgagttgcagtccctgaaagtgcaccctctggtgttcgcacctggcgtaccagtaactgcccaggtggttgggactgagcggtatacctcaggcagcaaggtgggtacttgtacgctgtattctgtacggctcactcatggcgatttcagttggactacaaaaaagaaataccgtcatttccaagaactccacagggatctgttgcgacataaggtgctgatgtctctcctgccacttgcccgcttcgccgtggcgtacagccctgcaagggatgcagggaacagagagatgccaagtctccctcgtgccggccccgaggggagcacccgacacgctgcatctaaacagaagtatttagaaaattatctgaatagattgttaacaatgagcttctaccgcaattatcacgccatgacagagtttctagaggtgagccagctgtcttttatccccgacctgggccgcaaggggctcgagggcatgatacgaaagagatctgggggtcatagagtccctggactgacctgttgtggccgtgaccaggtgtgctaccgttggagtaagagatggttggtcgttaaagacagttttctgctgtatatgtgcctggagaccggtgcaatctcattcgttcaattgttcgacccagggttcgaagtgcaggtgggaaaaaggagcaccgaggcacggcacggagtccggatcgacacatctcatagatctctgatccttaaatgcagcagctataggcaggctcgatggtgggcccaggagattaccgaacttgcacagggcccagggcgggacttcctgcagctgcaccgacacgattcttatgcaccacctcgcccaggaacactagccaggtggttcgtaaatggggctggctatttcgccgccgtcgccgacgcaattttgcgcgcacaggaggagatttttataacggactggtggctctcaccagaagtgtatctgaaacgcccagcgcacagcgatgattggcggctggatatcatgttaaaaaggaaggcggaggagggggtacgagtgagtattctgctgtttaaggaggtggaattagccttgggcattaacagcggctattctaaaagagctctgatgttgcttcatccaaatatcaaggtgatgcggcaccccgaccaggtgactctgtgggcacaccacgaaaagctgctcgttgtggatcaggttgtcgcattcttggggggtctagatcttgcctatgggcggtgggacgacctgcactacaggctgaccgacctcggggactcaagtgaaagcgctgcctcacagcctcctaccccgcgtccagactctccagccacaccagacctttcccataatcaatttttttggttagggaaagactatagcaatctcataacaaaagactgggtgcagctggaccggccatttgaggacttcattgacagagagacaaccccccgcatgccttggcgcgatgtgggtgtggttgtgcacgggcttccagcacgcgatcttgccaggcattttattcagcggtggaacttcaccaaaacgacaaaggcaaaatataagacgccaacttatccctacctgcttccaaaaagcacatccacggccaaccagttaccctttaccttacccggtgggcagtgtaccacagtccaggtgttacggtccgttgacagatggagtgccggcaccttggaaaactcaattctgaacgcgtacctgcacacaatcagagagagtcagcattttttgtatattgagaaccagttcttcatcagctgcagcgatggccgcaccgtgttgaacaaggttggggacgaaattgtggaccggattcttaaggcgcataagcaagggtggtgctacagagtatacgttctccttcccttactcccgggttttgaaggggacatctctacaggcggaggcaacagcatccaggctatacttcatttcacctacagaaccctctgtcgcggcgagtactcaatcttacacagattgaaggccgccatgggcactgcgtggcgcgactatatttctatctgcggcctgagaacacacggggagttaggtggccatcctgtgtcggaactgatttacatccatagcaaagtgcttatcgccgatgatcgcacggtgattatcgggtctgcaaacatcaacgaccgttccctcctgggcaagcgggactcagagttggccgttctcattgaggataccgagacggaaccttcccttatgaacggcgctgagtatcaagcaggcaggttcgccttgtccctgagaaaacactgcttcggggtgattcttggagcaaacacaagaccagatctggatttacgtgatccaatttgtgacgattttttccagttgtggcaggatatggccgagagcaatgcaaatatctatgagcagattttccgctgtctcccatctaacgcaacccgatcgctgcgaaccttgcgagagtatgtggcggtcgagccccttgccacagttagccctccactagcaagatccgagcttacacaagtgcaaggccatctggtacattttccactgaaatttttggaagacgagagcttacttccccccctgggttctaaagaggggatgatcccgctggaagtctggacctag

SEQ ID NO: 130750 - DNA, 2802 bp, Artificial Sequence
  derived and/or modified sequence
atgacagccaccccagagagcctcttccccactggagatgagctggacagcagccagctgcagatggagagtgatgaggtggacaccctgaaggagggggaggaccctgctgacaggatgcaccccttcctggccatctatgagctgcagagcctgaaggtgcaccccctggtgtttgcccctggggtgcctgtgacagcccaggtggtgggcacagagcgctacaccagcggcagcaaggtgggcacctgcaccctgtacagcgtgcggctgacccatggagacttctcctggaccaccaagaagaagtaccgccacttccaggagctgcaccgggacctgctgcggcacaaggtgctgatgagcctgctgcccctggccaggtttgctgtggcctacagccctgccagagatgctggcaaccgggagatgcccagcctgccccgggccggccctgagggcagcaccaggcatgctgccagcaagcagaagtacctggagaactacctgaaccggctgctgaccatgtccttctacagaaactaccacgccatgacagagttcctggaggtgtcccagctgtccttcatcccagacctgggcaggaagggcctggagggcatgatcaggaagaggtctgggggccaccgggtgcccggcctgacctgctgcggccgggaccaggtgtgctaccgctggagcaagcgctggctggtggtgaaggacagcttcctgctgtacatgtgcctggagaccggggccatcagctttgtgcagctgtttgatcctggctttgaggtgcaggtgggcaagaggagcacagaggcccggcatggagtgagaattgacaccagccacaggagcctcatcctgaagtgcagcagctaccggcaggcccgctggtgggcccaggagatcacagagctggcccagggccctggccgggacttcctgcagctgcacagacatgacagctatgccccacccaggcctggcaccctggcccgctggtttgtgaatggagctggctactttgctgctgtggctgatgccatcctgcgggcccaggaggagatcttcatcacagactggtggctgagccctgaggtgtacctgaagaggcctgcccacagtgatgactggaggctggacatcatgctgaagaggaaggccgaggagggcgtgcgggtgtccatcctgctcttcaaggaggtggagctggccctgggcatcaacagcggctacagcaagagggccctgatgctgctgcaccccaacatcaaggtgatgaggcacccagaccaggtgaccctgtgggcccaccacgagaagctgctggtggtggaccaggtggtggccttcctgggcggcctggacctggcctacggccgctgggatgacctgcactaccgcctgacagacctgggggacagcagcgagagcgctgccagccagccccccacccccaggccagacagccctgccaccccagacctgagccacaaccagttcttctggctgggcaaggactacagcaacctgatcaccaaggactgggtgcagctggaccggccctttgaggacttcatcgaccgggagaccacccccaggatgccctggagagatgtgggcgtggtggtgcacggcctgcctgcccgggacctggcccggcacttcatccagcgctggaacttcaccaagaccaccaaggccaagtacaagacccccacctacccctacctgctgcccaagagcaccagcacagccaaccagctgcccttcaccctgcccggcggccagtgcaccaccgtgcaggtgctgcggtctgtggaccgctggagcgctggcaccctggagaacagcatcctgaatgcctacctgcacaccatccgggagagccagcacttcctgtacatcgagaaccagttcttcatcagctgcagtgatggccgcacagtgctgaacaaggtgggagatgaaattgtggaccgcatcctgaaggcccacaagcagggctggtgctacagagtgtatgtgctgctgcccctgctgcccggctttgaaggagacatcagcactggaggcggcaacagcatccaggccatcctgcacttcacctaccgcaccctgtgccgcggggagtacagcatcctgcaccggctgaaggccgccatgggcacagcctggagggactacatcagcatctgtggcctgcggacccatggagagctgggcggccaccctgtgtctgagctgatctacatccacagcaaggtgctgattgctgatgacagaactgtcatcatcggcagcgccaacatcaatgacaggagcctgctgggcaagagggacagcgagctggccgtgctgattgaggacacagaaacagagcccagcctgatgaatggagctgagtaccaggccggccgctttgccctgagcctgaggaagcactgcttcggggtcatcctgggcgccaacaccaggccagacctggacctgcgggaccccatctgtgatgacttcttccagctgtggcaggacatggccgagagcaatgccaacatctatgagcagatcttccgctgcctgcccagcaatgccaccaggagcctgcggaccctgcgggagtatgtggccgtggagcccctggccaccgtgtccccacccctggcccggtctgagctgacccaggtgcagggccacctggtgcacttccccctgaagttcctggaggatgagagcctgctgccccccctgggcagcaaggagggcatgatccccctggaggtgtggacctag

SEQ ID NO: 130751 - DNA, 2802 bp, Artificial Sequence
  derived and/or modified sequence
atgaccgccacccccgagagcctgttccccaccggcgacgagctggattcctcccaattgcagatggaatcggacgaagtcgacaccctcaaagagggcgaggaccccgctgatagaatgcacccttttcttgcaatatatgagctgcagtcgcttaaggtgcacccactggtctttgcccccggtgttcctgtgaccgcacaagtggtcggcacagagcggtacacctccggcagcaaggtagggacatgtactctgtactctgtgcgcctgactcatggcgatttttcttggactacgaagaagaaatacagacacttccaagagctgcaccgagacctacttaggcacaaggtgctaatgtccctcctccccctcgcccgttttgccgtcgcatactctcctgcgcgcgacgccggaaatagggagatgcccagccttccacgtgccggacctgaagggtctacaagacacgctgccagcaagcaaaagtatctggagaattatctgaacagacttctgacaatgtcattctataggaactaccacgcaatgacagagttcttagaggtcagtcaactctcattcatacctgatctcggtaggaaaggtctcgagggcatgatcagaaagcgatcaggaggccacagagtgcctggcctcacatgttgtgggcgggaccaggtgtgttaccgctggagtaagaggtggctggtggtgaaggattctttcctcctatatatgtgcctggagaccggggccatcagttttgtacaactcttcgacccaggatttgaggtccaagtcgggaaaaggtcaactgaggcacggcacggcgtgcgcattgatacttcccacagatcgctgatccttaagtgcagttcttaccggcaggcccgatggtgggcccaagagattactgaattggcacaaggacccggtcgggattttcttcaacttcataggcatgacagttacgctccgcctcggccaggaactctggcccggtggttcgtgaatggggctggatactttgctgccgtggctgacgcaatcctgcgagcccaggaagagatattcatcacagactggtggctgtctccagaggtgtatttgaagcggcctgctcatagtgatgactggcggctcgacattatgctcaaaaggaaagcagaagagggagtgagggtgagcatactgctgtttaaggaggtggagttggctcttgggatcaacagcggatatagcaagagagctttaatgctgctccacccgaacatcaaagtgatgaggcatccagaccaggtgacattgtgggctcatcacgaaaagttgctagtggtcgaccaggtcgttgcattcctgggcggtctggaccttgcctatggcaggtgggatgacctccattaccgcctcaccgacctgggcgactcctcagaaagcgcagcctcgcagccaccaacacctaggcccgattcgcccgctacccctgatttaagccataatcagttcttctggctggggaaagattactcaaacttgatcaccaaagactgggtgcagctcgacaggccctttgaggacttcattgaccgtgagaccacaccaaggatgccttggcgcgatgtaggcgttgtggtgcacggcctgcctgcgagggacttggctagacactttatccaaaggtggaatttcacaaaaactaccaaggccaaatacaaaactcccacatacccctatctgctgcctaagtctacatcaaccgctaatcagctgcctttcacactgcccggtgggcagtgcacaacagttcaggtgttgcgatctgtggaccgctggagcgcaggtacgctagaaaactcaattctaaacgcttatctacatactatacgcgaaagtcagcacttcctgtacattgagaatcagttcttcattagctgttctgatgggagaacagtcctgaacaaagtgggcgacgagatcgtagataggatcctgaaggcccataaacaaggatggtgctatcgggtatacgtcctcttgcccttactaccaggattcgaaggcgatatctccacgggcgggggaaacagcatccaggccatcttgcactttacataccgcacgctgtgtcgcggtgaatattcaattttgcacagactgaaggccgccatgggcaccgcctggcgtgactacatctcaatatgcggacttcgcacccacggagagctcggaggccatcccgtgtccgagttaatttacatccactcaaaagtactcattgctgatgacagaactgtaatcatcggtagtgccaacattaatgatcgatccttactgggcaagcgtgatagcgaactggctgtgctgattgaggatacagaaaccgagcccagcctgatgaacggtgccgagtatcaggcaggacggtttgccctgtcactgaggaagcactgtttcggtgtaatactgggggccaatacgagaccggatctggacctcagggatcccatctgtgatgacttttttcaattgtggcaggacatggccgagtctaacgcaaacatctatgaacagatatttagatgccttccatccaacgctactcgatccttacgtactttgagggagtacgtcgccgtggaaccacttgcaaccgtcagtccccctctcgctagaagcgaattgacacaggtgcaaggtcatctggtgcatttcccgctcaaatttctagaggatgagtcgttactgccaccgctgggaagtaaagagggtatgataccactggaagtgtggacttag

SEQ ID NO: 130752 - DNA, 3501 bp, Artificial Sequence
  derived and/or modified sequence
cgagggcaggccctgagccccggccccgcctcggccggccccgcctcggccggggcgtgggctccggctgcagctccggtctgctctcttggctccggaacccccgcgggcgctggctccgtctgccagggatgacggcgacccctgagagcctcttccccactggggacgaactggactccagccagctccagatggagtccgatgaggtggacaccctgaaggagggagaggacccagccgaccggatgcacccgtttctggccatctatgagcttcagtctctgaaagtgcaccccttggtgttcgcacctggggtccctgtcacagcccaggtggtgggcaccgaaagatataccagcggatccaaggtgggaacctgcactctgtattctgtccgcttgactcacggcgacttttcctggacaaccaagaagaaataccgtcattttcaggagctgcatcgggacctcctgagacacaaagtcttgatgagtctgctccctctggctcgatttgccgttgcctattctccagcccgagatgcaggcaacagagagatgccctctctaccccgggcaggtcctgagggctccaccagacatgcagccagcaaacagaaatacctggagaattacctcaaccgtctcttgaccatgtctttctatcgcaactaccatgccatgacagagttcctggaagtcagtcagctgtcctttatcccggacttgggccgcaaaggactggaggggatgatccggaagcgctcaggtggccaccgtgttcctggcctcacctgctgtggccgagaccaagtttgttatcgctggtccaagaggtggctggtggtgaaggactccttcctgctgtacatgtgcctcgagacaggtgccatctcatttgttcagctctttgaccctggctttgaggtgcaagtggggaaaaggagcacggaggcacggcacggcgtgcggatcgatacctcccacaggtccttgattctcaagtgcagcagctaccggcaggcacggtggtgggcccaagagatcactgagctggcacagggcccaggcagagacttcctacagctgcaccggcatgacagctacgccccaccccggcctgggaccttggcccggtggtttgtgaatggggcaggttactttgctgctgtggcagatgccatccttcgagctcaagaggagattttcatcacagactggtggttgagtcctgaggtttacctgaagcgtccggcccattcagatgactggagactggacattatgctcaagaggaaggcggaggagggtgtccgtgtgtctattctgctgtttaaagaagtggaattggccttgggcatcaacagtggctatagcaagagggcgctgatgctgctgcaccccaacataaaggtgatgcgtcacccagaccaagtgacgttgtgggcccatcatgagaagctcctggtggtggaccaagtggtagcattcctggggggactggaccttgcctatggccgctgggatgacctgcactaccgactgactgaccttggagactcctctgaatcagctgcctcccagcctcccaccccgcgcccagactcaccagccaccccagacctctctcacaaccaattcttctggctgggcaaggactacagcaatcttatcaccaaggactgggtgcagctggaccggcctttcgaagatttcattgacagggagacgacccctcggatgccatggcgggacgttggggtggtcgtccatggcctaccggcccgggaccttgcccggcacttcatccagcgctggaacttcaccaagaccaccaaggccaagtacaagactcccacatacccctacctgcttcccaagtctaccagcacggccaatcagctccccttcacacttccaggagggcagtgcaccaccgtacaggtcttgcgatcagtggaccgctggtcagcagggactctggagaactccatcctcaatgcctacctgcacaccatcagggagagccagcacttcctctacattgagaatcagttcttcattagctgctcagatgggcggacggttctgaacaaggtgggcgatgagattgtggacagaatcctgaaggcccacaaacaggggtggtgttaccgagtctacgtgcttttgcccttactccctggcttcgagggtgacatctccacgggcggtggcaactccatccaggccattctgcactttacttacaggaccctgtgtcgtggggagtattcaatcctgcatcgccttaaagcagccatggggacagcatggcgggactatatttccatctgcgggcttcgtacacacggagagctgggcgggcaccccgtctcggagctcatctacatccacagcaaggtgctcatcgcagatgaccggacagtcatcattggttctgcaaacatcaatgaccggagcttgctggggaagcgggacagtgagctggccgtgctgatcgaggacacagagacggaaccatccctcatgaatggggcagagtatcaggcgggcaggtttgccttgagtctgcggaagcactgcttcggtgtgattcttggagcaaatacccggccagacttggatctccgagaccccatctgtgatgacttcttccagttgtggcaagacatggctgagagcaacgccaatatctatgagcagatcttccgctgcctgccatccaatgccacgcgttccctgcggactctccgggagtacgtggccgtggagcccttggccacggtcagtccccccttggctcggtctgagctcacccaggtccagggccacctggtccacttccccctcaagttcctagaggatgagtctttgctgcccccgctgggtagcaaggagggcatgatccccctagaagtgtggacatagttgaggcccccgtcagggagaggtcaccagctgctgtgccccaccacgtctggctccctgccccttaaccccaaggactgagggcagtgccctttgagatctggggaggcaggcattcctgaagggaactagaggtgttacagaggacccttacgtgagaaatagctgaaaagggcactcccaaccctgggctggggaggaggagagagtcccagagctcatcccccctgctgcccagtgcaaaccacttctccatgctgcaaaggagaagcacagctcctgccagggtgagcagggtcaagcctcttattccaggagaagggggctctgccccaggccctactacccattgttcccttcctcttcctgcccttgaaccccctccctgtcccagggccctcccagcccattgctgccaaggtggagggaaggataaagccacttctggcttcagcccccaccaggggaaggaaggagggcacattaactccctccaccagcctgctgacagacactaactttgtatccgttcaataagcatttcataaataaaggtgtagaaaaggtt

SEQ ID NO: 130753 - DNA, 2802 bp, Artificial Sequence
  derived and/or modified sequence
atgacagctacacccgagtctctgtttcctacaggggacgaactggacagctcccagttacaaatggaatctgatgaagtcgatactctcaaggaaggtgaggacccagccgaccggatgcacccttttttagcaatttatgaactgcaatccttaaaggtgcatccactggtgttcgctcctggcgtgcctgtcactgcgcaagtggtcggcacagaaagatatacaagcggatctaaagtaggcacttgtaccttatattccgtgcgcctgacacacggagatttctcctggacgactaaaaagaagtataggcatttccaggagctgcatcgtgatctcctcagacacaaggttctgatgtccctccttccactagcacggttcgccgttgcgtattcacctgctagggatgccggaaatcgcgagatgccttccttgcctagagccggacccgaggggtctacccggcatgctgcaagcaaacaaaaatacttggaaaactacctgaataggcttttgaccatgtcattctaccggaactatcatgctatgaccgagttcttggaggttagtcagctgagtttcatccctgacctgggccgaaaaggtctcgaaggcatgatacggaagcgatccgggggacaccgggtgcctggtcttacttgttgcggtcgggatcaggtgtgttacagatggtctaaaagatggctggtcgtgaaggattcctttctcctgtatatgtgtctggaaactggcgcaatatcttttgtccagctttttgaccctggtttcgaagtgcaagttggcaagaggtcgaccgaggcccgacatggcgtgcgtatagatacaagccaccgctcactgatcctcaagtgttcatcatacaggcaagcgagatggtgggcccaggaaatcacggagctggctcagggacccggaagagattttctccagctccataggcacgacagttacgctcccccaaggcctgggacacttgcaagatggttcgtaaacggcgcaggctatttcgccgcagtggcagatgccatcctgagggcccaggaggaaattttcatcacggactggtggctgtcaccggaagtgtatctcaaacgacctgcacacagcgacgactggcggctggatataatgctcaaaagaaaggcagaagaaggggtgcgcgtgtcaatcctattgtttaaggaagtggagttggcgttgggcattaacagcgggtattcgaagagagccctgatgctgcttcatcctaacattaaagtgatgcggcaccctgaccaggtgaccctgtgggcccaccacgaaaaactgctggtcgtggatcaggtggtggcctttctcggcggactcgatctggcctacggacggtgggacgatctacactaccggcttaccgaccttggcgattccagcgaatctgctgccagtcagcctccaaccccaagaccagattcacctgctacccccgatctgagtcacaaccagtttttttggctgggaaaagactattcaaacctgatcaccaaagattgggtgcagctggatcggccttttgaggacttcattgatcgagagactacccctaggatgccctggagagatgtgggagttgtcgtccatggactgcctgctcgggacctggcccgacactttattcagaggtggaattttacaaagaccacaaaggctaagtataagactcccacgtatccctaccttctgcctaaaagcacctcaaccgctaaccagttaccatttacactgcccggagggcagtgcacaactgtgcaggtgttacgcagcgtggatcgctggtccgccggtacactggagaattccatcctcaacgcttaccttcataccatccgcgagagccaacactttctgtacatcgagaaccagttctttattagctgctcagacgggaggaccgtgctgaataaagtcggggacgagatcgttgataggatcctcaaggctcataagcagggctggtgttacagggtgtacgtactgctgcctcttcttcccggtttcgaaggagacatttccaccgggggtggcaacagcatccaggcgatcctgcactttacttaccgaacactgtgtagaggcgagtacagtatcttgcacagattgaaagcagctatgggtaccgcttggcgagactacatttctatatgtggactgcgtacccatggggagctgggagggcacccagtcagcgagctcatctacatccactcaaaagtgttgattgccgacgacaggaccgttataattgggagtgccaacatcaacgatcgaagtctgctgggaaagagggactcagagctggcggtgctcattgaggataccgaaactgaaccctccttaatgaacggagcggaataccaagccggtagattcgctttgtcgctgcggaagcactgctttggagtgatcttgggcgctaatactcgtcctgatctggatctgcgggacccaatttgtgacgatttcttccagctatggcaggacatggctgagtcaaacgccaacatctatgaacaaatcttccgatgcttgccttcaaatgccacccgatcactgcgcactttacgggagtacgtcgcagtggaaccattagcaactgtctctccgccattagcaagatcagaacttacacaggtgcaggggcatctggtccacttccctttaaagtttcttgaggacgagtccctactgccaccgttggggtcaaaggaagggatgatacctcttgaggtctggacctag

SEQ ID NO: 130754 - DNA, 2802 bp, Artificial Sequence
  derived and/or modified sequence
atgaccgccacccccgagagcctgttccccaccggcgacgagctggacagcagccagctgcagatggagagcgacgaggtggacaccctgaaggagggcgaggaccccgccgacagaatgcaccccttcctggccatctacgagctgcagagcctgaaggtgcaccccctggtgttcgcccccggcgtgcccgtgaccgcccaggtggtgggcaccgagagatacaccagcggcagcaaggtgggcacctgcaccctgtacagcgtgagactgacccacggcgacttcagctggaccaccaagaagaagtacagacacttccaggagctgcacagagacctgctgagacacaaggtgctgatgagcctgctgcccctggccagattcgccgtggcctacagccccgccagagacgccggcaacagagagatgcccagcctgcccagagccggccccgagggcagcaccagacacgccgccagcaagcagaagtacctggagaactacctgaacagactgctgaccatgagcttctacagaaactaccacgccatgaccgagttcctggaggtgagccagctgagcttcatccccgacctgggcagaaagggcctggagggcatgatcagaaagagaagcggcggccacagagtgcccggcctgacctgctgcggcagagaccaggtgtgctacagatggagcaagagatggctggtggtgaaggacagcttcctgctgtacatgtgcctggagaccggcgccatcagcttcgtgcagctgttcgaccccggcttcgaggtgcaggtgggcaagagaagcaccgaggccagacacggcgtgagaatcgacaccagccacagaagcctgatcctgaagtgcagcagctacagacaggccagatggtgggcccaggagatcaccgagctggcccagggccccggcagagacttcctgcagctgcacagacacgacagctacgccccccccagacccggcaccctggccagatggttcgtgaacggcgccggctacttcgccgccgtggccgacgccatcctgagagcccaggaggagatcttcatcaccgactggtggctgagccccgaggtgtacctgaagagacccgcccacagcgacgactggagactggacatcatgctgaagagaaaggccgaggagggcgtgagagtgagcatcctgctgttcaaggaggtggagctggccctgggcatcaacagcggctacagcaagagagccctgatgctgctgcaccccaacatcaaggtgatgagacaccccgaccaggtgaccctgtgggcccaccacgagaagctgctggtggtggaccaggtggtggccttcctgggcggcctggacctggcctacggcagatgggacgacctgcactacagactgaccgacctgggcgacagcagcgagagcgccgccagccagccccccacccccagacccgacagccccgccacccccgacctgagccacaaccagttcttctggctgggcaaggactacagcaacctgatcaccaaggactgggtgcagctggacagacccttcgaggacttcatcgacagagagaccacccccagaatgccctggagagacgtgggcgtggtggtgcacggcctgcccgccagagacctggccagacacttcatccagagatggaacttcaccaagaccaccaaggccaagtacaagacccccacctacccctacctgctgcccaagagcaccagcaccgccaaccagctgcccttcaccctgcccggcggccagtgcaccaccgtgcaggtgctgagaagcgtggacagatggagcgccggcaccctggagaacagcatcctgaacgcctacctgcacaccatcagagagagccagcacttcctgtacatcgagaaccagttcttcatcagctgcagcgacggcagaaccgtgctgaacaaggtgggcgacgagatcgtggacagaatcctgaaggcccacaagcagggctggtgctacagagtgtacgtgctgctgcccctgctgcccggcttcgagggcgacatcagcaccggcggcggcaacagcatccaggccatcctgcacttcacctacagaaccctgtgcagaggcgagtacagcatcctgcacagactgaaggccgccatgggcaccgcctggagagactacatcagcatctgcggcctgagaacccacggcgagctgggcggccaccccgtgagcgagctgatctacatccacagcaaggtgctgatcgccgacgacagaaccgtgatcatcggcagcgccaacatcaacgacagaagcctgctgggcaagagagacagcgagctggccgtgctgatcgaggacaccgagaccgagcccagcctgatgaacggcgccgagtaccaggccggcagattcgccctgagcctgagaaagcactgcttcggcgtgatcctgggcgccaacaccagacccgacctggacctgagagaccccatctgcgacgacttcttccagctgtggcaggacatggccgagagcaacgccaacatctacgagcagatcttcagatgcctgcccagcaacgccaccagaagcctgagaaccctgagagagtacgtggccgtggagcccctggccaccgtgagcccccccctggccagaagcgagctgacccaggtgcagggccacctggtgcacttccccctgaagttcctggaggacgagagcctgctgccccccctgggcagcaaggagggcatgatccccctggaggtgtggacctag

SEQ ID NO: 130755 - protein, 350 aa, Artificial Sequence
  derived and/or modified sequence
MEPKRIREGYLVKKGSVFNTWKPMWVVLLEDGIEFYKKKSDNSPKGMIPLKGSTLTSPCQDFGKRMFVFKITTTKQQDHFFQAAFLEERDAWVRDIKKAIKCIEGGQKFARKSTRRSIRLPETIDLGALYLSMKDTEKGIKELNLEKDKKIFNHCFTGNCVIDWLVSNQSVRNRQEGLMIASSLLNEGYLQPAGDMSKSAVDGTAENPFLDNPDAFYYFPDSGFFCEENSSDDDVILKEEFRGVIIKQGCLLKQGHRRKNWKVRKFILREDPAYLHYYDPAGAEDPLGAIHLRGCVVTSVESNSNGRKSEEENLFEIITADEVHYFLQAATPKERTEWIRAIQMASRTGK

SEQ ID NO: 130756 - DNA, 2869 bp, Artificial Sequence
  derived and/or modified sequence
tgatcttccaacccagtgaggggaagaggatgtgatcatgcgaccgccagcagaagggaaattgtgaaagcgacctgctgtagaaaaggcggcccacagccacctcagcatgcagaggaggcccagctgctgagaggagttgcctgagagtgacctttgcatctgcctgtccagccagcatggaaccaaagcggatcagagagggctaccttgtgaagaaggggagcgtgttcaatacgtggaaacccatgtgggttgtattgttagaagatggaattgaattctataagaagaaaagtgacaacagccccaaaggaatgatcccgctgaaagggagcactctgactagcccttgtcaagactttggcaaaaggatgtttgtgtttaagatcactacgaccaaacagcaggaccacttcttccaggcagccttcctggaggagagagatgcctgggttcgggatatcaagaaggccattaaatgcattgaaggaggccagaaatttgccaggaaatctaccaggaggtccattcgactgccagaaaccattgacttaggtgccttatatttgtccatgaaagacactgaaaaaggaataaaagaactgaatctagagaaggacaagaagatttttaatcactgcttcacaggtaactgcgtcattgattggctggtatccaaccagtctgttaggaatcgccaggaaggcctcatgattgcttcatcgctgctcaatgaggggtatctgcagcctgctggagacatgtccaagagtgcagtggatggaactgctgaaaaccctttcctggacaaccctgatgccttctactactttccagacagtgggttcttctgtgaagagaattccagtgatgatgatgtgattctgaaagaagaattcagaggggtcattatcaagcagggatgtttactgaagcaggggcatagaaggaaaaactggaaagtgaggaagttcatcttgagagaagaccctgcctacctgcactactatgaccctgctggggcagaagatcccctgggagcaattcacttgagaggctgtgtggtgacttcagtggagagcaactcaaatggcaggaagagtgaggaagagaacctttttgagatcatcacagcagatgaagtgcactatttcttgcaagcagccacccccaaggagcgcacagagtggatcagagccatccagatggcctcccgaactgggaagtaaagagactcctgcattcctcctcccctcctgagggaagcccatggacaagctcagtccaggacctgtccacttctgtgacaaatcaacgggaaacagcccaggggtgggaagttttcatttgcaggggggtctgaatgtaactcaccatgtggtgtgcaaggttcccctgcattgtattgctcactgcagcccctctgcccctatccatgacccccaagcagatataacaagctgtgcagcctcagtaggctgcttgccctctccaggcctcagggcctcttctggaaaatgaagaaattcaactagtagattcctgaggtccccctagcttaaaaaaaaaaaaaatctgccccatgattctaacactcgcagtagtgatagtgtatctagttgttctgctggtgtccttccttggctaagtcttggccttcagttatcttcaaatgtaccagaacctgagccaacgcctccctgtgaaactgttgctgatctgtagtacagtaccaggaagaaacctcttttgttctctttagacatcttctacttgctcttggccttgagatcgtgtaacaaaatgaaggagggctctcttctttcttcctcatcctactcaaaaacttcccgagagcagtggtggttttgagggttttgacttctattacttttggcagcctggaaagttgtgtcttctgggaaagagacctggggaggccaggagtagctgagggtcctttctgtgcccttaaaccgcccagaggagccctattccactctggttttaggctgatctgagagggtctccctttgttcctttctggagcatttctctaacgtttattacaattaggagggggaccccacatctgtgagattctgtttcatttgaggtttacagaaaaaaaaaagtggccagatgtgttccccccatgggtgagaggcctgggcaactgcctggtgaatgtgtcttgcggcagctgcagcaagtggaggggctgaactactggccagctcactggatgatgggttaatacaacaactgcactgtaaggactcagagccacacagaacttctgagaggggctgttagcattgcgcagcatcttcagttctccagtaaatgatattgcgttcgtgcctcagctttaagcacaagtagcagcagctcctgcttgagttctgagggcatcatggccctatgattaaccagagtgatctaacctagactaaaattgggaacttatttgcaatttttgaccctgaccactaactagtgattcttctccaaaattgagaaagacagcacccattgaagcagatatgtgtgtgaaagtatatttttcaattccagatttttaattttaaggctccaggaaagaaaggagagtagaacatttttcctcattttatcaaatcctctcttgccctccctcaattcccctgtaacattcctgaagctgttcccactcccagatggttttatcaatagcctagaggtaaagaactgtctttttctctgattctttaataaattatctttatagaatatgcacaagtttttctacactcagtgttaaagtatttattaatgggaagtcaacttaatgttttgaaataaatatatgactctgtttaatgca

SEQ ID NO: 130757 - DNA, 1053 bp, Artificial Sequence
  derived and/or modified sequence
atggagcccaaacggatacgtgaagggtatctggtgaaaaaaggcagcgtgtttaatacctggaagcccatgtgggtggtcctgctcgaggacggcattgagttctacaagaagaagtccgacaatagccccaaggggatgatccccttgaaagggtcaactctgacctctccttgccaggatttcgggaaacgtatgttcgtgttcaagattaccaccaccaagcagcaggaccacttctttcaggcggccttcctggaggaacgcgacgcttgggtgcgggacatcaagaaggcgatcaagtgcatcgagggcggccagaaattcgcccgcaagtcgacccggcgaagcatccgcctgccggaaacaattgacctcggcgccctctatctgtcaatgaaggatacggagaaaggtattaaggaactgaacctggagaaggacaagaagattttcaaccactgtttcacaggtaattgtgtcatcgactggctcgtctctaatcagtccgtgagaaatcggcaggagggccttatgatagcctcaagcctgcttaacgagggataccttcaacctgccggagatatgtccaaaagcgcagtggacggtactgcagagaaccctttcttggataatcctgacgccttttattatttcccagattccggatttttctgtgaggagaattcatcagatgatgacgtgatcctgaaggaagagtttagaggagtcattatcaaacaggggtgcctccttaaacagggacatcgaaggaagaactggaaagtgcggaagttcattctgcgggaggaccccgcatatttgcactattatgatccggccggggctgaggaccccttgggggctatacaccttcgtggctgtgtcgtcacatctgtggaatcaaatagtaatggccgcaagagtgaggaagagaatctgttcgagattattactgcagacgaggttcactacttcctccaggcggccacgcctaaagagcgtacagagtggatacgggccatccaaatggcctcccgtactggaaaatag

SEQ ID NO: 130758 - DNA, 1053 bp, Artificial Sequence
  derived and/or modified sequence
atggagcccaagaggatccgggagggctacctggtgaagaagggcagcgtcttcaacacctggaagcccatgtgggtggtgctgctggaggatggcatcgagttctacaagaagaagagtgacaacagccccaagggcatgatccccctgaagggcagcaccctgaccagcccctgccaggactttgggaagaggatgtttgtgttcaagatcaccaccaccaagcagcaggaccacttcttccaggccgccttcctggaggagagagatgcctgggtgcgggacatcaagaaggccatcaagtgcattgaaggaggccagaagtttgccaggaagagcaccaggaggagcatccggctgcctgagaccatcgacctgggcgccctgtacctgtccatgaaggacacagagaagggcatcaaggagctgaacctggagaaggacaagaagatcttcaaccactgcttcaccggcaactgtgtgattgactggctggtgagcaaccagagcgtgaggaaccggcaggagggcctgatgattgccagcagcctgctgaatgaaggctacctgcagcctgctggggacatgagcaagtctgctgtggatggaacagctgagaaccccttcctggacaacccagatgccttctactacttcccagacagcggcttcttctgtgaggagaacagcagtgatgatgatgtgatcctgaaggaggagttccggggcgtcatcatcaagcagggctgcctgctgaagcagggccacaggaggaagaactggaaggtgaggaagttcatcctgcgggaggaccctgcctacctgcactactatgaccctgctggagctgaggaccccctgggcgccatccacctgcggggctgtgtggtgacctctgtggagagcaacagcaatggaaggaagtctgaggaggagaacctgtttgagatcatcacagcagatgaggtgcactacttcctgcaggccgccacccccaaggagaggacagagtggatccgggccatccagatggccagcaggacaggcaagtag

SEQ ID NO: 130759 - DNA, 1053 bp, Artificial Sequence
  derived and/or modified sequence
atggagcccaagcggatccgggagggctacctggtgaagaagggctcggtgtttaatacctggaagccaatgtgggtcgtccttctggaggatggcatcgaattttataaaaaaaaatcagataattcccccaaggggatgatacccctgaagggatctacgctgacaagcccgtgtcaggactttgggaagcgaatgttcgtcttcaaaataactaccacaaagcaacaggaccatttcttccaggcagctttcctggaagagcgggatgcatgggtaagggacattaagaaggctataaagtgcatcgagggcgggcagaagtttgccagaaaatccaccagacgttctattcggttgccagagacaatcgacctcggtgcgctctacttgtctatgaaagacacagagaagggaataaaggaactgaacctggaaaaggataagaaaatatttaaccattgctttaccggtaactgtgtgatcgattggctggtgagcaatcaatcagtgaggaatcgtcaggagggtctgatgatcgcaagttctctcctgaacgagggttatctacagcccgctggagacatgtccaaatctgccgtcgatgggactgccgagaatccgttcttggataacccagacgccttctactattttcctgattcaggatttttctgcgaagagaacagtagcgacgacgacgtcatcctgaaagaggaattccggggggtgatcatcaaacagggctgccttctcaaacagggacacaggcggaagaattggaaagttaggaaattcatacttcgagaggatccagcttacctccactattacgacccggccggcgcggaagaccccttgggcgcgattcacttgcgaggatgtgtggtgacctccgtggaatctaattcgaatggaaggaagagcgaggaggaaaacctgttcgagattattacggccgatgaggtacactactttctccaggcggccacacccaaggagagaacggaatggatcagagctattcagatggcaagcaggaccgggaagtag

SEQ ID NO: 130760 - DNA, 1053 bp, Artificial Sequence
  derived and/or modified sequence
atggagcccaagaggataagggagggttatctggtcaaaaaaggcagtgtcttcaacacctggaaacctatgtgggtggttttgctggaggacggcattgaattctataaaaaaaagtcagacaactctcctaagggaatgataccactgaaggggtcaacattgacttcgccttgccaggactttggcaaaaggatgttcgttttcaagatcactaccaccaagcagcaagatcatttcttccaggcagcgttcctggaggagcgcgacgcgtgggtccgcgatattaaaaaagcaatcaagtgcattgaaggaggacagaagttcgccagaaaatccacaagaagaagcatccggctgccagaaaccatcgatctcggcgcactgtacctatccatgaaagacactgaaaaaggtattaaggagttaaatttagagaaagacaagaagatttttaatcactgcttcactgggaactgcgtgatcgactggctggtgagcaaccagtctgtgcgtaaccgtcaagagggactgatgattgccagttcattgctgaacgaggggtacttgcaacccgctggcgacatgtcaaagagtgctgtggatggaacagccgaaaatcccttcctcgataatcccgacgccttctactacttcccggatagcggctttttttgcgaggagaattcgagcgacgatgatgtgatcctcaaggaagaatttagaggcgtcatcatcaagcagggctgcctactcaaacagggccatagaaggaaaaattggaaggtccgaaagttcatactgcgggaggacccggcttatttgcactactacgaccctgcaggtgcggaggatcccctgggagctatacatctacgcggttgcgtcgtcacttcagttgagagtaacagcaacggcaggaaaagcgaggaagaaaatcttttcgaaattataacagcggatgaagtccactattttctgcaagctgccacacctaaggaacgaacagagtggattcgcgcaatccaaatggcctcccggactgggaaatag

SEQ ID NO: 130761 - DNA, 1053 bp, Artificial Sequence
  derived and/or modified sequence
atggagcctaaacgcatccgggaaggatatctggtgaaaaagggcagtgtgtttaatacctggaagccaatgtgggttgtgcttttggaggatgggatcgaattttacaagaaaaaatccgataatagcccaaaaggtatgatccctctgaaaggtagcaccctaacaagtccctgccaggacttcggcaagcgaatgttcgttttcaaaattacaaccacaaaacagcaggatcatttttttcaggcagctttcctagaggaaagagatgcttgggttagagacatcaagaaggccataaagtgcatcgagggtggccagaagttcgcacggaaaagcacacggaggtctatccggctgcccgaaactattgatctgggcgcactttatttgtctatgaaggatacggaaaagggaatcaaggagctgaacctggaaaaggataaaaaaatttttaaccactgtttcaccggaaactgcgttatcgattggctagttagcaaccaatctgtgagaaatcgccaggagggcctgatgattgcatcttcacttctgaacgaaggctacctacagcccgctggggacatgagtaaatccgccgtggacggaaccgccgaaaaccccttcctcgataaccccgatgctttttactactttccagactcaggttttttctgcgaggagaacagcagcgatgatgatgttatcttgaaagaagaatttagaggagtaatcatcaaacaaggctgcctgctgaaacaagggcacaggagaaaaaattggaaagtcagaaagttcatcctgcgagaggaccccgcatacctgcactattatgacccagctggggccgaggatcctcttggagccatccacttgcggggttgcgtggttacctccgtcgaatctaacagtaacgggcgcaaatctgaggaagagaatcttttcgaaatcataactgccgatgaggtgcattattttctgcaggctgctaccccaaaagagcgcacagagtggatccgggctatacagatggctagtcgtaccggaaagtag

SEQ ID NO: 130762 - DNA, 1053 bp, Artificial Sequence
  derived and/or modified sequence
atggagccaaagagaattagggagggatatttagttaagaagggatcagtatttaacacatggaagccaatgtgggtggtactgcttgaagacggcatagaattctacaagaagaagagcgataactctcccaaaggtatgatccctcttaagggtagtactcttacatccccatgccaagactttggaaagcggatgtttgtgttcaagattacaaccaccaaacaacaagatcatttcttccaagcagccttcctggaggagcgagacgcatgggtgcgcgacatcaaaaaagccatcaagtgcatcgaggggggacagaagtttgctagaaagagtacacgaagatctatcaggctgcccgaaacaattgacctcggcgccctctacctttctatgaaagatactgagaagggcatcaaagagctaaacctggaaaaggataaaaaaatttttaatcattgcttcaccgggaactgcgtgatcgactggcttgtctcaaatcaaagcgttagaaataggcaggagggtctgatgatagccagcagcttgcttaatgaagggtacttgcagccagccggagatatgtcgaagtctgctgtggacgggaccgccgaaaaccccttcctggacaatcctgatgcgttctattatttcccagacagcggctttttctgtgaagaaaatagttccgacgacgatgtgattttgaaagaggagtttagaggcgtgatcattaaacaggggtgtctgttgaaacaggggcacagaaggaagaattggaaagtccgtaaattcatcctgcgggaggaccccgcttacctgcactattacgatccagcaggcgcagaggatcccttaggcgcgatccatctaagaggatgcgtggtaactagtgtagagagcaatagtaacggacgaaagagcgaagaagaaaacttattcgagataatcacagcagatgaagtgcattacttcctccaggccgctacacccaaggaaagaacagaatggataagggctatccagatggcttcacgcacaggtaagtag

SEQ ID NO: 130763 - DNA, 1053 bp, Artificial Sequence
  derived and/or modified sequence
atggagcccaagagaatcagagagggctacctggtgaagaagggcagcgtgttcaacacctggaagcccatgtgggtggtgctgctggaggacggcatcgagttctacaagaagaagagcgacaacagccccaagggcatgatccccctgaagggcagcaccctgaccagcccctgccaggacttcggcaagagaatgttcgtgttcaagatcaccaccaccaagcagcaggaccacttcttccaggccgccttcctggaggagagagacgcctgggtgagagacatcaagaaggccatcaagtgcatcgagggcggccagaagttcgccagaaagagcaccagaagaagcatcagactgcccgagaccatcgacctgggcgccctgtacctgagcatgaaggacaccgagaagggcatcaaggagctgaacctggagaaggacaagaagatcttcaaccactgcttcaccggcaactgcgtgatcgactggctggtgagcaaccagagcgtgagaaacagacaggagggcctgatgatcgccagcagcctgctgaacgagggctacctgcagcccgccggcgacatgagcaagagcgccgtggacggcaccgccgagaaccccttcctggacaaccccgacgccttctactacttccccgacagcggcttcttctgcgaggagaacagcagcgacgacgacgtgatcctgaaggaggagttcagaggcgtgatcatcaagcagggctgcctgctgaagcagggccacagaagaaagaactggaaggtgagaaagttcatcctgagagaggaccccgcctacctgcactactacgaccccgccggcgccgaggaccccctgggcgccatccacctgagaggctgcgtggtgaccagcgtggagagcaacagcaacggcagaaagagcgaggaggagaacctgttcgagatcatcaccgccgacgaggtgcactacttcctgcaggccgccacccccaaggagagaaccgagtggatcagagccatccagatggccagcagaaccggcaagtag

SEQ ID NO: 130764 - protein, 96 aa, Artificial Sequence
  derived and/or modified sequence
MEHKEVVLLLLLFLKSGQGEPLDDYVNTQGPSLFSVTKKQLGAGSREECAAKCEEDKEFTCRAFQYHSKEQQCVIMAENRKSSIIIRMRDAVLFEK

SEQ ID NO: 130765 - DNA, 291 bp, Artificial Sequence
  derived and/or modified sequence
atggagcataaggaagtggtgctgttgcttctcttatttctcaagagtggacagggagagcctctcgacgactatgttaacacgcagggaccgtcactgttcagcgtcaccaaaaaacagctgggagctgggtccagggaggaatgtgctgccaagtgtgaggaagacaaggagtttacttgcagagccttccagtaccatagtaaagaacaacagtgtgtaatcatggccgagaatcgtaaaagcagtatcatcattaggatgcgcgatgctgtgctcttcgagaagtag

SEQ ID NO: 130766 - DNA, 291 bp, Artificial Sequence
  derived and/or modified sequence
atggagcataaggaggtggtcctcctgctactgctgtttctcaaatccggacagggagagcccctggacgattacgttaacacgcagggcccttctctgttttccgtaacaaagaagcagctgggggcagggagtcgcgaggaatgcgcggctaaatgtgaagaggataaagaatttacctgcagggcttttcagtatcactccaaggagcagcagtgtgtgatcatggctgaaaatcggaagtcttcaatcatcatccggatgagagacgccgttttgttcgagaaatag

SEQ ID NO: 130767 - DNA, 291 bp, Artificial Sequence
  derived and/or modified sequence
atggaacataaggaagttgtcctgctactgctcctgttcttgaaaagcggtcagggggagccgctagatgactatgttaatacacaaggtccatctttatttagcgtgactaagaagcaactgggtgcaggatcccgcgaagagtgtgccgccaagtgtgaagaggacaaagaatttacctgccgggcctttcagtaccattctaaagagcaacagtgtgtaattatggctgagaatcggaaaagttctatcattattagaatgagggatgccgtgctgtttgaaaagtag

SEQ ID NO: 130768 - DNA, 291 bp, Artificial Sequence
  derived and/or modified sequence
atggagcacaaagaagtggtgttactcttactcctgttcctgaagagcgggcagggcgagccattggatgactatgtcaacacacaaggtccatctctcttttccgtgacaaagaagcagctgggggccggctcaagagaagaatgtgctgccaagtgtgaagaggacaaggagttcacctgtcgcgctttccagtaccatagtaaagagcagcagtgtgtgatcatggccgagaaccgaaaatcatcaattataattagaatgagggatgctgtgttgtttgaaaaatag

SEQ ID NO: 130769 - DNA, 291 bp, Artificial Sequence
  derived and/or modified sequence
atggagcacaaggaggtggtgctgctgctgctgctgttcctgaagagcggccagggcgagcccctggacgactacgtgaacacccagggccccagcctgttcagcgtgaccaagaagcagctgggcgccggcagcagagaggagtgcgccgccaagtgcgaggaggacaaggagttcacctgcagagccttccagtaccacagcaaggagcagcagtgcgtgatcatggccgagaacagaaagagcagcatcatcatcagaatgagagacgccgtgctgttcgagaagtag

SEQ ID NO: 130770 - DNA, 291 bp, Artificial Sequence
  derived and/or modified sequence
atggagcacaaggaggtcgtcctcctgttactcctgttcttgaaaagcgggcagggagagcccttggacgattatgtcaacactcagggaccaagcctttttagcgtgactaaaaagcagttaggagcagggagtcgggaagagtgcgcagcaaagtgcgaagaggacaaggagtttacatgccgtgcattccagtaccattcaaaagaacagcagtgtgtcatcatggcggaaaataggaaaagctccatcattatcaggatgcgggacgcagttctgttcgaaaagtag

SEQ ID NO: 130771 - DNA, 291 bp, Artificial Sequence
  derived and/or modified sequence
atggaacataaggaggtggtactattgctgctcttgttcctcaaatccgggcagggcgaacctctggatgactacgttaatacgcaaggcccatccctctttagcgtgactaaaaagcagttgggagcggggtcgagagaagagtgcgccgcaaaatgcgaagaggacaaagagtttacctgtagggcatttcaataccacagcaaagagcaacaatgtgttatcatggctgaaaacagaaaatctagcattatcattcgcatgcgggatgctgtcctatttgaaaagtag

SEQ ID NO: 130772 - DNA, 291 bp, Artificial Sequence
  derived and/or modified sequence
atggagcacaaggaggtggtgctgctgctgctgctcttcctgaagagcggccagggcgagcccctggatgattatgtgaacacccagggccccagcctcttctctgtgaccaagaagcagctgggcgccggcagccgggaggagtgtgccgccaagtgtgaggaggacaaggagttcacctgccgggccttccagtaccacagcaaggagcagcagtgtgtgatcatggccgagaacaggaagagcagcatcatcatccgcatgagagatgctgtgctgtttgagaagtag

SEQ ID NO: 130773 - DNA, 291 bp, Artificial Sequence
  derived and/or modified sequence
atggagcacaaggaggtggtgctgctgctgctgctgttcctgaagtccggccagggggaacccttagatgactacgtgaacactcagggtcctagcctgttttctgtgaccaaaaagcagcttggcgctggctcaagagaggaatgcgcggccaaatgcgaagaggacaaggagtttacgtgccgcgcttttcagtatcactccaaagagcaacaatgcgtaattatggcggagaataggaagtcttccattataattcggatgcgagatgcggtgttgttcgaaaaatag

SEQ ID NO: 130774 - DNA, 291 bp, Artificial Sequence
  derived and/or modified sequence
atggagcacaaggaggtggtgctgctgctgctgctgttcctgaagtcgggccagggagaacccctcgacgattatgttaatacccagggccctagcctcttctctgtcactaaaaagcagctcggggccgggagcagagaggaatgcgcggcaaagtgcgaagaagacaaggagtttacgtgcagggcatttcagtatcacagcaaagaacagcagtgtgtcattatggccgaaaaccgtaagtccagcatcatcatccgtatgcgggacgctgtactgttcgagaagtag

SEQ ID NO: 130775 - DNA, 291 bp, Artificial Sequence
  derived and/or modified sequence
atggagcacaaggaggtggtgttactactgctcctgttcctgaagagcggtcaaggagagcccctggatgactacgttaacacccagggccctagcttgttctctgtgaccaaaaagcaattgggcgcgggctctcgcgaagaatgcgcggccaaatgcgaggaagacaaggaattcacatgtagagccttccagtaccatagcaaggagcaacaatgtgtgattatggccgagaatagaaagagctcaattatcattcgcatgagggatgccgtattgtttgagaagtag

SEQ ID NO: 130776 - DNA, 291 bp, Artificial Sequence
  derived and/or modified sequence
atggaacataaggaagtggtgttgttgcttcttctatttctgaagtctggtcaaggggagcccttggatgactatgtaaacactcaggggcccagcctgttcagcgtcactaaaaagcagctcggcgcagggtcacgggaggaatgcgccgccaaatgtgaggaagataaggaattcacatgccgggccttccagtatcatagcaaagagcagcaatgtgtcataatggcggagaatcggaagagctccatcatcatacgcatgcgcgacgctgttctgttcgagaagtag

SEQ ID NO: 130777 - DNA, 291 bp, Artificial Sequence
  derived and/or modified sequence
atggaacataaggaagtggtgctgctgttgcttttgtttctaaagtccggacagggagaacctctcgacgactacgttaatacacagggacccagtctgttctctgttaccaagaaacagctgggagccggctcccgtgaggaatgtgcagccaaatgtgaggaagacaaggaattcacatgccgggcctttcagtaccactcaaaagaacagcagtgcgttataatggctgaaaaccgcaagtcatccatcataatccgaatgcgagacgctgtgctgtttgaaaagtag

SEQ ID NO: 130778 - DNA, 291 bp, Artificial Sequence
  derived and/or modified sequence
atggagcacaaggaggtggtgctgctgctgctgctgttcctgaagtccggtcagggtgagcccctggacgattacgttaatacacagggaccctctttgttctcggtgaccaagaaacagctgggggccggctcccgcgaggaatgcgcggcaaagtgcgaggaggacaaagagttcacatgcagggcattccagtaccatagcaaagagcagcagtgcgtaatcatggctgagaaccgaaaatcaagcattataataaggatgcgggacgccgttctgtttgaaaaatag

SEQ ID NO: 130779 - DNA, 291 bp, Artificial Sequence
  derived and/or modified sequence
atggagcacaaggaggtggtgctgctgctgctgctgttcctgaagtctgggcagggagagcctctagatgactatgtcaatacacagggaccttcgctttttagcgtaaccaagaaacagctgggcgccggaagcagggaagagtgcgccgccaagtgtgaggaagataaagaatttacctgccgcgcgttccagtatcactcaaaagaacaacagtgcgtgataatggctgagaaccgaaaaagctctatcattattcgcatgcgagacgccgtcctgtttgaaaaatag

SEQ ID NO: 130780 - DNA, 291 bp, Artificial Sequence
  derived and/or modified sequence
atggagcacaaggaggtggtgctgctgctgctgctgttcctgaagtctggccagggcgaaccactcgacgattatgttaacacccagggcccttctcttttcagtgttacaaagaaacagttaggggcaggatcaagagaagaatgcgcagctaaatgtgaggaagacaaggaattcacctgcagggcttttcagtatcattcaaaagagcaacagtgcgtaattatggctgagaatcgtaagtctagcataatcattagaatgagagacgccgtcttatttgagaagtag

SEQ ID NO: 130781 - DNA, 960 bp, Artificial Sequence
  derived and/or modified sequence
actctcatgtaagtcaacaacatcctgggattgggacacactttctgggcactgctggccagtcccaaaatggaacataaggaagtggttcttctacttcttttatttctgaaatcaggtcaaggagagcccctggatgactatgtgaatacccaggggccttcactgttcagtgtcactaagaagcagctgggggcaggaagcagagaagaatgtgcagcaaaatgtgaagaggacaaagaattcacctgcagggcattccaatatcacagtaaagagcaacaatgtgtgataatggctgaaaacaggaagtcctccataatcattaggatgagagatgcagttttatttgaaaagtaaaggctgcaatcaagatgttggcatggctggggtctcatctgaaggctggactggagaagaatctacttccaaacttatgtggtagttggaagaatttagttcctcaaggctgctaaactgatggcctgtgttccttgcctctgggatggtagcttgcttcaacaaagtgtgcaagcagagaagacagagagagtccgctagcaagatagaagccacaatctcttgtaatctatcatttttgctgtattctactggttaaaaataactcattaggttagcctactggctctcagggggaagagattatacaaaggcatgaatttctggaggagggaatgagggcaaagaactctgaaaagtttctcttccacaatctgaagaacttctagaaagtagaaggaagcaatattgcttagggatggacaacttggcactggttatgtgttccaagtgaggtaaccttgttcccaggaataaagagaaccagatgactgtaaacatttccctaaactgaaatgcactgttgtatgttcacctgaaatgaatggtgtaagctgaatatgagatttttgacaaaataaaaattttgctgtgttctca

SEQ ID NO: 130782 - DNA, 291 bp, Artificial Sequence
  derived and/or modified sequence
atggagcacaaagaggtcgtactgctgctattactgttcctgaagtctggtcagggtgaacctcttgatgattatgtgaatacccagggacctagcctcttttcagttaccaagaagcagctgggggctggaagcagggaggagtgcgcagccaagtgcgaagaagataaagaattcacctgccgggctttccaatatcactcgaaggagcaacaatgtgttatcatggccgagaaccgaaaaagcagcattattatcagaatgcgggatgccgtcttatttgagaagtag

SEQ ID NO: 130783 - DNA, 291 bp, Artificial Sequence
  derived and/or modified sequence
atggagcacaaggaggtggtgctgttgttgctgctctttctgaagtccggccagggagagcctctggatgactatgtgaacacacagggcccttcactgttctctgtcacaaagaaacagctgggcgcaggaagcagggaggagtgcgccgctaagtgcgaagaggacaaggagtttacctgtcgggcttttcaatatcacagtaaagaacaacagtgtgtcatcatggccgaaaatagaaaaagctcaattatcatccgtatgagggacgctgtgctgtttgagaaatag

SEQ ID NO: 130784 - DNA, 291 bp, Artificial Sequence
  derived and/or modified sequence
atggagcacaaagaggtagttctgctcctgctcttgtttctgaaaagcggccaaggcgagcccctggacgactatgtcaacactcagggtcccagtcttttcagcgttactaaaaaacaacttggagcaggaagtagggaagaatgcgccgctaagtgcgaagaagataaagagtttacctgtcgagcttttcagtatcattcaaaggaacagcagtgtgtgattatggctgaaaatagaaagagctctattattattaggatgcgggatgctgtacttttcgagaaatag

SEQ ID NO: 130785 - DNA, 291 bp, Artificial Sequence
  derived and/or modified sequence
atggaacataaagaagtggttttgttgctcctgttgttcctcaaatctggacagggcgagcctctcgacgactatgtgaacacacaaggaccgtcattgttcagcgtgacaaaaaagcaactcggcgccgggtcaagagaggagtgtgccgctaagtgtgaagaagacaaggagtttacttgtagagctttccaataccactcaaaggagcagcaatgtgtaattatggcagaaaacagaaagtcatccatcatcatccgaatgcgcgacgctgtgctcttcgaaaagtag

SEQ ID NO: 130786 - DNA, 291 bp, Artificial Sequence
  derived and/or modified sequence
atggaacacaaagaagtggtgctcttgcttttgttgtttctcaaatctggccaaggtgaacctctggacgactatgttaacactcaaggccccagcctcttcagtgttacaaagaaacaactgggagcaggcagcagggaggaatgtgcagcaaaatgtgaggaagacaaagaattcacatgcagagcttttcagtaccattccaaagaacaacagtgcgttataatggcagaaaataggaaaagcagcattataattagaatgagagacgccgtgctcttcgaaaagtag

SEQ ID NO: 130787 - DNA, 291 bp, Artificial Sequence
  derived and/or modified sequence
atggagcataaagaagttgtgctgctgctactcctgtttctaaaatccgggcagggcgagccattagacgactatgtgaacacacaaggacccagtctgttctccgtaacgaaaaagcagctaggagctggatccagagaagagtgcgccgcaaaatgtgaagaggataaggagttcacctgtcgcgccttccagtatcactctaaagagcagcaatgtgtaataatggcggaaaatagaaagtcttctatcatcattaggatgagagacgcggtgcttttcgaaaaatag

SEQ ID NO: 130788 - RNA, 291 nt, Artificial Sequence
  derived and/or modified sequence
auggaacauaaggaaguuguccugcuacugcuccuguucuugaaaagcggucagggggagccgcuagaugacuauguuaauacacaagguccaucuuuauuuagcgugacuaagaagcaacugggugcaggaucccgcgaagagugugccgccaagugugaagaggacaaagaauuuaccugccgggccuuucaguaccauucuaaagagcaacaguguguaauuauggcugagaaucggaaaaguucuaucauuauuagaaugagggaugccgugcuguuugaaaaguag

SEQ ID NO: 130789 - RNA, 291 nt, Artificial Sequence
  derived and/or modified sequence
auggagcacaaagaagugguguuacucuuacuccuguuccugaagagcgggcagggcgagccauuggaugacuaugucaacacacaagguccaucucucuuuuccgugacaaagaagcagcugggggccggcucaagagaagaaugugcugccaagugugaagaggacaaggaguucaccugucgcgcuuuccaguaccauaguaaagagcagcagugugugaucauggccgagaaccgaaaaucaucaauuauaauuagaaugagggaugcuguguuguuugaaaaauag

SEQ ID NO: 130790 - RNA, 291 nt, Artificial Sequence
  derived and/or modified sequence
auggaacauaaagaagugguuuuguugcuccuguuguuccucaaaucuggacagggcgagccucucgacgacuaugugaacacacaaggaccgucauuguucagcgugacaaaaaagcaacucggcgccgggucaagagaggagugugccgcuaagugugaagaagacaaggaguuuacuuguagagcuuuccaauaccacucaaaggagcagcaauguguaauuauggcagaaaacagaaagucauccaucaucauccgaaugcgcgacgcugugcucuucgaaaaguag

SEQ ID NO: 130791 - RNA, 291 nt, Artificial Sequence
  derived and/or modified sequence
auggaacacaaagaaguggugcucuugcuuuuguuguuucucaaaucuggccaaggugaaccucuggacgacuauguuaacacucaaggccccagccucuucaguguuacaaagaaacaacugggagcaggcagcagggaggaaugugcagcaaaaugugaggaagacaaagaauucacaugcagagcuuuucaguaccauuccaaagaacaacagugcguuauaauggcagaaaauaggaaaagcagcauuauaauuagaaugagagacgccgugcucuucgaaaaguag

SEQ ID NO: 130792 - RNA, 291 nt, Artificial Sequence
  derived and/or modified sequence
auggagcauaaagaaguugugcugcugcuacuccuguuucuaaaauccgggcagggcgagccauuagacgacuaugugaacacacaaggacccagucuguucuccguaacgaaaaagcagcuaggagcuggauccagagaagagugcgccgcaaaaugugaagaggauaaggaguucaccugucgcgccuuccaguaucacucuaaagagcagcaauguguaauaauggcggaaaauagaaagucuucuaucaucauuaggaugagagacgcggugcuuuucgaaaaauag

SEQ ID NO: 130793 - protein, 52 aa, Artificial Sequence
  derived and/or modified sequence
MEKVQYLTRSAIRRASTIEMPQQARQKLQNLFINFCLILICLLLICIIVMLL

SEQ ID NO: 130794 - DNA, 1742 bp, Artificial Sequence
  derived and/or modified sequence
ctactgcaactgttcccataaactgggtgacagagtcagaaaactccccagctaaacacccgtaagacttcatacaacacaatactctatactgtgatgatcacagctgccaaggctacctaaaagaagacagttatctcatatttggctgccagctttttatctttctctcgaccacttaaaacttcagacttcctgtcctgctggtatcatggagaaagtccaatacctcactcgctcagctataagaagagcctcaaccattgaaatgcctcaacaagcacgtcaaaagctacagaatctatttatcaatttctgtctcatcttaatatgtctcttgctgatctgtatcatcgtgatgcttctctgaagttctgctacaacctctagatctgcagcttgccacatcagcttaaaatctgtcatcccatgcagacaggaaaacaatattgtataacagaccacttcctgagtagaagagtttctttgtgaaaaggtcaagattaagactaaaacttattgttaccatatgtattcatctgttggatcttgtaaacatgaaaagggctttattttcaaaaattaacttcaaaataagtgtataaaatgcaactgttgatttcctcaacatggctcacaaatttctatcccaaatcttttctgaagatgaagagtttagttttaaaactgcactgccaacaagttcacttcatatataaagcattatttttactcttttgaggtgaatataatttatattacaatgtaaaagcttctttaatactaagtatttttcaggtcttcaccaagtatcaaagtaataacacaaatgaagtgtcattattcaaaatagtccactgactcctcacatctgttatcttattataaagaactatttgtagtaactatcagaatctacattctaaaacagaaattgtattttttctatgccacattaacatcttttaaagttgatgagaatcaagtatggaaaagtaaggccatactcttacataataaaattccttttaagtaattttttcaaagaatcacagaattctagtacatgtaggtaaatcataaatctgttctaagacatatgatcaacagatgagaactggtggttaatatgtgacagtgagattagtcatatcactaatatactaacaacagaatctaatcttcatttaaggcactgtagtgaattatctgagctagagttacctagcttaccatactatatctttggaatcatgaaaccttaagacttcagaatgattttgcaggttgtcttccattccagcctaacatccaatgcaggcaaggaaaataaaagatttccagtgacagaaaaatatattatctcaagtattttttaaaaatatatgaattctctctccaaatattaactaattattagattatattttgaaatgaacttgttggcccatctattacatctacagctgacccttgaacatgggggttaggggagctgacaattcgtgggtccgcaaaatcttaactacctaatagcctactattgaccataaaccttactgataacataaacagtaaattaacacatattttgcgtgttatatgtattatacactatattcctacaataaagtaagctagagaaaatgttatttagaaaatcataagaaagagaaaatatatttactattcattaaatggaagtgggtcaacaaaaaaaaaaaaaaaaaaaaaaaaaaaaa

SEQ ID NO: 130795 - DNA, 159 bp, Artificial Sequence
  derived and/or modified sequence
atggagaaggtacagtacctgactagatcagccatccgacgggcatcaacaatcgaaatgccccagcaagcgcgacaaaagctccagaatctgttcataaatttttgcctgattctgatttgtctgctcctaatatgtatcatcgtgatgcttctctag

SEQ ID NO: 130796 - DNA, 159 bp, Artificial Sequence
  derived and/or modified sequence
atggagaaggtgcagtacctgaccaggtctgccatcagaagagccagcaccatcgagatgccccagcaggcccggcagaagctgcagaacctcttcatcaacttctgcctgatcctgatctgcctgctgctgatctgcatcatcgtgatgctgctgtag

SEQ ID NO: 130797 - DNA, 159 bp, Artificial Sequence
  derived and/or modified sequence
atggagaaggtgcagtacctgacccggagcgccatccggcgggccagtactattgagatgccacaacaggctcgccaaaagctacaaaacctcttcatcaacttttgtctgatactcatatgcctcttgctgatttgcattatcgtcatgctgctctag

SEQ ID NO: 130798 - DNA, 2001 bp, Artificial Sequence
  derived and/or modified sequence
aaactgggtgacagagtcagaaaactccccagctaaacacccgtaagacttcatacaacacaatactctatactgtgatgatcacagctgccaaggctacctaaaagaagacagttatctcatatttggctgccagctttttatctttctctcgaccacttaaaacttcagacttcctgtcctgctggtatcatggagaaagtccaatacctcactcgctcagctataagaagagcctcaaccattgaaatgcctcaacaagcacgtcaaaagctacagaatctatttatcaatttctgtctcatcttaatatgtctcttgctgatctgtatcatcgtgatgcttctctgaagttctgctacaacctctagatctgcagcttgccacatcagcttaaaatctgtcatcccatgcagacaggaaaacaatattgtataacagaccacttcctgagtagaagagtttctttgtgaaaaggtcaagattaagactaaaacttattgttaccatatgtattcatctgttggatcttgtaaacatgaaaagggctttattttcaaaaattaacttcaaaataagtgtataaaatgcaactgttgatttcctcaacatggctcacaaatttctatcccaaatcttttctgaagatgaagagtttagttttaaaactgcactgccaacaagttcacttcatatataaagcattatttttactcttttgaggtgaatataatttatattacaatgtaaaagcttctttaatactaagtatttttcaggtcttcaccaagtatcaaagtaataacacaaatgaagtgtcattattcaaaatagtccactgactcctcacatctgttatcttattataaagaactatttgtagtaactatcagaatctacattctaaaacagaaattgtattttttctatgccacattaacatcttttaaagttgatgagaatcaagtatggaaaagtaaggccatactcttacataataaaattccttttaagtaattttttcaaagaatcacagaattctagtacatgtaggtaaatcataaatctgttctaagacatatgatcaacagatgagaactggtggttaatatgtgacagtgagattagtcatatcactaatatactaacaacagaatctaatcttcatttaaggcactgtagtgaattatctgagctagagttacctagcttaccatactatatctttggaatcatgaaaccttaagacttcagaatgattttgcaggttgtcttccattccagcctaacatccaatgcaggcaaggaaaataaaagatttccagtgacagaaaaatatattatctcaagtattttttaaaaatatatgaattctctctccaaatattaactaattattagattatattttgaaatgaacttgttggcccatctattacatctacagctgacccttgaacatgggggttaggggagctgacaattcgtgggtccgcaaaatcttaactacctaatagcctactattgaccataaaccttactgataacataaacagtaaattaacacatattttgcgtgttatatgtattatacactatattcctacaataaagtaagctagagaaaatgttatttagaaaatcataagaaagagaaaatatatttactattcattaaatggaagtgggtcaacataaaagtcttcattctcattgtcttcacattgagtaggcagaggaggagaaagatggggaggaagagaaggcgttggtcttgcagtcttgtcttaggggtgtggggagtgggggaaagaatattcatgtataagtggacccttgcaattcaagcccttgttgttcaagggtcaactgtaataggatatagctatttttcttcctctatcaaccaaatggtaagcatctattttgcagtccactctactgagctaaattatagatccagctatgctatttataattattttcttgatgaataaattt

SEQ ID NO: 130799 - DNA, 159 bp, Artificial Sequence
  derived and/or modified sequence
atggagaaagtgcagtatttgacgcggtccgcgattagacgcgcttcaaccatcgagatgccgcagcaggcgagacagaagttgcagaacctgtttattaatttctgtctaatccttatttgtctgctgcttatttgtattatcgtgatgctgctctag

SEQ ID NO: 130800 - DNA, 159 bp, Artificial Sequence
  derived and/or modified sequence
atggagaaggtgcagtacctgaccagaagcgccatcagaagagccagcaccatcgagatgccccagcaggccagacagaagctgcagaacctgttcatcaacttctgcctgatcctgatctgcctgctgctgatctgcatcatcgtgatgctgctgtag

SEQ ID NO: 130801 - protein, 145 aa, Artificial Sequence
  derived and/or modified sequence
MADSERLSAPGCWAACTNFSRTRKGILLFAEIILCLVILICFSASTPGYSSLSVIEMILAAIFFVVYMCDLHTKIPFINWPWSDFFRTLIAAILYLITSIVVLVERGNHSKIVAGVKAMGAALKHRAKGLRSQGPFLPLLLAEIV

SEQ ID NO: 130802 - protein, 152 aa, Artificial Sequence
  derived and/or modified sequence
MADSERLSAPGCWAACTNFSRTRKGILLFAEIILCLVILICFSASTPGYSSLSVIEMILAAIFFVVYMCDLHTKIPFINWPWSDFFRTLIAAILYLITSIVVLVERGNHSKIVAGVLGLIATCLFGYDAYVTFPVRQPRHTAAPTDPADGPV

SEQ ID NO: 130803 - DNA, 438 bp, Artificial Sequence
  derived and/or modified sequence
atggctgattctgaacggctgagcgcccccggctgttgggcagcgtgtaccaattttagtcggactcggaaggggatcttgttgttcgctgagattatcctgtgcctagtgatactgatatgtttttccgcctctacgccggggtatagttcactttccgtaatcgaaatgattctcgcggccatcttcttcgtggtgtacatgtgcgacctgcacacaaaaattccattcattaattggccgtggagcgacttctttaggacattgatagccgccatcctgtacctaatcacatcaatcgtcgttctggtggagaggggaaaccacagtaaaatcgtggccggagtgaaggcgatgggagccgcgcttaaacatcgagccaaaggcctacgctctcagggtccgtttcttccgcttctcttagctgaaatcgtatag

SEQ ID NO: 130804 - DNA, 459 bp, Artificial Sequence
  derived and/or modified sequence
atggcagacagtgagcggttgtcagcgcccgggtgttgggctgcttgcaccaacttctctaggactcgtaagggtatcctgctgttcgccgaaattatcctctgtctggttatcctcatctgtttttcagctagtacccctggctactcatcactatcagtgattgagatgattctggctgctatctttttcgtcgtctacatgtgcgacctgcataccaaaatcccattcatcaactggccttggtcagacttttttcgcacccttatcgccgccatcttgtacctcatcacaagcatagtggtgttagtggaaaggggcaatcattctaagatagttgccggcgtactggggcttatcgcaacgtgcctgttcggttacgacgcctatgtcacgttccccgtgcgtcaacccagacatactgccgcgccaacagacccggcagacggtcctgtctag

SEQ ID NO: 130805 - DNA, 438 bp, Artificial Sequence
  derived and/or modified sequence
atggctgacagcgagcggctgagcgcccctggctgctgggccgcctgcaccaacttcagcaggaccaggaagggcatcctgctgtttgctgagatcatcctgtgcctggtgatcctgatctgcttcagcgccagcaccccaggctacagcagcctgtctgtgattgagatgatcctggccgccatcttctttgtggtgtacatgtgtgacctgcacaccaagatccccttcatcaactggccctggagcgacttcttccgcaccctgattgctgccatcctgtacctgatcaccagcatcgtggtgctggtggagcggggcaaccacagcaagatcgtggccggcgtgaaggccatgggcgccgccctgaagcaccgggccaagggcctgcggagccagggccccttcctgcccctgctgctggccgagatcgtgtag

SEQ ID NO: 130806 - DNA, 459 bp, Artificial Sequence
  derived and/or modified sequence
atggctgacagcgagcggctgagcgcccctggctgctgggccgcctgcaccaacttcagcaggaccaggaagggcatcctgctgtttgctgagatcatcctgtgcctggtgatcctgatctgcttcagcgccagcaccccaggctacagcagcctgtctgtgattgagatgatcctggccgccatcttctttgtggtgtacatgtgtgacctgcacaccaagatccccttcatcaactggccctggagcgacttcttccgcaccctgattgctgccatcctgtacctgatcaccagcatcgtggtgctggtggagcggggcaaccacagcaagatcgtggccggcgtgctgggcctcatcgccacctgcctgtttggctatgatgcctacgtgaccttccctgtgcggcagcccaggcacacagctgcccccacagatcctgcagatggccctgtgtag

SEQ ID NO: 130807 - DNA, 438 bp, Artificial Sequence
  derived and/or modified sequence
atggccgacagcgagcggctgagcgcccccggctgctgggccgcctgcaccaatttttccagaactcgcaaggggattctgctctttgcggaaattatcctttgcctggtcattctgatatgcttcagcgcgtctactcccggttactcttctctgagcgtcatagagatgattttggcggccatattcttcgtcgtgtacatgtgtgacctgcacaccaaaatcccatttataaactggccctggtctgatttctttcgtaccttaattgcagctatactttaccttattacatccattgttgtgcttgtcgagcgggggaaccactccaaaattgtggcaggtgtcaaggcaatgggcgcggcactaaagcaccgcgccaagggtctgaggagccagggaccttttctgcccctgctgctcgccgagattgtatag

SEQ ID NO: 130808 - DNA, 459 bp, Artificial Sequence
  derived and/or modified sequence
atggccgacagcgagcggctgagcgcccccggctgctgggccgcctgcaccaactttagccggacacgcaaaggaatcctactgttcgcggagataattctttgcttagttatcctcatttgcttcagcgcttccacccccggatatagcagccttagtgtaattgaaatgattcttgctgccatcttttttgtggtttacatgtgcgacctgcacacgaaaatcccctttatcaattggccttggagtgacttctttagaactttaatcgccgccatcctgtatttgataacttccatcgtggtcttggtggagcgtgggaatcatagtaaaatcgtcgctggcgtgttggggttgatcgcaacctgtttgttcgggtatgatgcttacgtgaccttccccgtgagacagcctagacatacggcagcccccaccgacccagcagatggtcccgtctag

SEQ ID NO: 130809 - DNA, 438 bp, Artificial Sequence
  derived and/or modified sequence
atggcagacagcgaacggctgagcgctcccggttgctgggccgcatgcacgaattttagtaggactcggaaggggatactcctgttcgcagaaatcatcttgtgtctggtgattctaatttgttttagtgccagcacccctggctattcttcgctatccgtcatcgaaatgattctcgccgctatcttttttgtcgtttacatgtgcgatctgcacacgaaaataccttttattaactggccctggtctgatttcttccgcacactgattgccgcaattctgtatctaatcacatcgatcgtcgtgctggtcgaacgcggaaatcacagtaagatagtggccggtgtgaaggccatgggggcagccctcaaacatagagccaagggactccgctcccaggggccattcctccctctgctgctggctgaaatcgtgtag

SEQ ID NO: 130810 - DNA, 459 bp, Artificial Sequence
  derived and/or modified sequence
atggccgactccgagcgactgagcgcccctggctgctgggctgcatgcaccaatttttcccgcacacgtaagggcatccttctttttgctgaaatcatcctttgtctggtcatactcatctgtttcagtgccagtaccccaggctactcatctctgtcagtgatcgagatgatcctcgctgcaattttcttcgtcgtatacatgtgtgacctgcacaccaagatccctttcatcaattggccgtggtccgatttcttccgaacgctgattgctgctatcctctatctcatcacttctatcgtggtgcttgtggaacgtggcaaccatagtaagatcgtggccggagtcctcggtctgatagccacctgccttttcggttacgacgcctacgtcacctttccagtacgtcaacccagacatacagcagcaccgactgatcctgctgatggccctgtgtag

SEQ ID NO: 130811 - DNA, 620 bp, Artificial Sequence
  derived and/or modified sequence
ctgggtgtacagcgtcctcgaaaccacgagcaagtgagcagatcctccgaggcaccagggactccagcccatgccatggcggattctgagcgcctctcggctcctggctgctgggccgcctgcaccaacttctcgcgcactcgaaagggaatcctcctgtttgctgagattatattatgcctggtgatcctgatctgcttcagtgcctccacaccaggctactcctccctgtcggtgattgagatgatccttgctgctattttctttgttgtctacatgtgtgacctgcacaccaagataccattcatcaactggccctggagtgatttcttccgaaccctcatagcggcaatcctctacctgatcacctccattgttgtccttgttgagagaggaaaccactccaaaatcgtcgcaggggtaaaggccatgggagcagctctgaagcacagagcgaagggtttgaggagccagggaccatttctgcctttgcttctggcagaaatcgtgtgacccacagcaagtcacacttgtcctcagacatggaggaaagtctggcccaggacttggttttgcctcccaaggtcttcatttgctgtgaagggaagtcccttgtcaga

SEQ ID NO: 130812 - DNA, 1079 bp, Artificial Sequence
  derived and/or modified sequence
ctgggtgtacagcgtcctcgaaaccacgagcaagtgagcagatcctccgaggcaccagggactccagcccatgccatggcggattctgagcgcctctcggctcctggctgctgggccgcctgcaccaacttctcgcgcactcgaaagggaatcctcctgtttgctgagattatattatgcctggtgatcctgatctgcttcagtgcctccacaccaggctactcctccctgtcggtgattgagatgatccttgctgctattttctttgttgtctacatgtgtgacctgcacaccaagataccattcatcaactggccctggagtgatttcttccgaaccctcatagcggcaatcctctacctgatcacctccattgttgtccttgttgagagaggaaaccactccaaaatcgtcgcaggggtactgggcctaatcgctacgtgcctctttggctatgatgcctatgtcaccttccccgttcggcagccaagacatacagcagcccccactgaccccgcagatggcccggtgtaggcgaacttccctcatttctctctgcaatctgcaaataactcctccattgaaataactcctccccaccccaacaacaacattcccagcagaccaactcccaccccctctttgaggtaaaagtgcctttattgggagacttttgtcttccagcctgccaatcaaccctcctgggtgtggccaccatatgtgtgtgcctaggtcctccttctgcacgatccaataggagacaccagttctgactgaaccatgcccccacctaagtcacaaaatgagggaagtggggagttagatttcagagtccaggccctaggttgggacccactccaaataatctcctcggtgtgggtggtggttctatagagggataaatgaataataaacattgttaaaatatacgataatgaataaagtaatcctttcatcaaatgtgggtaaatttcaagcatcaggagggggaaatggagtggaaacagctggggcaaggaggcaaagaagccaggcctgttttacaacaaatattaaattacttcaataatacaaacgag

SEQ ID NO: 130813 - DNA, 438 bp, Artificial Sequence
  derived and/or modified sequence
atggccgacagcgagagactgagcgcccccggctgctgggccgcctgcaccaacttcagcagaaccagaaagggcatcctgctgttcgccgagatcatcctgtgcctggtgatcctgatctgcttcagcgccagcacccccggctacagcagcctgagcgtgatcgagatgatcctggccgccatcttcttcgtggtgtacatgtgcgacctgcacaccaagatccccttcatcaactggccctggagcgacttcttcagaaccctgatcgccgccatcctgtacctgatcaccagcatcgtggtgctggtggagagaggcaaccacagcaagatcgtggccggcgtgaaggccatgggcgccgccctgaagcacagagccaagggcctgagaagccagggccccttcctgcccctgctgctggccgagatcgtgtag

SEQ ID NO: 130814 - DNA, 459 bp, Artificial Sequence
  derived and/or modified sequence
atggccgacagcgagagactgagcgcccccggctgctgggccgcctgcaccaacttcagcagaaccagaaagggcatcctgctgttcgccgagatcatcctgtgcctggtgatcctgatctgcttcagcgccagcacccccggctacagcagcctgagcgtgatcgagatgatcctggccgccatcttcttcgtggtgtacatgtgcgacctgcacaccaagatccccttcatcaactggccctggagcgacttcttcagaaccctgatcgccgccatcctgtacctgatcaccagcatcgtggtgctggtggagagaggcaaccacagcaagatcgtggccggcgtgctgggcctgatcgccacctgcctgttcggctacgacgcctacgtgaccttccccgtgagacagcccagacacaccgccgcccccaccgaccccgccgacggccccgtgtag

SEQ ID NO: 130815 - protein, 514 aa, Artificial Sequence
  derived and/or modified sequence
MICEVQKHSVHTLVFRSLKRTHDMFVADNGKPVPLDEESHKRKMAIKLRNEYGPVLHMPTSKENLKEKGPQNATDSYVHKQYPANQGQEVEYFVAGTHPYPPGPGVALTADTKIQRMPSESAAQSLAVALPLQTKADANRTAPSGSEYRHPGASDRPQPTAMNSIVMETGNTKNSALMAKKAPTMPKPQWHPPWKLYRVISGHLGWVRCIAVEPGNQWFVTGSADRTIKIWDLASGKLKLSLTGHISTVRGVIVSTRSPYLFSCGEDKQVKCWDLEYNKVIRHYHGHLSAVYGLDLHPTIDVLVTCSRDSTARIWDVRTKASVHTLSGHTNAVATVRCQAAEPQIITGSHDTTIRLWDLVAGKTRVTLTNHKKSVRAVVLHPRHYTFASGSPDNIKQWKFPDGSFIQNLSGHNAIINTLTVNSDGVLVSGADNGTMHLWDWRTGYNFQRVHAAVQPGSLDSESGIFACAFDQSESRLLTAEADKTIKVYREDDTATEETHPVSWKPEIIKRKRF

SEQ ID NO: 130816 - protein, 514 aa, Artificial Sequence
  derived and/or modified sequence
MVEEVQKHSVHTLVFRSLKRTHDMFVADNGKPVPLDEESHKRKMAIKLRNEYGPVLHMPTSKENLKEKGPQNATDSYVHKQYPANQGQEVEYFVAGTHPYPPGPGVALTADTKIQRMPSESAAQSLAVALPLQTKADANRTAPSGSEYRHPGASDRPQPTAMNSIVMETGNTKNSALMAKKAPTMPKPQWHPPWKLYRVISGHLGWVRCIAVEPGNQWFVTGSADRTIKIWDLASGKLKLSLTGHISTVRGVIVSTRSPYLFSCGEDKQVKCWDLEYNKVIRHYHGHLSAVYGLDLHPTIDVLVTCSRDSTARIWDVRTKASVHTLSGHTNAVATVRCQAAEPQIITGSHDTTIRLWDLVAGKTRVTLTNHKKSVRAVVLHPRHYTFASGSPDNIKQWKFPDGSFIQNLSGHNAIINTLTVNSDGVLVSGADNGTMHLWDWRTGYNFQRVHAAVQPGSLDSESGIFACAFDQSESRLLTAEADKTIKVYREDDTATEETHPVSWKPEIIKRKRF

SEQ ID NO: 130817 - DNA, 1797 bp, Artificial Sequence
  derived and/or modified sequence
ggcgggtactgcgttagtgattagagtttcttccctgccggaggtgggatacacggtagcatcatggtcgaggaggtacagaaacattctgtacacacccttgtgttcaggtcgttgaagaggacccatgacatgtttgtagctgataatggaaaacctgtgcctttagatgaagagagtcacaaacgaaaaatggcaatcaagcttcgtaatgagtatggtcctgtgttgcatatgcctacttcaaaagaaaatcttaaagagaagggtcctcagaatgcaacggattcatatgttcataaacagtaccctgccaatcaaggacaagaagttgaatactttgtggcaggtacacatccatacccaccaggacctggggttgctttgacagcagatactaagatccagagaatgccaagtgaatcagctgcacagtccttagcggtggcattacctttgcagaccaaggctgatgcaaatcgtactgcccctagtggaagtgaataccgacatcctggggcttctgaccgtccacagcctacagcgatgaattcaattgtcatggagactggcaataccaagaactctgcactgatggctaaaaaagcccctacaatgccaaaaccccagtggcacccaccgtggaaactctacagggttatcagtgggcatcttggctgggttcgatgtattgctgtggaacctggaaatcagtggtttgttactggatctgctgacagaactataaagatctgggacttggctagtggcaaattaaaactgtcattgactgggcatattagtactgtgcggggcgtgatagtaagcacaaggagcccatatctgttctcttgtggagaagacaaacaagtgaaatgctgggatctcgaatacaataaggttatacggcattatcatggacatttaagtgcagtgtatggtttggatttgcacccgacaatcgatgtgttggtaacctgtagtcgagattcaactgcacggatttgggatgtgagaactaaagccagtgtacacacattatctggacatacaaatgcagttgctacagtgagatgtcaggctgcagaaccacaaattattacaggaagccatgatactacaattcgattatgggatctggtggctggaaaaacaagagtgacattaacaaatcacaaaaaatcagttagggctgtggttttacatccaagacattacacatttgcatctggttctccagataacataaagcagtggaaattccctgatggaagtttcattcaaaatctttccggtcataatgctattattaacacattgacggtaaattctgatggagtgcttgtatctggagctgacaatggcaccatgcatctttgggactggagaactggctacaattttcagagagttcacgcagctgtgcaacctgggtctttggacagtgaatcaggaatatttgcttgtgcttttgatcagtctgaaagtcgattactaacagctgaagctgataaaaccattaaagtatacagagaggatgacacagccacagaagaaactcatccagtcagctggaaaccagaaattatcaagagaaagagattttaatgaatgtggaattttttctctctctttttttttctttttaattaaaaaaaaaaaagcttggcgttcatgaggatatccagtcattttgtgctctggctgggaatataaaggagaaattcacttgcttcaatcattgctgcttcatattttacaataaactgtcccctgtcccctaaaaaaaaaaaaaaa

SEQ ID NO: 130818 - DNA, 1545 bp, Artificial Sequence
  derived and/or modified sequence
atgatttgtgaagtgcaaaagcacagcgtacatacattagtctttcgctctctaaagcgtacacacgacatgtttgtagcagacaacggaaagcccgtgccactggacgaggagtctcataaacgcaagatggccattaaactgagaaacgagtatggccctgtgctgcatatgccaactagtaaagagaatctcaaagagaaaggtccacaaaacgcaacagatagctatgtacataaacaatatcctgcaaatcagggccaggaggttgaatattttgtggcgggtacccatccctaccctccaggccccggggtcgctctaactgccgataccaagattcaaaggatgccgtctgagtccgctgctcagagtctcgcggtggccctgccactgcagaccaaggctgacgctaatcggacagctccctctggctccgagtaccgacaccctggcgccagcgaccggccacagcccactgccatgaatagcattgttatggagacaggcaacaccaaaaattctgcgcttatggccaagaaggcacccaccatgccaaagccacaatggcacccaccctggaagctatatcgagtgatctccggccaccttgggtgggtgcgatgtattgctgtggaaccaggtaaccagtggttcgtaaccggctcagcggacaggaccatcaaaatatgggatcttgccagtgggaaactgaagttgagcttgacgggccacatctctaccgtgcgcggggtgattgttagcacgcgttccccatacctcttctcatgtggagaggacaaacaggtgaaatgttgggacctcgaatataacaaagtaatacggcattaccacggccacctgtccgccgtgtacgggctggacctgcaccccaccatcgatgtgctggtaacttgtagtcgagacagtacagcaaggatctgggatgtgcgtaccaaagcgagcgtgcacaccctgtccgggcacacaaacgctgtggctactgtcagatgccaggccgctgagccccagatcattactggatcacacgacaccaccatcagactctgggacttggtcgccgggaaaacccgcgtcacactaaccaatcacaagaagagcgttcgggccgtagtgttgcatccacgacattatacatttgcgtctggttccccagataacataaaacagtggaaatttcccgatgggagtttcattcaaaacctgagtggtcacaacgctataatcaatactctgaccgtaaatagcgatggggtgctggtgtccggggctgataacggtacaatgcatttatgggattggcggacagggtacaacttccaacgtgtgcatgctgccgtacagcctggtagtttggactccgagagcggcatctttgcttgcgcatttgatcagtcagagagtcgtctactcactgcagaggccgacaagactatcaaagtgtaccgggaggacgacaccgccaccgaggagacacatcccgtgtcatggaagccagagattataaaacgaaaaaggttctag

SEQ ID NO: 130819 - DNA, 1545 bp, Artificial Sequence
  derived and/or modified sequence
atggttgaagaagtccagaaacactccgtacataccctcgtgtttcggtccctaaaacgcacacatgacatgtttgttgctgataatgggaagcctgtcccactcgatgaggaatcccacaagcggaagatggcgattaaattgagaaatgagtatgggccagtgttacacatgcccacctccaaagagaatttgaaagagaaagggccacagaatgctaccgattcttacgttcataaacagtaccccgccaaccaaggtcaagaggtggagtattttgtggccggaacccatccataccctccaggtcctggagtagcactgacagccgatactaaaattcagagaatgcccagcgagtccgcagcacagagcttggccgtggctttgccactgcaaaccaaagccgatgctaatagaacggcccccagcggcagcgagtatcgacaccccggcgcgagtgaccgtccccagcccaccgctatgaactcaatcgttatggagactggcaacacaaagaattctgccctcatggccaagaaagcccccacaatgccaaaaccacaatggcatcccccttggaagttgtatagggtaataagtggacacctggggtgggttcgctgtatcgcagtggaaccagggaaccaatggttcgtgacaggcagcgccgaccgcaccatcaaaatctgggacctggcctcggggaagctcaagctgtctcttacaggccatatttctaccgtgcgaggagttatcgtaagcacacggtctccatacctcttttcgtgcggcgaggataaacaggtcaaatgttgggacctcgagtacaataaggtcatacggcactatcacggccatctgagcgccgtttacggactcgatctccacccaactattgatgttctcgtcacctgctcccgagactctaccgcccgtatatgggacgtacgtaccaaagctagcgtgcatactctgtctggccatacaaacgcagtggcaaccgtccgctgccaggctgctgagcctcagatcatcacaggttcccacgacacaactataagactctgggaccttgtcgccggcaaaacacgcgtgacattaactaaccataagaagtctgtgagggccgtcgtgctgcatccccgccactacaccttcgccagcggttctcctgacaatattaagcaatggaagttcccggatgggagctttattcagaacctgtccggccacaatgccattattaatacattgactgtgaattctgacggggtcttggtaagcggcgcggacaatgggaccatgcatttgtgggactggagaaccggatacaacttccagcgtgtgcacgctgcagttcaacccgggtcactcgatagcgagagtggcatatttgcctgtgctttcgaccagagtgagagcagattgctgacagctgaagccgacaagacaataaaggtttaccgggaggacgatactgctaccgaagagacccacccagtctcttggaagcctgagatcataaagagaaaacgcttttag

SEQ ID NO: 130820 - DNA, 1545 bp, Artificial Sequence
  derived and/or modified sequence
atgatctgtgaggtgcagaagcacagcgtgcacaccctggtgttccgcagcctgaagaggacccatgacatgtttgtggccgacaatggcaagcctgtgcccctggatgaggagagccacaagaggaagatggccatcaagctgagaaatgaatatggccctgtgctgcacatgcccaccagcaaagaaaacctgaaggagaagggcccccagaatgccacagacagctatgtgcacaagcagtacccagccaaccagggccaggaggtggagtactttgtggccggcacccacccctacccacctggccctggggtggccctgacagctgacaccaagatccagaggatgcccagcgagagcgctgcccagagcctggccgtggccctgcccctgcagaccaaggcagatgccaacagaacagcccccagcggcagcgagtaccgccaccctggggccagtgaccggccccagcccacagccatgaacagcatcgtgatggagactggaaacaccaagaacagcgccctgatggccaagaaggcccccaccatgcccaagccccagtggcaccccccctggaagctgtacagagtcatcagcggccacctgggctgggtgcgctgcatcgctgtggagcccggcaaccagtggtttgtgactggatctgctgacaggaccatcaagatctgggacctggccagcggcaagctgaagctgagcctgaccggccacatcagcacagtgcggggcgtgattgtgtccaccaggagcccctacctgttcagctgtggggaggacaagcaggtgaagtgctgggacctggagtacaacaaggtgatccgccactaccacggccacctgtctgctgtgtatggcctggacctgcaccccaccattgatgtgctggtgacctgcagccgggacagcacagcccgcatctgggatgtgaggaccaaggcctctgtgcacaccctgagcggccacaccaatgctgtggccaccgtgcgctgccaggccgctgagccccagatcatcaccggcagccatgacaccaccatccggctgtgggacctggtggccggcaagaccagggtgaccctgaccaaccacaagaagtctgtgcgggctgtggtgctgcaccccaggcactacacctttgccagcggcagcccagacaacatcaagcagtggaagttcccagatggcagcttcatccagaacctgagcggccacaatgccatcatcaacaccctgactgtgaacagtgatggagtgctggtgtctggagctgacaatggcaccatgcacctgtgggactggaggacaggctacaacttccagagggtgcacgccgctgtgcagcccggcagcctggacagcgagagcggcatctttgcctgtgcctttgaccagagcgagagccggctgctgacagctgaggccgacaagaccatcaaggtgtacagagaagatgacacagccacagaggagacccaccctgtgtcctggaagccagagatcatcaagaggaagcgcttctag

SEQ ID NO: 130821 - DNA, 1545 bp, Artificial Sequence
  derived and/or modified sequence
atggtggaggaggtgcagaagcacagcgtgcacaccctggtgttccgcagcctgaagaggacccatgacatgtttgtggccgacaatggcaagcctgtgcccctggatgaggagagccacaagaggaagatggccatcaagctgagaaatgaatatggccctgtgctgcacatgcccaccagcaaagaaaacctgaaggagaagggcccccagaatgccacagacagctatgtgcacaagcagtacccagccaaccagggccaggaggtggagtactttgtggccggcacccacccctacccacctggccctggggtggccctgacagctgacaccaagatccagaggatgcccagcgagagcgctgcccagagcctggccgtggccctgcccctgcagaccaaggcagatgccaacagaacagcccccagcggcagcgagtaccgccaccctggggccagtgaccggccccagcccacagccatgaacagcatcgtgatggagactggaaacaccaagaacagcgccctgatggccaagaaggcccccaccatgcccaagccccagtggcaccccccctggaagctgtacagagtcatcagcggccacctgggctgggtgcgctgcatcgctgtggagcccggcaaccagtggtttgtgactggatctgctgacaggaccatcaagatctgggacctggccagcggcaagctgaagctgagcctgaccggccacatcagcacagtgcggggcgtgattgtgtccaccaggagcccctacctgttcagctgtggggaggacaagcaggtgaagtgctgggacctggagtacaacaaggtgatccgccactaccacggccacctgtctgctgtgtatggcctggacctgcaccccaccattgatgtgctggtgacctgcagccgggacagcacagcccgcatctgggatgtgaggaccaaggcctctgtgcacaccctgagcggccacaccaatgctgtggccaccgtgcgctgccaggccgctgagccccagatcatcaccggcagccatgacaccaccatccggctgtgggacctggtggccggcaagaccagggtgaccctgaccaaccacaagaagtctgtgcgggctgtggtgctgcaccccaggcactacacctttgccagcggcagcccagacaacatcaagcagtggaagttcccagatggcagcttcatccagaacctgagcggccacaatgccatcatcaacaccctgactgtgaacagtgatggagtgctggtgtctggagctgacaatggcaccatgcacctgtgggactggaggacaggctacaacttccagagggtgcacgccgctgtgcagcccggcagcctggacagcgagagcggcatctttgcctgtgcctttgaccagagcgagagccggctgctgacagctgaggccgacaagaccatcaaggtgtacagagaagatgacacagccacagaggagacccaccctgtgtcctggaagccagagatcatcaagaggaagcgcttctag

SEQ ID NO: 130822 - DNA, 1545 bp, Artificial Sequence
  derived and/or modified sequence
atgatctgcgaggtgcagaagcacagcgtgcacaccctggtgttcagatcactgaagaggacccatgatatgtttgtggcggacaacgggaagccagtgcctctcgacgaggagtctcacaagcgcaagatggccataaagctccgaaatgagtatggccctgtgctgcatatgcccacttctaaggaaaacttaaaggagaagggaccgcagaatgccactgactcctacgtacataaacagtatcccgccaatcagggccaagaggtggaatactttgtggccgggacccatccttacccaccaggcccaggggtggctttgaccgctgacaccaagatccagcggatgccttccgagtctgccgcacagagccttgcagtcgccttgcccctgcagaccaaggctgacgcgaatcgaactgctcctagcggctccgagtacaggcatcccggagcaagcgacaggccacaaccaactgccatgaattccatcgtgatggagactggaaatactaagaactcagccttgatggccaaaaaagccccaactatgccaaagccccaatggcaccctccctggaagctgtatcgggttatcagcggccacctaggatgggtccggtgtatagccgtcgaaccgggcaaccagtggtttgtcactggttccgccgacaggactataaaaatctgggatctggccagtggtaaactcaagttatctctgactggccacatctctactgtgcgaggcgtgatcgtgtcaacgcggtctccctacctattttcatgtggtgaggacaaacaggtcaagtgctgggatctcgaatataataaggttattcgccactatcatggacatctgtctgccgtctacggtctggatctgcaccccactattgatgtcctcgtgacttgctctcgggactctactgcacgaatttgggatgtacggacgaaggcctctgtccatacgctgtctggacacactaatgctgtggcaacagtacggtgccaggctgccgagccccagataattactggctcccacgacactaccatccggctgtgggatttggtagcaggaaagacaagggtgactttaaccaatcacaaaaaaagcgtgagagctgttgtgcttcatccacgccactacactttcgcatcaggctctcccgacaacatcaaacaatggaagttccctgatggtagcttcattcagaacctcagtggacacaatgctataatcaacacgctcactgtgaacagcgacggcgtactcgtgagcggcgccgataacggcaccatgcatctgtgggattggcgcaccggctataattttcagagagtccatgccgcagtacaacccggctccctggacagtgagagtggaatattcgcttgcgcattcgaccagtccgaaagtaggttgctcactgctgaggcggacaagactatcaaggtttatcgggaggatgacacagccacagaagaaacacatcccgtctcttggaaacccgaaatcatcaagcgcaaaaggttctag

SEQ ID NO: 130823 - DNA, 1545 bp, Artificial Sequence
  derived and/or modified sequence
atggtggaggaggtgcagaagcacagcgtgcacaccctggtgttccgcagtctaaagcggacccacgacatgtttgttgctgataacggcaaaccggtgccactggatgaggagtcacacaagcgtaagatggctatcaagttgaggaacgaatacggtcctgtattgcacatgccaacgagcaaggaaaacttgaaagaaaaggggccacagaacgcaacagactcttacgtacataaacaatacccggccaaccagggtcaggaagtggagtactttgttgccggaacccatccgtaccctcccggtcctggagtggcgctgacagccgacaccaaaattcagcggatgccatccgaatctgctgctcagtcactggccgtggctctgcctttacagacaaaggccgatgcaaacaggaccgcacccagcggctctgagtacaggcaccctggagcgtcagacagaccccagcctactgctatgaacagcatcgtcatggagacaggcaacacaaaaaatagcgccttaatggccaagaaggccccaaccatgccaaagcctcagtggcatccaccctggaaattatacagagtgataagtggtcatttgggatgggtgcgctgtatcgcagttgagccaggaaatcagtggtttgtgaccggctctgcggatcgcacgattaagatatgggacctcgccagcggtaaactgaagctgtctctgacaggacacatctctaccgttaggggcgttattgtgagcacacgatctccatacctgtttagctgtggtgaggataagcaagtgaagtgctgggacctggaatataacaaggtcatccggcattaccacggccatctatctgctgtctatggcttagatttacaccccacaattgatgtgctggtcacctgttccagagattccactgctcgaatctgggacgtgaggacaaaggcttcggttcacaccctctctgggcataccaatgccgtggcaacagtgagatgtcaggccgccgagccccagatcataacagggagtcatgataccaccataaggttatgggatctggtcgccgggaaaacccgtgtaacactgaccaatcacaaaaagagtgtcagggccgtggttctccatccaaggcactatacatttgcttcaggctcacccgataatatcaaacagtggaaattcccagacgggtccttcatccaaaacctctcgggtcacaatgcaatcattaatacactcaccgttaacagtgacggcgttctggtttccggcgctgacaacggcacaatgcacttgtgggattggaggacaggatacaactttcagagggttcacgctgccgttcagcctgggagcctggatagcgaaagtgggatcttcgcctgcgcctttgatcagagcgagtcccggctgcttactgccgaagctgacaaaacgattaaagtctaccgggaggatgacacggctaccgaggaaacccaccctgtctcttggaagcctgaaattattaagagaaaacgattctag

SEQ ID NO: 130824 - DNA, 1719 bp, Artificial Sequence
  derived and/or modified sequence
atgatttgtgaggtacagaaacattctgtacacacccttgtgttcaggtcgttgaagaggacccatgacatgtttgtagctgataatggaaaacctgtgcctttagatgaagagagtcacaaacgaaaaatggcaatcaagcttcgtaatgagtatggtcctgtgttgcatatgcctacttcaaaagaaaatcttaaagagaagggtcctcagaatgcaacggattcatatgttcataaacagtaccctgccaatcaaggacaagaagttgaatactttgtggcaggtacacatccatacccaccaggacctggggttgctttgacagcagatactaagatccagagaatgccaagtgaatcagctgcacagtccttagcggtggcattacctttgcagaccaaggctgatgcaaatcgtactgcccctagtggaagtgaataccgacatcctggggcttctgaccgtccacagcctacagcgatgaattcaattgtcatggagactggcaataccaagaactctgcactgatggctaaaaaagcccctacaatgccaaaaccccagtggcacccaccgtggaaactctacagggttatcagtgggcatcttggctgggttcgatgtattgctgtggaacctggaaatcagtggtttgttactggatctgctgacagaactataaagatctgggacttggctagtggcaaattaaaactgtcattgactgggcatattagtactgtgcggggcgtgatagtaagcacaaggagcccatatctgttctcttgtggagaagacaaacaagtgaaatgctgggatctcgaatacaataaggttatacggcattatcatggacatttaagtgcagtgtatggtttggatttgcacccgacaatcgatgtgttggtaacctgtagtcgagattcaactgcacggatttgggatgtgagaactaaagccagtgtacacacattatctggacatacaaatgcagttgctacagtgagatgtcaggctgcagaaccacaaattattacaggaagccatgatactacaattcgattatgggatctggtggctggaaaaacaagagtgacattaacaaatcacaaaaaatcagttagggctgtggttttacatccaagacattacacatttgcatctggttctccagataacataaagcagtggaaattccctgatggaagtttcattcaaaatctttccggtcataatgctattattaacacattgacggtaaattctgatggagtgcttgtatctggagctgacaatggcaccatgcatctttgggactggagaactggctacaattttcagagagttcacgcagctgtgcaacctgggtctttggacagtgaatcaggaatatttgcttgtgcttttgatcagtctgaaagtcgattactaacagctgaagctgataaaaccattaaagtatacagagaggatgacacagccacagaagaaactcatccagtcagctggaaaccagaaattatcaagagaaagagattttaatgaatgtggaattttttctctctctttttttttctttttaattaaaaaaaaaaaagcttggcgttcatgaggatatccagtcattttgtgctctggctgggaatataaaggagaaattcacttgcttcaatcattgctgcttcatattttacaataaactgtcccctgtcccct

SEQ ID NO: 130825 - DNA, 3351 bp, Artificial Sequence
  derived and/or modified sequence
gcagagcttgcatcacatccgccgcctgggcgcccaattccggaaggtgctgcacagctgtggcggcgggtactgcgttagtgattagagtttcttccctgccggaggtgggatacacggtagcatcatggtcgaggaggtacagaaacattctgtacacacccttgtgttcaggtcgttgaagaggacccatgacatgtttgtagctgataatggaaaacctgtgcctttagatgaagagagtcacaaacgaaaaatggcaatcaagcttcgtaatgagtatggtcctgtgttgcatatgcctacttcaaaagaaaatcttaaagagaagggtcctcagaatgcaacggattcatatgttcataaacagtaccctgccaatcaaggacaagaagttgaatactttgtggcaggtacacatccatacccaccaggacctggggttgctttgacagcagatactaagatccagagaatgccaagtgaatcagctgcacagtccttagcggtggcattacctttgcagaccaaggctgatgcaaatcgtactgcccctagtggaagtgaataccgacatcctggggcttctgaccgtccacagcctacagcgatgaattcaattgtcatggagactggcaataccaagaactctgcactgatggctaaaaaagcccctacaatgccaaaaccccagtggcacccaccgtggaaactctacagggttatcagtgggcatcttggctgggttcgatgtattgctgtggaacctggaaatcagtggtttgttactggatctgctgacagaactataaagatctgggacttggctagtggcaaattaaaactgtcattgactgggcatattagtactgtgcggggcgtgatagtaagcacaaggagcccatatctgttctcttgtggagaagacaaacaagtgaaatgctgggatctcgaatacaataaggttatacggcattatcatggacatttaagtgcagtgtatggtttggatttgcacccgacaatcgatgtgttggtaacctgtagtcgagattcaactgcacggatttgggatgtgagaactaaagccagtgtacacacattatctggacatacaaatgcagttgctacagtgagatgtcaggctgcagaaccacaaattattacaggaagccatgatactacaattcgattatgggatctggtggctggaaaaacaagagtgacattaacaaatcacaaaaaatcagttagggctgtggttttacatccaagacattacacatttgcatctggttctccagataacataaagcagtggaaattccctgatggaagtttcattcaaaatctttccggtcataatgctattattaacacattgacggtaaattctgatggagtgcttgtatctggagctgacaatggcaccatgcatctttgggactggagaactggctacaattttcagagagttcacgcagctgtgcaacctgggtctttggacagtgaatcaggaatatttgcttgtgcttttgatcagtctgaaagtcgattactaacagctgaagctgataaaaccattaaagtatacagagaggatgacacagccacagaagaaactcatccagtcagctggaaaccagaaattatcaagagaaagagattttaatgaatgtggaattttttctctctctttttttttctttttaattaaaaaaaaaaaagcttggcgttcatgaggatatccagtcattttgtgctctggctgggaatataaaggagaaattcacttgcttcaatcattgctgcttcatattttacaataaactgtcccctgtcccctacccctgtgtttttatttctaaaacaatttgtgatactaggaagatgcagatatcaagtaaatgcaggtttattgaacataactattctagatgtaatattttgacagtcttattagaaaacccccttttttaaaaaaaatgtatgaaaccgataattaggacatttgaaggagcagtagtttttttttagtcctttaaaaaataacatctgtgactaataatttgagattaaaagatttgaagtcttaatttatgtatgtttattccaaaaacagtttttgagtgtatgttctacaaagttctgcactagatactgttcaggaaatagacaagtaagatgtgtctatcctctaagacttccagtttggtagcttagtatagaaattctgtaacagaggtgcaggtgaaatgctgggggaacagaagggataagaccatttatttttctcaggaaggattgtggaagacttcatagagtaagtggcattggagattaccttgaagtgaaggaagacaaagaaggaaaagagatgaggcataaagtgatgaaaccaggcacaagaaagtgtgcggtgtgttctgggacaaagaatgttctgctactgtcgaataatgggactaaagctggcttgttctggggaaagctcatataagtatggattttattcctcaactagtaggataccaatactggtattgaaacttggggaaaataactggagataccagtgcagctatttaaagctgtagcaagggctgcaatcttgcggagattttaaagagaagttttaaagtttctaatactgatgcctctttttggtaaatacaagttttataaatcctgccctgggatcctgattccccattaatcaagatttgtcagacttcaccttctataattagaaaacacagttataagaacagtcaattttttaaattttccaaattaaaaaattgcaccatgattttgaacaagcacttccaattacattacccatcttgtatgccataggtgggagtataattgtcacagcctttaggaatgtagttttctgggatttattgaaactttgaaccttttggcctactaagttcattcctaggaaactgcctaatgggaatgatctgacaagtgtacacaagcaaagtcattgcacctttgttctttaatacttaaaactagcccaaatgccctgtcagtaagggactggtttaatagatggtacctttatgcaatttgtttctaagtattcgttaagagagtgaggaatgtctggattattagggcaagatttctaaacttgggtaaaaaaaaaagttgtgcaagcatttttgtggacaacttgatgctctaaaatataagtaacaccacattactaacagtggctttgttaggaagcagaattatggaagaactttcatgggtggctttacatatttctataatgttttaattttctataagcatgtatttcgtaaacttaaataaagaaaaaagaacact

SEQ ID NO: 130826 - DNA, 1545 bp, Artificial Sequence
  derived and/or modified sequence
atgatctgcgaggtacagaagcattctgttcacactctagtgttccgcagcctcaagcgtacccatgatatgtttgtagcggataatgggaagccagtgcctctggacgaagagagtcacaagcgcaagatggcaatcaaactgaggaacgaatacgggccagtactgcacatgcctacatcaaaggagaatctgaaagagaaagggcctcaaaatgccaccgatagttacgtacataagcaatatccagccaaccaggggcaagaagtcgagtattttgtcgctggaacacacccataccccccaggtcccggtgtcgctctgacagctgacaccaagatacagagaatgccgtccgagtctgccgcacagtcattggcggtggcactgcctcttcaaactaaagccgatgccaataggaccgccccttcgggcagtgagtacagacacccaggagcatcagaccggccacagccaactgcaatgaactccatcgtgatggagacagggaacacaaaaaatagtgccctcatggcgaagaaagctcccaccatgcctaaaccacagtggcaccctccctggaaactgtatcgggtgattagcggacatctgggatgggtccgctgcatagctgtggagccgggaaaccaatggttcgtgacaggttctgccgaccggacaatcaagatttgggacctggcaagtgggaaattgaaattatctttaaccggccacatctccactgtgcggggagtgattgtctcaacacgatctccctatctcttttcctgcggcgaagacaaacaggtgaaatgctgggatttggagtataataaggttatccggcattatcatggtcacttaagcgctgtgtatggcttggatctccatccgaccatcgacgtgttggttacttgtagtcgcgatagcactgctcggatctgggatgtcagaactaaggctagcgtgcacaccctttctggacataccaacgcggttgcgaccgtacgatgccaggccgcagaaccgcaaatcatcactggcagtcacgacaccaccattagactgtgggatctcgtcgctggaaagacacgagtaaccttaaccaaccataagaaaagcgtgagagccgtggtgctccatcctcgacattacacctttgcttctggcagccctgataatatcaagcagtggaagttccctgatggctcttttattcagaatctctccggccacaacgctattatcaataccctcacagttaattcagatggggtcctcgtatcgggcgctgacaacgggacaatgcatttgtgggactggcgaacaggatataattttcagcgtgttcacgccgctgttcaacctggcagcctggatagcgaatccggcattttcgcctgcgcgtttgaccagtccgagagcaggctgctaaccgccgaggccgataagaccattaaagtgtatcgcgaggatgacaccgccaccgaggagacacacccagtttcctggaagccagagatcattaaacggaaacgtttttag

SEQ ID NO: 130827 - DNA, 1545 bp, Artificial Sequence
  derived and/or modified sequence
atggttgaagaagtgcagaaacactccgttcacactcttgtttttcgttctctcaaaaggacccacgatatgttcgttgccgacaatgggaagcccgtgccactcgatgaagagagtcataagcgcaagatggcaattaaactcagaaacgagtacggtcctgtcctacacatgcctacctcaaaggaaaatctgaaggagaaggggccacagaatgcaacagactcctatgtacacaaacagtatccagccaatcaagggcaagaagttgagtacttcgtggccggaacccacccatacccaccgggacctggtgtggcactgaccgctgataccaagatccagaggatgccctcagagtccgcagcacagagcctagccgtggccttgccactccagacaaaggctgacgctaaccgaacggcaccatccggatccgaatatcggcatcctggcgcatccgaccgccctcagccaacagcaatgaacagcattgtgatggagactggaaacacaaaaaactctgctctgatggctaaaaaggccccaaccatgcctaagcctcagtggcatccgccatggaagctgtacagagttatcagtgggcacctagggtgggttcgatgtatagccgtcgagcctggtaatcagtggttcgtcaccggcagcgcagacagaacaattaagatctgggacctggcttctggaaagctgaaattgagtctgacgggccacatcagcacagtgcgaggagtcattgtcagcacaagaagcccttatctgttctcttgtggtgaagataagcaggtcaaatgctgggatttagaatataataaggttattcggcactaccatggccatttgtctgccgtgtacggattggatctccatccaacaatcgatgtcttagtgacctgcagtagggattcaacagcacgtatctgggacgtgcgcactaaagcctctgtacacactctgtctggtcatacaaatgcagtggcgaccgtgagatgccaggctgccgagccccagatcattaccggaagccatgacactacaatacggctgtgggacctcgtggccggtaaaacaagggtgacattaacgaaccataagaagagtgtgcgggcagtggtgctccacccacgacattacacatttgcgtctggtagcccagataacattaaacagtggaagtttccagacggctccttcatccaaaacctgagcggacacaatgccattatcaacacactaaccgtaaactctgacggcgtgctggtttccggcgctgacaatggaactatgcacttgtgggattggagaaccggatacaacttccagagagttcacgccgcagtgcagccaggatccctggatagcgaatcaggaatttttgcatgtgccttcgaccagtccgaatcgagactgctcaccgccgaagccgacaaaactattaaggtataccgagaggacgacaccgcgaccgaagagacacatcctgtgagttggaagccggagatcattaagagaaaaagattttag

SEQ ID NO: 130828 - DNA, 1545 bp, Artificial Sequence
  derived and/or modified sequence
atgatctgcgaggtgcagaagcacagcgtgcacaccctggtgttcagaagcctgaagagaacccacgacatgttcgtggccgacaacggcaagcccgtgcccctggacgaggagagccacaagagaaagatggccatcaagctgagaaacgagtacggccccgtgctgcacatgcccaccagcaaggagaacctgaaggagaagggcccccagaacgccaccgacagctacgtgcacaagcagtaccccgccaaccagggccaggaggtggagtacttcgtggccggcacccacccctacccccccggccccggcgtggccctgaccgccgacaccaagatccagagaatgcccagcgagagcgccgcccagagcctggccgtggccctgcccctgcagaccaaggccgacgccaacagaaccgcccccagcggcagcgagtacagacaccccggcgccagcgacagaccccagcccaccgccatgaacagcatcgtgatggagaccggcaacaccaagaacagcgccctgatggccaagaaggcccccaccatgcccaagccccagtggcaccccccctggaagctgtacagagtgatcagcggccacctgggctgggtgagatgcatcgccgtggagcccggcaaccagtggttcgtgaccggcagcgccgacagaaccatcaagatctgggacctggccagcggcaagctgaagctgagcctgaccggccacatcagcaccgtgagaggcgtgatcgtgagcaccagaagcccctacctgttcagctgcggcgaggacaagcaggtgaagtgctgggacctggagtacaacaaggtgatcagacactaccacggccacctgagcgccgtgtacggcctggacctgcaccccaccatcgacgtgctggtgacctgcagcagagacagcaccgccagaatctgggacgtgagaaccaaggccagcgtgcacaccctgagcggccacaccaacgccgtggccaccgtgagatgccaggccgccgagccccagatcatcaccggcagccacgacaccaccatcagactgtgggacctggtggccggcaagaccagagtgaccctgaccaaccacaagaagagcgtgagagccgtggtgctgcaccccagacactacaccttcgccagcggcagccccgacaacatcaagcagtggaagttccccgacggcagcttcatccagaacctgagcggccacaacgccatcatcaacaccctgaccgtgaacagcgacggcgtgctggtgagcggcgccgacaacggcaccatgcacctgtgggactggagaaccggctacaacttccagagagtgcacgccgccgtgcagcccggcagcctggacagcgagagcggcatcttcgcctgcgccttcgaccagagcgagagcagactgctgaccgccgaggccgacaagaccatcaaggtgtacagagaggacgacaccgccaccgaggagacccaccccgtgagctggaagcccgagatcatcaagagaaagagattctag

SEQ ID NO: 130829 - DNA, 1545 bp, Artificial Sequence
  derived and/or modified sequence
atggtggaggaggtgcagaagcacagcgtgcacaccctggtgttcagaagcctgaagagaacccacgacatgttcgtggccgacaacggcaagcccgtgcccctggacgaggagagccacaagagaaagatggccatcaagctgagaaacgagtacggccccgtgctgcacatgcccaccagcaaggagaacctgaaggagaagggcccccagaacgccaccgacagctacgtgcacaagcagtaccccgccaaccagggccaggaggtggagtacttcgtggccggcacccacccctacccccccggccccggcgtggccctgaccgccgacaccaagatccagagaatgcccagcgagagcgccgcccagagcctggccgtggccctgcccctgcagaccaaggccgacgccaacagaaccgcccccagcggcagcgagtacagacaccccggcgccagcgacagaccccagcccaccgccatgaacagcatcgtgatggagaccggcaacaccaagaacagcgccctgatggccaagaaggcccccaccatgcccaagccccagtggcaccccccctggaagctgtacagagtgatcagcggccacctgggctgggtgagatgcatcgccgtggagcccggcaaccagtggttcgtgaccggcagcgccgacagaaccatcaagatctgggacctggccagcggcaagctgaagctgagcctgaccggccacatcagcaccgtgagaggcgtgatcgtgagcaccagaagcccctacctgttcagctgcggcgaggacaagcaggtgaagtgctgggacctggagtacaacaaggtgatcagacactaccacggccacctgagcgccgtgtacggcctggacctgcaccccaccatcgacgtgctggtgacctgcagcagagacagcaccgccagaatctgggacgtgagaaccaaggccagcgtgcacaccctgagcggccacaccaacgccgtggccaccgtgagatgccaggccgccgagccccagatcatcaccggcagccacgacaccaccatcagactgtgggacctggtggccggcaagaccagagtgaccctgaccaaccacaagaagagcgtgagagccgtggtgctgcaccccagacactacaccttcgccagcggcagccccgacaacatcaagcagtggaagttccccgacggcagcttcatccagaacctgagcggccacaacgccatcatcaacaccctgaccgtgaacagcgacggcgtgctggtgagcggcgccgacaacggcaccatgcacctgtgggactggagaaccggctacaacttccagagagtgcacgccgccgtgcagcccggcagcctggacagcgagagcggcatcttcgcctgcgccttcgaccagagcgagagcagactgctgaccgccgaggccgacaagaccatcaaggtgtacagagaggacgacaccgccaccgaggagacccaccccgtgagctggaagcccgagatcatcaagagaaagagattctag

SEQ ID NO: 130830 - protein, 165 aa, Artificial Sequence
  derived and/or modified sequence
MAKMNLSSYILILTFSLFSQGILLSASKSIRNLDDDMVFNTFRLGKGFQKEDTAEKSVIAPSLEQYKNDESSFMNEEENKVSKNTGSKHNFLNHGLPLNLAIKPYLALKGSVAFPAENGVQNTESTQEKREIGDEENSAKFPIGRRDFDMLRCMLGRVYRPCWQV

SEQ ID NO: 130831 - DNA, 498 bp, Artificial Sequence
  derived and/or modified sequence
atggcgaagatgaatcttagctcctacatcttgatcctgacctttagtctgttctcacaaggaattctcctgtccgcttccaagagcatcaggaacctcgacgatgatatggttttcaacaccttccgtctcgggaaaggcttccagaaggaggatacagcggagaaatcagttattgcacctagcctggaacaatacaaaaatgacgagtcgagcttcatgaacgaggaagaaaacaaggtgtccaaaaataccggctccaagcacaatttcctgaatcatggcctgcccctgaacctggcaattaagccttacctggccttgaagggatcggtagcatttcctgctgagaacggcgtccagaacacagaatccacccaagagaagcgcgaaataggcgatgaagaaaacagcgccaagtttccaatcgggcgcagggattttgacatgttgcggtgtatgctgggacgcgtatacaggccttgctggcaggtgtag

SEQ ID NO: 130832 - DNA, 498 bp, Artificial Sequence
  derived and/or modified sequence
atggccaagatgaacctgagcagctacatcctgatcctgaccttcagcctcttcagccagggcatcctgctgagcgccagcaagagcatccggaacctggatgatgacatggtgttcaacaccttccggctgggcaagggcttccagaaggaggacacagctgagaagtctgtgattgcccccagcctggagcagtacaagaatgatgagagcagcttcatgaatgaggaggagaacaaggtgtccaagaacacaggcagcaagcacaacttcctgaaccacggcctgcccctgaacctggccatcaagccctacctggccctgaagggctctgtggccttcccagcagaaaatggagtgcagaacacagagagcacccaggagaagcgggagattggagatgaggagaacagcgccaagttccccatcggcagaagagactttgacatgctgcgctgcatgctgggccgggtgtaccggccctgctggcaggtgtag

SEQ ID NO: 130833 - DNA, 498 bp, Artificial Sequence
  derived and/or modified sequence
atggccaagatgaacctgagcagctacatcctgatcctgaccttcagcctattcagccagggtattcttcttagcgcctcgaagtctatacggaacctggatgatgatatggtctttaatacctttcgactaggaaaggggtttcagaaggaagataccgcagagaaatctgtgatcgctcctagcctggagcagtataaaaacgacgagtcatcattcatgaatgaagaggaaaacaaggtgtccaagaacacaggctctaagcataattttctgaatcatggtctccccttgaacctggctattaagccttacctcgcccttaaaggttcggtggccttcccagccgaaaacggggtgcagaacacagaaagcacccaggagaagcgtgagatcggcgacgaggagaactccgcaaaattccctatcggtcggagggactttgacatgctgcgctgtatgcttggtagggtgtatagaccctgctggcaagtttag

SEQ ID NO: 130834 - DNA, 498 bp, Artificial Sequence
  derived and/or modified sequence
atggccaaaatgaacctgtctagctacatcctgattttgaccttttccctttttagccagggcatcctgctcagcgcttccaaatcaatcaggaacctggatgatgacatggtcttcaacaccttcaggttaggaaagggcttccagaaggaggataccgctgaaaagtccgtaatcgctccctcacttgagcaatacaagaatgatgagtcttcgttcatgaatgaggaggagaacaaggttagcaagaacacgggctccaagcacaacttcctcaatcatgggctacctctgaatttggctatcaagccttatctagccttgaaaggttcagtcgctttcccggctgagaatggagttcaaaataccgagtcaacccaggagaagagagagattggagatgaggagaacagtgccaagtttccaatcggacgcagggattttgatatgcttaggtgtatgctgggcagagtctaccggccatgctggcaggtgtag

SEQ ID NO: 130835 - DNA, 766 bp, Artificial Sequence
  derived and/or modified sequence
cgtttaccaagcaggctgacagagaaatttttcattttctttcttgtttgactgtatgcaaacatcaaactaagaatggcaaaaatgaatctctcttcctatatattaatactaactttttctttgttttctcaaggtattttactttcagcatccaagtccataagaaatttagatgatgacatggtatttaatacattcaggttggggaaaggctttcagaaggaagacactgcagaaaaatcagttattgctccttccctggaacaatataaaaatgatgagagcagtttcatgaacgaagaggaaaataaagtttcaaagaacacaggctccaaacataatttcttaaatcatggtctgccactgaatctggctataaaaccttatcttgcactaaaaggatctgtagctttcccagctgagaatggagttcagaatactgaatcaacacaagaaaagagagaaattggggatgaagaaaactcagctaaatttcctataggaaggagagattttgacatgctcagatgtatgctgggaagagtctaccgaccttgttggcaagtctgatacctgttggtccacatcatcttttcagaagaaaataaaagcatttaattgccaatgggaggagaagcccatactgctactataacttgtgtatgttaaatgtctgttttaaaagaaagtagtgttaagatgtatcagtaactgaaatgatatgctttctctgtgcattaaactttgtgaaaattctgcataa

SEQ ID NO: 130836 - DNA, 498 bp, Artificial Sequence
  derived and/or modified sequence
atggccaagatgaacctgagcagctacatcctgatcctgaccttcagcctgttcagccagggcatcctgctgagcgccagcaagagcatcagaaacctggacgacgacatggtgttcaacaccttcagactgggcaagggcttccagaaggaggacaccgccgagaagagcgtgatcgcccccagcctggagcagtacaagaacgacgagagcagcttcatgaacgaggaggagaacaaggtgagcaagaacaccggcagcaagcacaacttcctgaaccacggcctgcccctgaacctggccatcaagccctacctggccctgaagggcagcgtggccttccccgccgagaacggcgtgcagaacaccgagagcacccaggagaagagagagatcggcgacgaggagaacagcgccaagttccccatcggcagaagagacttcgacatgctgagatgcatgctgggcagagtgtacagaccctgctggcaggtgtag

SEQ ID NO: 130837 - protein, 633 aa, Artificial Sequence
  derived and/or modified sequence
MEPAPARSPRPQQDPARPQEPTMPPPETPSEGRQPSPSPSPTERAPASEEEFQFLRCQQCQAEAKCPKLLPCLHTLCSGCLEASGMQCPICQAPWPLGADTPALDNVFFESLQRRLSVYRQIVDAQAVCTRCKESADFWCFECEQLLCAKCFEAHQWFLKHEARPLAELRNQSVREFLDGTRKTNNIFCSNPNHRTPTLTSIYCRGCSKPLCCSCALLDSSHSELKCDISAEIQQRQEELDAMTQALQEQDSAFGAVHAQMHAAVGQLGRARAETEELIRERVRQVVAHVRAQERELLEAVDARYQRDYEEMASRLGRLDAVLQRIRTGSALVQRMKCYASDQEVLDMHGFLRQALCRLRQEEPQSLQAAVRTDGFDEFKVRLQDLSSCITQGKDAAVSKKASPEAASTPRDPIDVDLPEEAERVKAQVQALGLAEAQPMAVVQSVPGAHPVPVYAFSIKGPSYGEDVSNTTTAQKRKCSQTQCPRKVIKMESEEGKEARLARSSPEQPRPSTSKAVSPPHLDGPPSPRSPVIGSEVFLPNSNHVASGAGEAEERVVVISSSEDSDAENSSSRELDDSSSESSDLQLEGPSTLRVLDENLADPQAEDRPLVFFDLKIDNESGFSWGYPHPFLI

SEQ ID NO: 130838 - DNA, 2254 bp, Artificial Sequence
  derived and/or modified sequence
ctctccagaggcgggccctgagccggcacctcccctttcggacagctcaagggactcagccaactggctcacgcctccccttcagcttctcttcacgcactccaagatctaaaccgagaatcgaaactaagctggggtccatggagcctgcacccgcccgatctccgaggccccagcaggaccccgcccggccccaggagcccaccatgcctccccccgagaccccctctgaaggccgccagcccagccccagccccagccctacagagcgagcccccgcttcggaggaggagttccagtttctgcgctgccagcaatgccaggcggaagccaagtgcccgaagctgctgccttgtctgcacacgctgtgctcaggatgcctggaggcgtcgggcatgcagtgccccatctgccaggcgccctggcccctaggtgcagacacacccgccctggataacgtctttttcgagagtctgcagcggcgcctgtcggtgtaccggcagattgtggatgcgcaggctgtgtgcacccgctgcaaagagtcggccgacttctggtgctttgagtgcgagcagctcctctgcgccaagtgcttcgaggcacaccagtggttcctcaagcacgaggcccggcccctagcagagctgcgcaaccagtcggtgcgtgagttcctggacggcacccgcaagaccaacaacatcttctgctccaaccccaaccaccgcacccctacgctgaccagcatctactgccgaggatgttccaagccgctgtgctgctcgtgcgcgctccttgacagcagccacagtgagctcaagtgcgacatcagcgcagagatccagcagcgacaggaggagctggacgccatgacgcaggcgctgcaggagcaggatagtgcctttggcgcggttcacgcgcagatgcacgcggccgtcggccagctgggccgcgcgcgtgccgagaccgaggagctgatccgcgagcgcgtgcgccaggtggtagctcacgtgcgggctcaggagcgcgagctgctggaggctgtggacgcgcggtaccagcgcgactacgaggagatggccagtcggctgggccgcctggatgctgtgctgcagcgcatccgcacgggcagcgcgctggtgcagaggatgaagtgctacgcctcggaccaggaggtgctggacatgcacggtttcctgcgccaggcgctctgccgcctgcgccaggaggagccccagagcctgcaagctgccgtgcgcaccgatggcttcgacgagttcaaggtgcgcctgcaggacctcagctcttgcatcacccaggggaaagatgcagctgtatccaagaaagccagcccagaggctgccagcactcccagggaccctattgacgttgacctgcccgaggaggcagagagagtgaaggcccaggttcaggccctggggctggctgaagcccagcctatggctgtggtacagtcagtgcccggggcacaccccgtgccagtgtacgccttctccatcaaaggcccttcctatggagaggatgtctccaatacaacgacagcccagaagaggaagtgcagccagacccagtgccccaggaaggtcatcaagatggagtctgaggaggggaaggaggcaaggttggctcggagctccccggagcagcccaggcccagcacctccaaggcagtctcaccaccccacctggatggaccgcctagccccaggagccccgtcataggaagtgaggtcttcctgcccaacagcaaccacgtggccagtggcgccggggaggcagaggaacgcgttgtggtgatcagcagctcggaagactcagatgccgaaaactcgtcctcccgagagctggatgacagcagcagtgagtccagtgacctccagctggaaggccccagcaccctcagggtcctggacgagaaccttgctgacccccaagcagaagacagacctctggttttctttgacctcaagattgacaatgaaagtgggttctcctggggctacccccacccctttctaatttagtctctgagtcccaaaaagaagtgcaggcagagccatctgccaggcccaggagagctctgagctctggccaacaactgcagccaggctgggcagagcactccggctcacctgggctcctggcgtgtcatttgctggcttgaataaagatgtccgccttatccagtgcctgagtgtgcgagagaggcagatgcctccaaaaaaaaaaaaaaaaa

SEQ ID NO: 130839 - DNA, 1902 bp, Artificial Sequence
  derived and/or modified sequence
atggagcccgcccccgccagaagccccagaccccagcaggaccccgccagaccccaggagcccaccatgcccccccccgagacccccagcgagggcagacagcccagccccagccccagccccaccgagagagcccccgccagcgaggaggagttccagttcctgagatgccagcagtgccaggccgaggccaagtgccccaagctgctgccctgcctgcacaccctgtgcagcggctgcctggaggccagcggcatgcagtgccccatctgccaggccccctggcccctgggcgccgacacccccgccctggacaacgtgttcttcgagagcctgcagagaagactgagcgtgtacagacagatcgtggacgcccaggccgtgtgcaccagatgcaaggagagcgccgacttctggtgcttcgagtgcgagcagctgctgtgcgccaagtgcttcgaggcccaccagtggttcctgaagcacgaggccagacccctggccgagctgagaaaccagagcgtgagagagttcctggacggcaccagaaagaccaacaacatcttctgcagcaaccccaaccacagaacccccaccctgaccagcatctactgcagaggctgcagcaagcccctgtgctgcagctgcgccctgctggacagcagccacagcgagctgaagtgcgacatcagcgccgagatccagcagagacaggaggagctggacgccatgacccaggccctgcaggagcaggacagcgccttcggcgccgtgcacgcccagatgcacgccgccgtgggccagctgggcagagccagagccgagaccgaggagctgatcagagagagagtgagacaggtggtggcccacgtgagagcccaggagagagagctgctggaggccgtggacgccagataccagagagactacgaggagatggccagcagactgggcagactggacgccgtgctgcagagaatcagaaccggcagcgccctggtgcagagaatgaagtgctacgccagcgaccaggaggtgctggacatgcacggcttcctgagacaggccctgtgcagactgagacaggaggagccccagagcctgcaggccgccgtgagaaccgacggcttcgacgagttcaaggtgagactgcaggacctgagcagctgcatcacccagggcaaggacgccgccgtgagcaagaaggccagccccgaggccgccagcacccccagagaccccatcgacgtggacctgcccgaggaggccgagagagtgaaggcccaggtgcaggccctgggcctggccgaggcccagcccatggccgtggtgcagagcgtgcccggcgcccaccccgtgcccgtgtacgccttcagcatcaagggccccagctacggcgaggacgtgagcaacaccaccaccgcccagaagagaaagtgcagccagacccagtgccccagaaaggtgatcaagatggagagcgaggagggcaaggaggccagactggccagaagcagccccgagcagcccagacccagcaccagcaaggccgtgagccccccccacctggacggcccccccagccccagaagccccgtgatcggcagcgaggtgttcctgcccaacagcaaccacgtggccagcggcgccggcgaggccgaggagagagtggtggtgatcagcagcagcgaggacagcgacgccgagaacagcagcagcagagagctggacgacagcagcagcgagagcagcgacctgcagctggagggccccagcaccctgagagtgctggacgagaacctggccgacccccaggccgaggacagacccctggtgttcttcgacctgaagatcgacaacgagagcggcttcagctggggctacccccaccccttcctgatctag

SEQ ID NO: 130840 - DNA, 1902 bp, Artificial Sequence
  derived and/or modified sequence
atggagccagctccagccaggtccccacgcccgcagcaggaccctgcacgccctcaggagcctaccatgccgccccccgagactccatccgaaggtcgacagccatccccatcaccctcccctactgagagggcccccgcctcagaggaggaattccagttcctgcggtgccagcagtgtcaagctgaggccaagtgccccaaactgctgccatgcctgcataccctatgttcagggtgccttgaggccagcgggatgcagtgccccatctgtcaagcgccctggcccctaggcgccgatacccctgctctggataacgtgttcttcgaaagtttgcagagacgtctatcagtctacaggcagattgtggacgcccaggcagtttgcacaaggtgcaaggagtccgcggatttttggtgtttcgagtgtgagcagctgttgtgtgccaaatgtttcgaagctcaccagtggttccttaaacatgaggcgcgcccactggccgagctcagaaaccagtcagtgagagaatttttagacggcacacggaagaccaataatatcttttgtagtaacccaaatcaccgaacaccgacgcttacaagtatatactgccgaggatgctctaagcctctgtgctgcagctgcgctctgctggacagttctcactctgagctgaaatgtgacatttcggccgagattcagcaacgccaggaggaacttgatgctatgacgcaggccctgcaagagcaggactctgccttcggagctgtgcacgcgcagatgcacgctgcagtggggcagcttggtagagcccgcgctgagacagaggagttgatccgtgaacgagttagacaagtggtggcccacgtgcgtgcacaggaacgagagctgcttgaagctgtcgatgctcgataccaacgggactacgaggaaatggcctcacggcttggcaggttggatgcagttttgcagagaatccgaaccggatctgcactagtgcaaaggatgaaatgttatgcctctgatcaggaggtgctggatatgcatggctttctcaggcaggcgttgtgtaggctgcgccaggaggaaccgcaaagcctacaggcagctgtccggaccgacggcttcgacgagtttaaggtccggctgcaggacctctcttcctgtattacccaggggaaggatgctgccgtgtccaagaaggcttcacccgaggccgcttccacccctagagacccgattgacgtcgatttgccagaagaagctgagcgcgtgaaggcccaggtgcaagccctgggacttgctgaggcccagcccatggcggtcgttcaatctgtacctggcgctcatccagtccctgtctatgccttttcaatcaaaggaccatcctacggtgaagatgtttcaaacactacgactgctcaaaaacgcaagtgcagccaaacccagtgtcctaggaaggtgataaaaatggagagtgaggagggcaaagaagcccgcctcgcgaggtccagtccagagcaaccgagacctagcactagcaaagccgtctctcccccccatttggatggccccccatcaccacggtctcccgtgatcggttcagaggtgtttctcccaaactctaatcatgtagcatctggcgccggtgaggccgaagagcgagtggttgttatctcttcctccgaggatagtgacgcagaaaactccagctctcgcgagcttgatgactcaagctctgaaagcagcgacctgcagctagaggggccttctacactgcgcgtgcttgatgagaacttagctgatccccaggccgaagaccggccattagtcttttttgatcttaaaattgataatgaatctggtttcagctggggctatccacaccccttcttgatatag

SEQ ID NO: 130841 - DNA, 1902 bp, Artificial Sequence
  derived and/or modified sequence
atggagcccgccccagcccggagcccccggccccagcaggaccctgcccggccccaggagcccaccatgcctcctcctgagacccccagcgagggccggcagcccagccccagccccagccccacagagcgggccccagccagcgaggaggagttccagttcctgcgctgccagcagtgccaggccgaggccaagtgccccaagctgctgccctgcctgcacaccctgtgcagcggctgcctggaggccagcggcatgcagtgccccatctgccaggccccctggcccctgggcgctgacaccccagccctggacaacgtgttctttgagagcctgcagaggcggctgtctgtgtaccggcagatcgtggatgcccaggccgtgtgcacccgctgcaaggagagcgctgacttctggtgctttgaatgtgagcagctgctgtgtgccaagtgctttgaggcccaccagtggttcctgaagcatgaggcccggcccctggccgagctgaggaaccagagcgtgcgggagttcctggatggcaccaggaagaccaacaacatcttctgcagcaaccccaaccacaggacccccaccctgaccagcatctactgccggggctgcagcaagcccctgtgctgcagctgtgccctgctggacagcagccacagcgagctgaagtgtgacatctctgctgagatccagcagaggcaggaggagctggatgccatgacccaggccctgcaggagcaggacagcgccttcggggctgtgcacgcccagatgcatgctgctgtgggccagctgggccgggcccgggcagagacagaggagctgatccgggagcgggtgcggcaggtggtggcccacgtgcgggcccaggagcgggagctgctggaggccgtggatgcccgctaccagagggactatgaggagatggccagccggctgggccgcctggatgctgtgctgcagaggatcagaacaggcagcgccctggtgcagaggatgaagtgctacgccagtgaccaggaggtgctggacatgcacggcttcctgcggcaggccctgtgccgcctgcggcaggaggagccccagagcctgcaggccgctgtgaggacagatggctttgatgagttcaaggtgcggctgcaggacctgagcagctgcatcacccagggcaaggatgctgctgtgtccaagaaggccagccctgaggccgccagcaccccccgggaccccattgatgtggacctgcctgaggaggccgagcgggtgaaggcccaggtgcaggccctgggcctggccgaggcccagcccatggctgtggtgcagagcgtgcctggggcccaccctgtgcctgtgtatgccttcagcatcaagggccccagctatggagaagatgtgagcaacaccaccacagcccagaagaggaagtgcagccagacccagtgccccaggaaggtgatcaagatggagagcgaggagggcaaggaggcccggctggcccggagcagccctgagcagccccggcccagcaccagcaaggctgtgtccccaccccacctggatggcccccccagccccaggagccctgtgattggcagcgaggtgttcctgcccaacagcaaccacgtggccagcggggccggggaggccgaggagcgggtggtggtgatcagcagcagtgaagattctgatgctgagaacagcagcagccgggagctggatgacagcagcagcgagagcagtgacctgcagctggagggccccagcaccctgcgggtgctggatgagaacctggccgacccccaggccgaggaccggcccctggtgttctttgacctgaagattgacaatgaaagtggcttctcctggggctacccccaccccttcctgatctag

SEQ ID NO: 130842 - DNA, 1902 bp, Artificial Sequence
  derived and/or modified sequence
atggagcccgcccccgcccggagcccccggccccagcaggaccccgctcggcctcaagagcctaccatgcctcccccggaaacaccctcagaagggaggcagccgagcccctctcctagtcccactgaacgtgcaccagcctctgaagaagagtttcagtttttacgatgtcagcagtgtcaggctgaagctaaatgccccaagctcttgccctgtctacatacactgtgctccggatgccttgaggcgtctggcatgcagtgccccatttgtcaggccccgtggccactgggcgctgacacacctgctctggacaatgtattcttcgagagtctgcagcgccgactatcggtctacagacagattgtcgatgcgcaggctgtgtgcacccgttgtaaggagtccgccgacttctggtgttttgaatgcgagcaattgctctgtgcaaagtgttttgaagctcaccagtggttccttaaacatgaagcaaggcccttggcggagttgaggaatcaatcagtgcgcgagtttctcgatggaaccaggaaaaccaacaatatcttttgctcgaatccgaaccatcgaacaccaactctcacatccatttactgccggggatgctctaagcccctgtgttgcagctgtgccctgctcgattccagtcatagcgagttgaaatgtgacatttcggcagagattcagcaaagacaggaagagctcgacgccatgacccaagctctccaggagcaggactccgctttcggagctgttcatgcgcagatgcatgccgcggtggggcagctcggtcgggccagagctgagaccgaagagctcatacgcgagcgagtgcgtcaggtggtcgcccatgtccgggcacaggagcgcgagctgttggaggccgtggacgctaggtaccagagagattacgaggagatggccagcagacttgggagattggatgctgtccttcaaagaataaggaccggttctgccttagtgcagaggatgaagtgctatgcctccgaccaggaggtgctggatatgcacggattcctgcggcaggccctgtgccgcttaaggcaagaagaacctcaatctctccaggctgcggtgagaactgatggcttcgatgagtttaaggttcgactacaggacctctcaagctgcattacacagggcaaagatgctgccgtgtctaagaaggcctcaccggaagcggcgtctacacccagagatccgatcgatgttgacctccccgaagaagctgagcgggtgaaggcgcaggtgcaggcccttggtctggcggaggcccaacccatggctgtggtgcagtcagtgccaggagcccatccggttcctgtgtatgccttctctataaagggaccctcttacggggaagatgtaagtaacaccacaacagcccaaaagcgcaagtgcagccagactcagtgtccccgcaaggtcataaaaatggaaagcgaggagggcaaggaggctaggctggcccgaagctcccctgaacagccgcggccgagcaccagcaaggctgttagccctccccatcttgatggcccacctagtcctaggtcaccagtgataggcagtgaggtatttctcccaaacagcaaccacgtggcatctggagctggcgaagctgaagagcgggttgtggttatctcaagctccgaggattcagacgctgagaattcctctagtagggaactggatgatagttcaagtgaatcctcagatctccagctcgaaggtcccagcactttgcgagtgcttgatgagaacttggcggacccccaggccgaggacaggcctttagtattcttcgacctcaaaattgataacgagagcggcttctcttgggggtacccacacccttttctgatttag

SEQ ID NO: 130843 - DNA, 1902 bp, Artificial Sequence
  derived and/or modified sequence
atggaacccgctcctgctaggtctcctaggcctcagcaggacccggcaagacctcaagaacccacgatgccacctcctgagaccccgagcgaaggaagacaaccctcacccagcccctcccctaccgaaagagcgccagcctctgaggaagagttccagttccttcggtgccaacagtgtcaggctgaagccaaatgcccaaagctgcttccttgcctccacactctatgttccgggtgtcttgaggccagcgggatgcagtgccctatttgtcaggccccatggccattgggcgctgacacgcctgccctggacaatgtctttttcgaatctctgcaacggaggctctcggtttacagacagatagtcgacgcgcaggccgtgtgcaccaggtgtaaggaatcggcggacttctggtgctttgagtgcgagcagctcctctgtgctaaatgttttgaggcccaccagtggttcttaaaacacgaggctagacccttggcggaactgaggaaccagagcgtgcgcgagttcctggacggcaccagaaaaacaaataatatattttgttcaaacccgaaccacaggacgcctaccctcacttccatctactgcaggggatgttctaaaccactgtgttgctcatgcgccctgttagatagctcacacagcgagctgaaatgcgacatatccgcagaaatccagcaacgtcaggaagagctggatgccatgacccaggccctacaggaacaggactctgcatttggggctgtacatgcgcaaatgcacgcagccgtgggccagcttgggagagctcgcgctgaaactgaagagctgattagggaacgggtcagacaggtggttgcccacgtacgggcacaagaacgggaactgctggaggctgttgacgctcgctaccagagagattatgaggaaatggcgagtagacttgggcgtctggacgcagttttacagagaatccgcactggcagtgcgctggtgcagcggatgaagtgctacgcatcagaccaagaggtgctcgacatgcacggcttccttagacaggccctttgccgattgcggcaggaggagccccaaagtctccaagctgctgtgcgtacagatggctttgacgagttcaaggtcagacttcaagatctcagctcctgcatcacacaggggaaggatgctgcagtatccaagaaagctagcccagaagccgctagtacgccccgagacccaattgatgtcgacttgccagaggaggcggagagagtcaaggcccaggtacaagcactgggactggctgaagcccagcctatggctgttgttcaatccgtacctggagcccatccagtgcctgtctacgccttctctatcaagggtcctagctacggtgaggacgtctcaaacactacaacagcacagaaaaggaaatgttctcagacccagtgcccccgtaaagtcatcaagatggagtccgaggaggggaaggaggctcgcttggcacggtcatctccggagcagcccagaccttctaccagtaaagccgtatcccctccacacttggatgggcctcccagcccacggagtcctgtgatcgggtctgaagtcttcctgcccaactcaaatcatgtggcatctggcgcaggggaagccgaagagcgggtggtagttatttcgagttcagaagactcggacgctgagaactcgtcaagcagggagctcgacgactctagctccgaatcatctgacttgcagctggagggaccctccacccttcgcgtgctggacgagaaccttgccgacccacaggctgaagatagaccactcgtctttttcgacctcaagattgacaatgagtccgggttttcttggggatatcctcacccattcctgatttag

SEQ ID NO: 130844 - DNA, 2237 bp, Artificial Sequence
  derived and/or modified sequence
ctctccagaggcgggccctgagccggcacctcccctttcggacagctcaagggactcagccaactggctcacgcctccccttcagcttctcttcacgcactccaagatctaaaccgagaatcgaaactaagctggggtccatggagcctgcacccgcccgatctccgaggccccagcaggaccccgcccggccccaggagcccaccatgcctccccccgagaccccctctgaaggccgccagcccagccccagccccagccctacagagcgagcccccgcttcggaggaggagttccagtttctgcgctgccagcaatgccaggcggaagccaagtgcccgaagctgctgccttgtctgcacacgctgtgctcaggatgcctggaggcgtcgggcatgcagtgccccatctgccaggcgccctggcccctaggtgcagacacacccgccctggataacgtctttttcgagagtctgcagcggcgcctgtcggtgtaccggcagattgtggatgcgcaggctgtgtgcacccgctgcaaagagtcggccgacttctggtgctttgagtgcgagcagctcctctgcgccaagtgcttcgaggcacaccagtggttcctcaagcacgaggcccggcccctagcagagctgcgcaaccagtcggtgcgtgagttcctggacggcacccgcaagaccaacaacatcttctgctccaaccccaaccaccgcacccctacgctgaccagcatctactgccgaggatgttccaagccgctgtgctgctcgtgcgcgctccttgacagcagccacagtgagctcaagtgcgacatcagcgcagagatccagcagcgacaggaggagctggacgccatgacgcaggcgctgcaggagcaggatagtgcctttggcgcggttcacgcgcagatgcacgcggccgtcggccagctgggccgcgcgcgtgccgagaccgaggagctgatccgcgagcgcgtgcgccaggtggtagctcacgtgcgggctcaggagcgcgagctgctggaggctgtggacgcgcggtaccagcgcgactacgaggagatggccagtcggctgggccgcctggatgctgtgctgcagcgcatccgcacgggcagcgcgctggtgcagaggatgaagtgctacgcctcggaccaggaggtgctggacatgcacggtttcctgcgccaggcgctctgccgcctgcgccaggaggagccccagagcctgcaagctgccgtgcgcaccgatggcttcgacgagttcaaggtgcgcctgcaggacctcagctcttgcatcacccaggggaaagatgcagctgtatccaagaaagccagcccagaggctgccagcactcccagggaccctattgacgttgacctgcccgaggaggcagagagagtgaaggcccaggttcaggccctggggctggctgaagcccagcctatggctgtggtacagtcagtgcccggggcacaccccgtgccagtgtacgccttctccatcaaaggcccttcctatggagaggatgtctccaatacaacgacagcccagaagaggaagtgcagccagacccagtgccccaggaaggtcatcaagatggagtctgaggaggggaaggaggcaaggttggctcggagctccccggagcagcccaggcccagcacctccaaggcagtctcaccaccccacctggatggaccgcctagccccaggagccccgtcataggaagtgaggtcttcctgcccaacagcaaccacgtggccagtggcgccggggaggcagaggaacgcgttgtggtgatcagcagctcggaagactcagatgccgaaaactcgtcctcccgagagctggatgacagcagcagtgagtccagtgacctccagctggaaggccccagcaccctcagggtcctggacgagaaccttgctgacccccaagcagaagacagacctctggttttctttgacctcaagattgacaatgaaagtgggttctcctggggctacccccacccctttctaatttagtctctgagtcccaaaaagaagtgcaggcagagccatctgccaggcccaggagagctctgagctctggccaacaactgcagccaggctgggcagagcactccggctcacctgggctcctggcgtgtcatttgctggcttgaataaagatgtccgccttatccagtgcctgagtgtgcgagagaggcagatgcctcc

SEQ ID NO: 130845 - protein, 262 aa, Artificial Sequence
  derived and/or modified sequence
MAVTAQAARRKERVLCLFDVDGTLTPARQKIDPEVAAFLQKLRSRVQIGVVGGSDYCKIAEQLGDGDEVIEKFDYVFAENGTVQYKHGRLLSKQTIQNHLGEELLQDLINFCLSYMALLRLPKKRGTFIEFRNGMLNISPIGRSCTLEERIEFSELDKKEKIREKFVEALKTEFAGKGLRFSRGGMISFDVFPEGWDKRYCLDSLDQDSFDTIHFFGNETSPGGNDFEIFADPRTVGHSVVSPQDTVQRCREIFFPETAHEA

SEQ ID NO: 130846 - DNA, 789 bp, Artificial Sequence
  derived and/or modified sequence
atggccgtgaccgcccaggccgccagaagaaaggagagagtgctgtgcctgttcgacgtggacggcaccctgacccccgccagacagaagatcgaccccgaggtggccgccttcctgcagaagctgagaagcagagtgcagatcggcgtggtgggcggcagcgactactgcaagatcgccgagcagctgggcgacggcgacgaggtgatcgagaagttcgactacgtgttcgccgagaacggcaccgtgcagtacaagcacggcagactgctgagcaagcagaccatccagaaccacctgggcgaggagctgctgcaggacctgatcaacttctgcctgagctacatggccctgctgagactgcccaagaagagaggcaccttcatcgagttcagaaacggcatgctgaacatcagccccatcggcagaagctgcaccctggaggagagaatcgagttcagcgagctggacaagaaggagaagatcagagagaagttcgtggaggccctgaagaccgagttcgccggcaagggcctgagattcagcagaggcggcatgatcagcttcgacgtgttccccgagggctgggacaagagatactgcctggacagcctggaccaggacagcttcgacaccatccacttcttcggcaacgagaccagccccggcggcaacgacttcgagatcttcgccgaccccagaaccgtgggccacagcgtggtgagcccccaggacaccgtgcagagatgcagagagatcttcttccccgagaccgcccacgaggcctag

SEQ ID NO: 130847 - DNA, 789 bp, Artificial Sequence
  derived and/or modified sequence
atggcagtgacagcccaggcagctaggcggaaagaaagagtgctgtgcctgttcgatgttgatggtactttgactccagcacgtcagaagatcgatccagaggtggccgcatttctgcagaaattgagatcacgggttcagatcggagttgtgggcgggtctgactactgtaagattgccgaacagctgggggatggggacgaggtgatagagaaatttgactacgtcttcgccgagaatgggactgttcagtataagcatgggcgcctgctcagcaagcaaaccatccagaatcacctgggagaagaacttctccaagatctcattaacttttgcttatcctacatggctttgctgagattgccaaaaaaacgtggcacctttattgagtttcgcaatgggatgcttaatatatcacctatcgggagatcttgtacactggaagaacggatagagttctcggaacttgacaaaaaggagaaaattagagaaaagttcgtggaagcccttaagaccgagttcgccgggaaagggctcaggtttagcaggggaggtatgatctcgtttgacgtgttccctgaaggatgggacaaacgctattgcctagactcccttgatcaggactcattcgacacaatacacttttttggcaatgaaacatctccaggcgggaacgactttgaaatctttgcagaccctagaaccgttggccacagcgtcgttagtccccaggacaccgtgcagaggtgtagggagatctttttccctgaaaccgctcacgaagcatag

SEQ ID NO: 130848 - DNA, 789 bp, Artificial Sequence
  derived and/or modified sequence
atggctgtgacagcccaggccgcccggaggaaggagcgggtgctgtgcctgtttgatgtggatggcaccctgaccccagcccggcagaagattgatcctgaggtggccgccttcctgcagaagctgcggagccgggtgcagatcggcgtggtgggcggcagtgactactgcaagattgctgagcagctgggagatggagatgaagtcatcgagaagtttgattatgtgtttgctgaaaatggcaccgtgcagtacaagcacggccgcctgctgagcaagcagaccatccagaaccacctgggggaggagctgctgcaggacctgatcaacttctgcctgagctacatggccctgctgcggctgcccaagaagaggggcaccttcatcgagttcagaaatggcatgctgaacatcagccccatcggccgcagctgcaccctggaggagagaattgagttcagcgagctggacaagaaggagaagatccgggagaagtttgtggaggccctgaagacagaatttgctgggaagggcctgcgcttcagccggggcggcatgatcagctttgatgtgtttcctgagggctgggacaagcgctactgcctggacagcctggaccaggacagctttgacaccatccacttctttggaaatgagaccagccctggaggaaatgactttgagatctttgctgaccccaggacagtgggccacagcgtggtgagcccccaggacacagtgcagcgctgccgggagatcttcttccctgagacagcccacgaggcctag

SEQ ID NO: 130849 - DNA, 789 bp, Artificial Sequence
  derived and/or modified sequence
atggccgtgaccgcccaggccgcccggcggaaggagcgggtgctgtgtttattcgacgtggatggcaccttgactcccgcacggcagaagattgatcctgaagttgccgcattccttcaaaagcttagaagcagggtccagattggcgttgtgggcgggtcggactactgcaagattgcagagcagctgggcgatggggatgaggtgatcgagaagtttgattacgtcttcgcagaaaatggtaccgtgcaatacaaacacggcagattgctttctaagcagacaattcaaaaccacctgggagaagagctccttcaggatcttattaacttttgcctgtcgtacatggccttgttgcgattgcctaaaaagagaggcacatttattgaatttagaaatggcatgctgaacatcagcccaataggaagaagctgcactctggaagaaagaattgaattctctgaactcgacaagaaggagaaaatacgggaaaagttcgtggaagcgctcaaaacagaatttgccggcaaagggctcagatttagtagaggcggtatgattagctttgacgttttcccagaaggttgggacaaaaggtactgtctggactccttggatcaggatagttttgacaccatacatttttttggcaacgaaacatcacctggtggcaatgatttcgaaatttttgccgacccccggaccgtggggcacagcgtcgtgtcccctcaggacaccgttcagaggtgtagggagatattctttccggagactgcccatgaggcatag

SEQ ID NO: 130850 - DNA, 789 bp, Artificial Sequence
  derived and/or modified sequence
atggccgtaacagctcaggctgcacgtcgaaaagagcgtgtgctgtgcctgtttgacgtggatggaacactcactcccgctcggcaaaaaattgatcctgaggtggccgctttcctgcaaaagttgcggagcagagtacagatcggggtagtcggcggaagcgactactgtaaaatcgcagaacagttaggcgacggagatgaggtcattgagaagtttgactacgtttttgctgagaacggcaccgtccagtataaacatggacgcctgttatcaaaacagaccatacagaatcatctgggtgaagagctcctgcaggatctgattaatttttgtctgagctacatggcattgctcaggcttccgaagaaaagaggcacctttatcgagttccgaaacggcatgcttaatatatcacctataggaagatcctgtactctcgaggagaggatcgagttcagcgaactggataagaaggagaaaatcagagagaaatttgttgaagccttgaagactgagtttgctggaaagggactgcggttttctagaggcggtatgatttcctttgacgttttccctgaagggtgggataagcgctactgtcttgacagtctcgaccaagacagtttcgacacaatccacttcttcggcaatgaaacctcaccaggcggtaatgatttcgagatcttcgcagatccacgaaccgtggggcactctgtagtctccccgcaggacaccgtgcagaggtgtcgagagatcttcttcccagaaacagcccatgaggcgtag

SEQ ID NO: 130851 - DNA, 1298 bp, Artificial Sequence
  derived and/or modified sequence
aatgccccgccccgtcagcacttatccctgagctgcttctgccgttgcatcttcgggactccgccccgcgcgcggacctgcagccatggcagtcaccgcccaggcagcccgcaggaaggagcgcgtcctctgcctgtttgacgtggacgggaccctcacgccggctcgccagaaaattgaccctgaggtggccgccttcctgcagaagctacgaagtagagtgcagatcggtgtggtgggcggctctgactactgtaagatcgctgagcagctgggtgacggggatgaagtcattgagaagtttgattatgtgtttgccgagaacgggacggtgcagtataagcacggacgactgctctccaagcagaccatccagaaccacctgggggaggagctgctgcaggacttgatcaacttctgcctcagctacatggccctgctcaggctgcccaagaagcgtggaaccttcatcgagttccggaatggcatgctgaacatctcgcccatcggccggagctgcaccctggaggagaggatcgagttctccgaactggacaagaaagagaagatccgggagaagttcgtggaagccctgaaaacagagtttgctggcaaagggctgaggttctctcgaggaggcatgatcagctttgacgtcttccccgagggctgggacaagcgctactgcctggatagcctggaccaggacagcttcgacaccatccacttctttgggaacgagactagccctggtgggaacgactttgagatctttgccgacccccggactgttggccacagcgtggtgtctcctcaggacacggtgcagcgatgccgggagattttcttcccagagacagctcatgaggcgtgaccggggcccacatctgtgtgtcgtgacttctgaagagtttggcctaggcctaaagagaggtcctggtgttggatagatgccagggcccctcctctggcccaggacgcctgctgcaagcccacccagatggggccagagtctgtgtggacaaccgtccccagccagtctgctcctagtggcactggcttcgtcctcccagggcccagagtgttccccatgctccacctggtggcccaggccacagctgctgcttgtatttcggtacagaagaggtttctttctgcaccaggaggaggcgtgctcaagtatcggtacgagatctagcctgccctgcctgcctgccctgggcgatgaggtacggtggggaaggtgcctattttagagaactttgtcacagtattaaagttcccagaacaaagtaggt

SEQ ID NO: 130852 - protein, 282 aa, Artificial Sequence
  derived and/or modified sequence
MSGADRSPNAGAAPDSAPGQAAVASAYQRFEPRAYLRNNYAPPRGDLCNPNGVGPWKLRCLAQTFATGEVSGRTLIDIGSGPTVYQLLSACSHFEDITMTDFLEVNRQELGRWLQEEPGAFNWSMYSQHACLIEGKGECWQDKERQLRARVKRVLPIDVHQPQPLGAGSPAPLPADALVSAFCLEAVSPDLASFQRALDHITTLLRPGGHLLLIGALEESWYLAGEARLTVVPVSEEEVREALVRSGYKVRDLRTYIMPAHLQTGVDDVKGVFFAWAQKVGL

SEQ ID NO: 130853 - protein, 184 aa, Artificial Sequence
  derived and/or modified sequence
MTDFLEVNRQELGRWLQEEPGAFNWSMYSQHACLIEGKGECWQDKERQLRARVKRVLPIDVHQPQPLGAGSPAPLPADALVSAFCLEAVSPDLASFQRALDHITTLLRPGGHLLLIGALEESWYLAGEARLTVVPVSEEEVREALVRSGYKVRDLRTYIMPAHLQTGVDDVKGVFFAWAQKVGL

SEQ ID NO: 130854 - DNA, 849 bp, Artificial Sequence
  derived and/or modified sequence
atgagtggcgctgatcgttcaccaaacgctggggccgctcctgactctgctccagggcaggccgccgtcgcgtcggcctaccagcgctttgaaccccgcgcttacctgcgaaacaattacgcacctccacggggcgacctttgcaatccgaacggggtagggccatggaagctgcgatgtctcgcacaaacctttgccaccggcgaggtctcagggaggactctaattgacattggcagcggcccgacagtataccagctgctttcagcctgtagccacttcgaagacattacaatgaccgactttctcgaggtaaacaggcaagagctgggacgctggctccaagaagaacccggagccttcaattggtccatgtactcacagcacgcctgtcttatcgaggggaaaggcgagtgctggcaggataaagagcgacagcttagggctagggtgaaaagagtcctgcccatcgatgtgcaccagccccaaccattaggcgcaggaagtcctgctcccttaccagcggatgcattggtttctgcattttgcttggaggccgtctcgccggatctggctagctttcagagggctctcgaccatattactactctactgcgacctgggggacatttgctgctcatcggcgccttggaggagtcctggtatctcgcaggtgaagccaggctaaccgttgtgcctgtctcggaggaggaggtgagagaagcacttgtgcggagtgggtacaaagtgcgcgacctgaggacgtacataatgcccgcacacctgcagaccggcgtagatgatgtcaagggagttttcttcgcatgggcccagaaagtcggtctgtag

SEQ ID NO: 130855 - DNA, 849 bp, Artificial Sequence
  derived and/or modified sequence
atgtctggagctgacaggagccccaatgctggggccgccccagacagcgcccctggccaggccgctgtggccagcgcctaccagagatttgagccccgggcctacctgaggaacaactatgccccacccaggggggacctgtgcaaccccaatggagtgggcccctggaagctgcgctgcctggcccagacctttgccactggagaggtgtctggccgcaccctgattgacatcggcagcggccccaccgtgtaccagctgctgagcgcctgcagccactttgaggacatcaccatgacagacttcctggaggtgaaccggcaggagctgggccgctggctgcaggaggagcccggggccttcaactggagcatgtacagccagcacgcctgcctgattgagggcaagggggagtgctggcaggacaaggagcggcagctgcgggcccgggtgaagagggtgctgcccattgatgtgcaccagccccagcccctgggcgccggcagccctgcccccctgcctgcagatgccctggtgtctgccttctgcctggaggccgtgtccccagacctggccagcttccagagggccctggaccacatcaccaccctgctgcggcctgggggccacctgctgctgattggagccctggaggagagctggtacctggccggggaggcccggctgactgtggtgcctgtgtctgaggaggaggtgcgggaggccctggtgcgcagcggctacaaggtgcgggacctgcggacctacatcatgcctgcccacctgcagacaggagtggatgatgtgaagggcgtcttctttgcctgggcccagaaggtgggcctgtag

SEQ ID NO: 130856 - DNA, 849 bp, Artificial Sequence
  derived and/or modified sequence
atgagcggcgccgaccggagccccaacgccggcgccgcccccgacagcgctcctggccaggccgctgtcgccagcgcttaccagagattcgagcccagagcctacctcaggaacaactacgcgccccctagaggcgacctgtgcaaccccaatggcgtgggcccatggaagctgcgttgtctggcccagaccttcgctaccggagaagtctctgggcgcacgctcatcgacatcggtagcgggcctaccgtctatcagctgctgagcgcatgctcgcatttcgaggacattaccatgaccgacttccttgaggtcaatcgccaggaactcggccggtggctgcaagaagaaccaggggcctttaactggtccatgtacagccaacacgcctgcttgatcgaagggaagggcgagtgctggcaggacaaggaacgccagctgcgagcgcgtgtcaaaagagtgctgccgatagatgtgcatcaaccacagccattaggggcaggctcaccagctccactgcccgcagacgcattggtatctgcattctgcttggaggctgttagccccgacctcgcttcctttcagcgggcactcgatcacattactacgctgttgcgcccaggaggtcatcttctccttattggtgccctggaggagagctggtatctggctggcgaggcacggctaacagttgtgccagtgagcgaagaagaagtccgagaggcgctggtcaggagtggatacaaagtgcgcgaccttcgcacctacataatgcctgctcatcttcaaactggagttgacgacgtgaagggggtttttttcgcctgggctcagaaagttggtctgtag

SEQ ID NO: 130857 - DNA, 1157 bp, Artificial Sequence
  derived and/or modified sequence
ggacgattgccgctgcagccgccgccccactcacctccggtgtgtctgcagcccggacactaagggagatggatgaatgggtggggaggatgcggcgcacatggccccgggcggctcggcggtcagctgccgcccccacagcggaccggtcggggcgggggtcgggcggtagaaaaaagggccgcgaggcgagcggggcactgggcggaccgcggcggcagcatgagcggcgcagaccgtagccccaatgcgggcgcagcccctgactcggccccgggccaggcggcggtggcttcggcctaccagcgcttcgagccgcgcgcctacctccgcaacaactacgcgccccctcgcggggacctgtgcaacccgaacggcgtcgggccgtggaagctgcgctgcttggcgcagaccttcgccaccggtgaagtgtccggacgcaccctcatcgacattggttcaggccccaccgtgtaccagctgctcagtgcctgcagccactttgaggacatcaccatgacagatttcctggaggtcaaccgccaggagctggggcgctggctgcaggaggagccgggggccttcaactggagcatgtacagccaacatgcctgcctcattgagggcaagggggaatgctggcaggataaggagcgccagctgcgagccagggtgaaacgggtcctgcccatcgacgtgcaccagccccagcccctgggtgctgggagcccagctcccctgcctgctgacgccctggtctctgccttctgcttggaggctgtgagcccagatcttgccagctttcagcgggccctggaccacatcaccacgctgctgaggcctggggggcacctcctcctcatcggggccctggaggagtcgtggtacctggctggggaggccaggctgacggtggtgccagtgtctgaggaggaggtgagggaggccctggtgcgtagtggctacaaggtccgggacctccgcacctatatcatgcctgcccaccttcagacaggcgtagatgatgtcaagggcgtcttcttcgcctgggctcagaaggttgggctgtgagggctgtacctggtgccctgtggcccccacccacctggattccctgttctttgaagtggcacctaataaagaaataataccctgcc

SEQ ID NO: 130858 - DNA, 821 bp, Artificial Sequence
  derived and/or modified sequence
gctgcgagggggaaactggggaaagggcctaattccccagtctccacctcgaatcaggaaagagaaggggcgggctgctgggcaaaagaggtgaagtgtccggacgcaccctcatcgacattggttcaggccccaccgtgtaccagctgctcagtgcctgcagccactttgaggacatcaccatgacagatttcctggaggtcaaccgccaggagctggggcgctggctgcaggaggagccgggggccttcaactggagcatgtacagccaacatgcctgcctcattgagggcaagggggaatgctggcaggataaggagcgccagctgcgagccagggtgaaacgggtcctgcccatcgacgtgcaccagccccagcccctgggtgctgggagcccagctcccctgcctgctgacgccctggtctctgccttctgcttggaggctgtgagcccagatcttgccagctttcagcgggccctggaccacatcaccacgctgctgaggcctggggggcacctcctcctcatcggggccctggaggagtcgtggtacctggctggggaggccaggctgacggtggtgccagtgtctgaggaggaggtgagggaggccctggtgcgtagtggctacaaggtccgggacctccgcacctatatcatgcctgcccaccttcagacaggcgtagatgatgtcaagggcgtcttcttcgcctgggctcagaaggttgggctgtgagggctgtacctggtgccctgtggcccccacccacctggattccctgttctttgaagtggcacctaataaagaaataataccctg

SEQ ID NO: 130859 - DNA, 849 bp, Artificial Sequence
  derived and/or modified sequence
atgtccggggctgaccggagcccaaatgctggggcagcccctgacagtgctcctggccaggctgctgttgccagcgcgtatcagcggttcgagccccgagcttacctgcggaataactacgcgccacccaggggtgatctatgcaaccccaacggagtgggcccttggaaactgcgttgtctggcccaaactttcgctaccggcgaagtgtctggaaggactttaatcgacatcggaagcgggcctaccgtgtaccagctgctcagcgcctgttcacactttgaagacattacaatgaccgactttctcgaggtgaatagacaagaacttggccgatggctgcaggaggaacctggtgcttttaattggtccatgtactcccaacatgcatgcttgattgagggaaagggtgagtgctggcaggacaaggaacgccaactgagggcaagggtgaagagggtcctgcctatcgatgtccatcagccacagccactgggagccggatcccccgctcccctgcctgcagacgccctcgtaagcgcattttgtcttgaagccgtgagccctgacctcgctagctttcagagggcgttggaccatatcaccaccctgttgaggccagggggtcacctcctactcattggagctttggaggagtcctggtacttggccggagaagccaggttgactgtggtccctgtgagtgaggaagaagtccgtgaagccctcgtaagaagcgggtacaaagtgagggatctcagaacatacatcatgccagctcatctgcagacaggcgtggacgacgtaaagggggtttttttcgcctgggcacagaaagtcgggctctag

SEQ ID NO: 130860 - DNA, 849 bp, Artificial Sequence
  derived and/or modified sequence
atgagcggcgccgacagaagccccaacgccggcgccgcccccgacagcgcccccggccaggccgccgtggccagcgcctaccagagattcgagcccagagcctacctgagaaacaactacgccccccccagaggcgacctgtgcaaccccaacggcgtgggcccctggaagctgagatgcctggcccagaccttcgccaccggcgaggtgagcggcagaaccctgatcgacatcggcagcggccccaccgtgtaccagctgctgagcgcctgcagccacttcgaggacatcaccatgaccgacttcctggaggtgaacagacaggagctgggcagatggctgcaggaggagcccggcgccttcaactggagcatgtacagccagcacgcctgcctgatcgagggcaagggcgagtgctggcaggacaaggagagacagctgagagccagagtgaagagagtgctgcccatcgacgtgcaccagccccagcccctgggcgccggcagccccgcccccctgcccgccgacgccctggtgagcgccttctgcctggaggccgtgagccccgacctggccagcttccagagagccctggaccacatcaccaccctgctgagacccggcggccacctgctgctgatcggcgccctggaggagagctggtacctggccggcgaggccagactgaccgtggtgcccgtgagcgaggaggaggtgagagaggccctggtgagaagcggctacaaggtgagagacctgagaacctacatcatgcccgcccacctgcagaccggcgtggacgacgtgaagggcgtgttcttcgcctgggcccagaaggtgggcctgtag

SEQ ID NO: 130861 - protein, 717 aa, Artificial Sequence
  derived and/or modified sequence
MAVAVRTLQEQLEKAKESLKNVDENIRKLTGRDPNDVRPIQARLLALSGPGGGRGRGSLLLRRGFSDSGGGPPAKQRDLEGAVSRLGGERRTRRESRQESDPEDDDVKKPALQSSVVATSKERTRRDLIQDQNMDEKGKQRNRRIFGLLMGTLQKFKQESTVATERQKRRQEIEQKLEVQAEEERKQVENERRELFEERRAKQTELRLLEQKVELAQLQEEWNEHNAKIIKYIRTKTKPHLFYIPGRMCPATQKLIEESQRKMNALFEGRRIEFAEQINKMEARPRRQSMKEKEHQVVRNEEQKAEQEEGKVAQREEELEETGNQHNDVEIEEAGEEEEKEIAIVHSDAEKEQEEEEQKQEMEVKMEEETEVRESEKQQDSQPEEVMDVLEMVENVKHVIADQEVMETNRVESVEPSENEASKELEPEMEFEIEPDKECKTLSPGKENVSALDMEKESEEKEEKESEPQPEPVAQPQPQSQPQLQLQSQSQPVLQSQPPSQPEDLSLAVLQPTPQVTQEQGHLLPERKDFPVESVKLTEVPVEPVLTVHPESKSKTKTRSRSRGRARNKTSKSRSRSSSSSSSSSSSTSSSSGSSSSSGSSSSRSSSSSSSSTSGSSSRDSSSSTSSSSESRSRSRGRGHNRDRKHRRSVDRKRRDTSGLERSHKSSKGGSSRDTKGSKDKNSRSDRKRSISESSRSGKRSSRSERDRKSDRKDKRR

SEQ ID NO: 130862 - DNA, 417 bp, Artificial Sequence
  derived and/or modified sequence
ttcagagccagaggccccgacggcagaggcagcggcagaaccagagccggcagagcccccggcagagagcccagagcccccagatgccccgacggcggcggcgtggccgccagagccgccagactgctgagcagcagaagaagcggcagctggccccccacccacgccctgtggcccgacctgagaagcagagccagaagactgctgctgttcctgagcctggccgacctgctgagcgccagatgcccccccagccccacccccgcccccagcagcggcccctggcccctgagaagcacctgcaccagcgccagcagcgcccccagagccggcctggcccagatcgcctgcttcggccccagcatgagcagcgccggcggcagcagatggagcagcctgtggcagcccagcccctag

SEQ ID NO: 130863 - DNA, 3576 bp, Artificial Sequence
  derived and/or modified sequence
cgcctcggcggcgcggcatagcccggctcggcctgtaaagcagtctcaagcctgccgcagggagaagatggcggtcgccgtgagaactttgcaggaacagctggaaaaggccaaagagagtcttaagaacgtggatgagaacattcgcaagctcaccgggcgggatccgaatgacgtgaggcccatccaagccagattgctggccctttctggtcctggtggaggtagaggacgtggtagtttattactgaggcgtggattctcagatagtggaggaggacccccagccaaacagagagaccttgaaggggcagtcagtaggctgggcggggagcgtcggaccagaagagaatcacgccaggaaagcgacccggaggatgatgatgttaaaaagccagcattgcagtcttcagttgtagctacctccaaagagcgcacacgtagagaccttatccaggatcaaaatatggatgaaaagggaaagcaaaggaaccggcgaatatttggcttgttgatgggtacccttcaaaaatttaaacaagaatccactgttgctactgaaaggcaaaagcggcgccaggaaattgaacaaaaacttgaagttcaggcagaagaagagagaaagcaggttgaaaatgaaaggagagaactgtttgaagagaggcgtgctaaacagacagaactgcggcttttggaacagaaagttgagcttgcgcagctgcaagaagaatggaatgaacataatgccaaaataattaaatatataagaactaagacaaagccccatttgttttatattcctggaagaatgtgtccagctacccaaaaactaatagaagagtcacagagaaaaatgaacgctttatttgaaggtagacgcatcgaatttgcagaacaaataaataaaatggaggctaggcctagaagacaatcaatgaaggaaaaagagcatcaggtggtgcgtaatgaagaacagaaggcggaacaagaagagggtaaggtggctcagcgagaggaagagttggaggagacaggtaatcagcacaatgatgtagaaatagaggaagcaggagaggaagaggaaaaggaaatagcgattgttcatagtgatgcagagaaagaacaggaggaggaagaacaaaaacaggaaatggaggttaagatggaggaggaaactgaggtaagggaaagtgagaagcagcaggatagtcagcctgaagaagttatggatgtgctagagatggttgagaatgtcaaacatgtaattgctgaccaggaggtaatggaaactaatcgagttgaaagtgtagaaccttcagaaaatgaagctagcaaagaattggaaccagaaatggaatttgaaattgagccagataaagaatgtaaaaccctttctcctgggaaagagaatgtcagtgctttagacatggaaaaggagtctgaggaaaaagaagaaaaagaatctgagccccaacctgagcctgtggctcaacctcagcctcagtctcagccccagcttcagcttcaatcccagtcccaaccagtactccagtcccagcctccctctcagcctgaggatttgtcattagctgttttacagccaacaccccaagttactcaggagcaagggcatttactacctgagaggaaggattttcctgtagagtctgtaaaactcactgaggtaccagtagagccagtcttgacagtacatccagagagcaagagcaaaaccaaaactaggagcagaagtagaggtcgagctagaaataaaacaagcaagagtagaagtcgaagcagtagcagtagcagttctagtagcagttcaaccagtagcagcagtggaagtagttccagcagtggaagtagtagcagtcgcagtagttccagtagcagctccagtacaagtggcagcagcagcagagatagtagcagtagcactagtagtagtagtgagagtagaagtcggagtaggggccggggacataatagagatagaaagcacagaaggagcgtggatcggaagagaagggatacttcaggactagaaagaagtcacaaatcttcaaaaggtggtagtagtagagatacaaaaggatcaaaggataagaattcccggtccgacagaaagaggtctatatcagagagtagtcgatcaggcaaaagatcttcaagaagtgaaagagaccgaaaatcagacaggaaagacaaaaggcgttaatggaagaagccaggctttcttagccattctttgcagcagaagatttcttgataaaaaaggattacctttccttgtaaagaggatgctgccttaagaattgcatgttgtaaaaaatctttttggaaaatacagactgtttgtttaccagacattcttgtactttttgcataattttgtaagagttatttatcaaaattatgtgaggttccaaaatatgtaaaaatgataataataaaaaaagattaacatcccttgtcatcttttttaaatatcctatactcttcagtaagaatctgtatattttaataggcaaatctttaagtctgttcccttctaattctgtatcatacattgcttttgtagaaataaatgtgtgtttatttcattatttttgggatgtcctcgttgacacttgtataataaatatcctctttatcattttcagcttttaacactagatactgcacgtgattagaatgtttttgaaggtttcctcgtttttatttgccttggacagtttttagttgtcagagtcagagctttgcagctttgagggggaacagttctctttaaaatcatttgctattttctattctcccttgttattttaatctaagcattttcccccgtttctcatattttaaccatatgttcggtagataactaaacagtatgatctggttggcattttcttcctgatgatgggagcgtcattcttttgtcttcatggttacttgtgtgatataacatacatctgttaaagaaaatcacttctttctaggggagggaggtagaaaagtatctttcaaacttggtttttgagtttgtgtcttgtcttaactttgtgttggctctaacttaaacatgctgatatgtgttttcaagaattttgtttaaggaagtattgtatggaagtccacaaaatgaaggaagttcatctaggttttaatatgtaagcaagataacacacaagtgtaccaagtgattattaactttgttgttttacaaatttgtatgaacttggagtatctgttggccattactatacatgtgcaaataaatgtggcttagacttgtgtgactgcttaagactagtacttgtattaactttctgatgctttatacaagagagcacttaaattgcatccttctttgagtttaacactgtagctttagccttgactttgaatattcattttgccttcccttgacaagtaaatggttacagtgaaaatgtgaagaagtatttccagttagtttttgtgtgtatataactcacttgtgtaagtggatgtgttaaaagatctctttttaaaaatccttttattggagtaattattaaaacagtaaatgca

SEQ ID NO: 130864 - DNA, 2154 bp, Artificial Sequence
  derived and/or modified sequence
atggcagttgcggttcgtacactccaggagcagctggagaaagctaaagaatccctgaaaaatgtggacgaaaacatccgaaagttaactggtcgcgaccccaacgacgtaagacccatccaggcgcggttattggccctttccggcccaggaggcggaaggggacgaggtagcttattgctccgcagggggttctccgattcaggaggaggaccccccgctaaacagagagacctcgaaggcgcggtgagcaggctgggcggggagaggcggactcggcgcgagtcacggcaggaatctgatcctgaggacgacgatgtaaaaaaacctgccctgcaatctagtgtggtggcaacatctaaggagcgtacaaggagggatctgatccaggatcagaacatggacgagaagggaaagcagagaaatagaagaatttttggattattaatgggaactctccaaaagttcaagcaggaaagcacagtggcaaccgagcgtcagaaaaggcgacaagaaattgagcagaagctggaagtccaggccgaggaggagcggaagcaagttgagaacgagcgccgtgaactgtttgaggaaagaagggccaaacagaccgagctgaggctgttggaacagaaagttgagctggcccagttacaggaggaatggaacgagcataatgccaagataatcaaatacatccgtacgaaaactaaacctcacctcttttacatacccggaagaatgtgccctgctacacagaagctgattgaggaatcccagagaaagatgaacgctcttttcgaggggaggagaatagaattcgctgagcagatcaacaaaatggaggcaaggcccaggaggcagtcaatgaaggagaaagagcaccaagtggttaggaatgaggaacagaaggctgaacaggaggagggaaaggttgcacagcgggaggaggagctggaggaaaccgggaaccagcacaacgatgtagagatcgaggaggcaggggaagaggaggagaaagagattgcaatcgttcacagtgatgcagagaaagaacaagaggaggaggaacagaaacaagagatggaggttaagatggaagaggagaccgaggtgcgggagagcgaaaagcaacaggattcgcagccggaagaggtgatggatgtgctcgaaatggtggagaacgtgaaacacgtgattgcggatcaggaggtaatggagactaaccgggttgagtctgtcgaaccctctgagaacgaagctagtaaagagcttgagcccgaaatggaattcgaaatcgagcctgataaagaatgcaaaacattgagcccaggcaaagagaatgtgtccgctttagacatggagaaagagtcagaagagaaagaagagaaggagtctgagccccagccagagcctgtcgctcagcctcagccccagtctcaaccacagttacagctgcagagtcagtcacagcctgtgctgcagtcccagccaccatcgcagcctgaggatttgtcccttgctgtcttacagcccaccccccaggtgactcaggaacaggggcacctcttgccagagaggaaggattttcccgttgaatcggttaagctaactgaggtgcctgtggaacctgtattaacagtacatcccgaatccaagtccaaaaccaaaactaggtcacgtagcagaggcagggcacggaataaaacctcaaagagtagaagtaggtccagttcctcctcctcgagcagctcaagtagtacgagcagcagcagcggaagttctagctccagtggatcatcctcaagccggagttcatcttcgagctcttcttctacatctggcagtagcagccgtgacagcagttcgagcacctctagctcctccgaatctcggtcacggtctagaggaagaggccacaacagagaccggaagcacagaagatcagtggacagaaagaggcgagatacttcgggcttggagcggagtcacaaatctagcaaaggtggctcatcccgagatacaaaagggtcaaaggataagaacagccggagcgatagaaaacgatctatctccgaatccagtcggagcggtaagcgatcatccagaagcgagcgcgatcgcaagtcagacaggaaggataagcgcaggtag

SEQ ID NO: 130865 - DNA, 2154 bp, Artificial Sequence
  derived and/or modified sequence
atggctgtggccgtgaggaccctgcaggagcagctggagaaggccaaggagagcctgaagaatgtggatgagaacatcaggaagctgaccggccgggaccccaatgatgtgcggcccatccaggcccggctgctggccctgagcggccctgggggcggccggggccggggcagcctgctgctgcggcggggcttcagtgacagcggcggcggccccccagccaagcagagggacctggagggcgctgtgtcccggctgggcggggagaggaggacccggcgggagagccggcaggagagtgaccctgaagatgatgatgtgaagaagccagccctgcagagctctgtggtggccaccagcaaggagaggacccggcgggacctgatccaggaccagaacatggatgagaagggcaagcagaggaacagacgcatcttcggcctgctgatgggcaccctgcagaagttcaagcaggagagcacagtggccacagagcggcagaagaggcggcaggagattgagcagaagctggaggtgcaggccgaggaggagaggaagcaggtggagaatgaaagaagagagctgtttgaggagcggcgggccaagcagacagagctgcggctgctggagcagaaggtggagctggcccagctgcaggaggagtggaatgagcacaatgccaagatcatcaagtacatccgcaccaagaccaagccccacctgttctacatccctggccgcatgtgcccagccacccagaagctgattgaggagagccagaggaagatgaatgccctgtttgagggccgccgcatcgagtttgctgagcagatcaacaagatggaggcccggccccggcggcagagcatgaaggagaaggagcaccaggtggtgagaaatgaggagcagaaggccgagcaggaggagggcaaggtggcccagcgggaggaggagctggaggagaccggcaaccagcacaatgatgtggagattgaggaggccggggaggaggaggagaaggagatcgccatcgtgcacagtgatgctgagaaggagcaggaggaggaggagcagaagcaggagatggaggtgaagatggaggaggagacagaggtgcgggagagcgagaagcagcaggacagccagcctgaggaggtgatggatgtgctggagatggtggagaatgtgaagcacgtgattgctgaccaggaggtgatggagaccaacagagtggagagcgtggagcccagtgaaaatgaggccagcaaggagctggagcctgagatggagtttgaaattgaaccagacaaggagtgcaagaccctgagccctgggaaggaaaatgtgtctgccctggacatggagaaggagagcgaggagaaggaggagaaggagagcgagccccagcctgagcctgtggcccagccccagccccagagccagccccagctgcagctgcagagccagagccagcctgtgctgcagagccagccccccagccagcctgaggacctgagcctggccgtgctgcagcccaccccccaggtgacccaggagcagggccacctgctgcctgagaggaaggacttccctgtggagagcgtgaagctgacagaggtgcctgtggagcctgtgctgactgtgcaccctgagagcaagagcaagaccaagaccaggagccgcagccggggccgggccaggaacaagaccagcaagagccgcagccgcagcagcagcagcagcagcagcagcagcagcagcaccagcagcagcagcggcagcagcagcagcagcggcagcagcagcagccgcagcagcagcagcagcagcagcagcaccagcggcagcagcagccgggacagcagcagcagcaccagcagcagcagcgagagccgcagccgcagccggggccggggccacaacagagacaggaagcacagaagatctgtggacaggaagaggcgggacaccagcggcctggagaggagccacaagagcagcaagggcggcagcagccgggacaccaagggcagcaaggacaagaacagcagaagtgacaggaagaggagcatcagcgagagcagccgcagcggcaagaggagcagccgctctgagcgggacaggaagagtgacaggaaggacaagagaagatag

SEQ ID NO: 130866 - DNA, 2154 bp, Artificial Sequence
  derived and/or modified sequence
atggccgtggccgtgcggaccctgcaggagcagctggagaaggccaaagagagcctgaagaatgtggatgagaatattcgcaagttgactgggcgagatcccaacgatgtcaggccaattcaggcccggctcctggcactgagtggacccgggggtggccggggcaggggatccctgctgcttaggcgcggattctctgactctggaggtggccctccagctaagcagcgggaccttgagggagccgtgtcccggctcggtggtgaacgccgcacccggagggaatctagacaggaatctgatccagaggatgacgacgtgaagaaaccagctttgcagtcttccgtggtagctaccagcaaggaacgaaccagaagagatctgatacaggatcaaaacatggatgagaaggggaagcagagaaaccgccggatcttcggcctgttgatgggcacgttacagaaattcaagcaggaaagcaccgtggccacagagcgccagaaacgccgacaggagattgaacagaaacttgaggtgcaggctgaggaggaaagaaaacaggtagagaatgagcgccgcgagctctttgaggagaggcgagccaagcagactgaactgcgcctgctcgagcagaaggttgagctggcccagttacaggaggagtggaatgagcataacgctaagatcatcaaatacatacgcactaagacaaagccgcatcttttctacattcctggccgcatgtgccctgccacacagaagctaatagaagaatctcagcgcaagatgaacgctttatttgagggcagacgtatcgagttcgctgaacaaatcaacaagatggaggctaggcctcgtcgccaatccatgaaggagaaagagcatcaagtggtccgtaatgaggagcagaaggcagagcaggaggaaggaaaagtcgcccagcgagaagaggagctggaggagactggaaaccagcacaacgacgttgaaatcgaggaagccggggaggaagaggaaaaggaaatcgccattgtgcacagcgacgcagaaaaggagcaagaggaagaagaacagaaacaggagatggaagttaaaatggaagaggaaacagaggtcagggagtccgaaaagcagcaagactcccaaccagaggaggtcatggacgtcctggaaatggtggaaaacgtgaagcacgttattgccgaccaggaggtgatggagactaatagggtggagagtgtcgagccctcagaaaacgaggcttccaaagagctggagccggagatggagttcgaaattgagcctgataaagaatgcaagacactgtctccagggaaagaaaacgtctcggcgctggatatggaaaaggagtctgaagagaaagaggagaaggaatctgagccccagcccgagcccgtggcgcagccccagcctcaatctcagccacagttgcagctgcagagtcagagtcagccagtcctccaatctcagccgccatcgcagcctgaggacctgagcctggctgtgctgcaacccaccccacaggtgacccaagaacaaggacatttgctgccagagcgaaaggacttcccagtagaatctgtaaagctcaccgaggtgcccgttgaacccgtgttgacagtacaccccgagtccaagagcaaaaccaagacaaggtctcggtctcgaggtcgggctcgtaataagacatccaaatcaagaagccgaagcagcagcagcagctcctcctcttcctcttcaacctcctctagctccggatcaagcagctcgtctgggtcatcaagcagccgctcttcctcaagcagctcaagctcaacgagtggaagtagcagcagggatagtagcagttcaacttccagttctagtgagagtagaagcagaagcagaggtcgaggccataacagagaccgaaaacaccggagatcggtggatcggaagaggagggatacgtccgggctggagcgctcccacaaatcatccaaaggcggatcaagtcgggacaccaaggggagtaaggacaagaactcgcgatctgaccgcaagcgctcaattagtgagtcatcaaggtccgggaaacgtagctcgcgtagcgaaagagacagaaagtccgatagaaaagacaaaaggaggtag

SEQ ID NO: 130867 - DNA, 2154 bp, Artificial Sequence
  derived and/or modified sequence
atggcagtagccgtacggaccctccaagagcaactcgaaaaagccaaagagagcttaaaaaacgtcgatgaaaatattcgcaagctgaccgggcgtgatcctaacgatgttcggccaatccaagcaaggcttctggccctctcaggcccagggggtggacgcggacgcggtagtttactcctcagacgaggattttctgattctggagggggtcctcctgccaagcaaagggatctggagggagcagtgagcaggctagggggtgagagacggactagaagagagtcaaggcaggagagtgatcctgaggatgacgatgtgaagaagcctgcccttcaaagcagtgtagtcgcgacaagcaaggagcgaacacggagggacctcattcaagaccagaatatggacgagaagggaaaacagagaaatcgtcgtatattcggtcttctaatgggtaccctccagaaattcaaacaggaatccaccgttgcgaccgagcggcagaaacgtcggcaggaaattgagcaaaagttggaggttcaggccgaggaggagagaaagcaggtagagaatgaaaggcgggagctgttcgaggagaggagggccaaacagaccgagctccggcttctggagcagaaagttgaactagcacaactgcaggaagagtggaacgaacataacgcaaaaatcatcaaatatatccgaacgaaaaccaagcctcacttgttctatattcctgggaggatgtgccccgctactcagaagcttatcgaagaatctcaacggaagatgaacgctttgtttgaagggagacgtatagagtttgccgaacagatcaataagatggaggcccgacccagacgacagtctatgaaagaaaaggagcaccaagtggttaggaacgaagaacagaaagctgaacaggaagaggggaaggtggcccagcgtgaagaagagttggaggaaacaggcaaccagcacaatgacgtggagatcgaagaagctggtgaggaggaagagaaggaaatcgccatcgtgcacagtgacgcagagaaggagcaggaggaggaggagcaaaagcaggagatggaggttaagatggaggaagaaacagaagtgcgggagagtgagaaacagcaggactcgcagccggaggaagtcatggacgttttagaaatggtcgaaaacgtaaagcatgtgatcgccgatcaagaggtgatggagacgaatcgagttgagtccgttgagccgtctgagaatgaagctagtaaggagcttgaacccgaaatggaatttgaaatcgagcccgacaaggaatgtaagacactttctcctgggaaggagaatgtctcggccctcgatatggagaaggagtccgaggagaaggaggaaaaggagtcagaaccgcagccagagcctgttgcccaacctcagcctcaatcccaacctcagcttcagctgcagtcacagtcgcagcccgttctgcagtcccagcccccatcacaacccgaggatctgtcattggccgtgttgcagccaaccccccaagtgacgcaagaacagggccacctgctacctgaaaggaaggacttccctgtggagtctgtcaaactgaccgaggtgcctgtggagcccgtgctgaccgttcaccccgagtcaaagtctaagactaagactcgctctagatcacgagggcgtgcccgaaataaaacctccaaaagccgatcccgctcttcttcatcctcatccagcagctcatcgagtacttcaagcagctcgggatcatcctccagtagcggaagcagttcctccagaagctccagtagttcatcctcttctacctctgggtcttcctcccgggactctagttccagcacctcatcctcatcagaatctcggtcaagaagccggggacgtggtcacaatagagatcggaagcacaggcggtctgtggaccggaagcgacgggatactagcggcctggaaaggagtcataaaagctctaaaggaggttcctcccgggacaccaaaggcagcaaggataaaaactcaaggtccgaccgaaaaagatcgatctctgagtcgagcagaagcggcaaacggagcagcagatccgagagggatcgaaaatccgataggaaggacaagcgcagatag

SEQ ID NO: 130868 - DNA, 2154 bp, Artificial Sequence
  derived and/or modified sequence
atggccgtggccgtgagaaccctgcaggagcagctggagaaggccaaggagagcctgaagaacgtggacgagaacatcagaaagctgaccggcagagaccccaacgacgtgagacccatccaggccagactgctggccctgagcggccccggcggcggcagaggcagaggcagcctgctgctgagaagaggcttcagcgacagcggcggcggcccccccgccaagcagagagacctggagggcgccgtgagcagactgggcggcgagagaagaaccagaagagagagcagacaggagagcgaccccgaggacgacgacgtgaagaagcccgccctgcagagcagcgtggtggccaccagcaaggagagaaccagaagagacctgatccaggaccagaacatggacgagaagggcaagcagagaaacagaagaatcttcggcctgctgatgggcaccctgcagaagttcaagcaggagagcaccgtggccaccgagagacagaagagaagacaggagatcgagcagaagctggaggtgcaggccgaggaggagagaaagcaggtggagaacgagagaagagagctgttcgaggagagaagagccaagcagaccgagctgagactgctggagcagaaggtggagctggcccagctgcaggaggagtggaacgagcacaacgccaagatcatcaagtacatcagaaccaagaccaagccccacctgttctacatccccggcagaatgtgccccgccacccagaagctgatcgaggagagccagagaaagatgaacgccctgttcgagggcagaagaatcgagttcgccgagcagatcaacaagatggaggccagacccagaagacagagcatgaaggagaaggagcaccaggtggtgagaaacgaggagcagaaggccgagcaggaggagggcaaggtggcccagagagaggaggagctggaggagaccggcaaccagcacaacgacgtggagatcgaggaggccggcgaggaggaggagaaggagatcgccatcgtgcacagcgacgccgagaaggagcaggaggaggaggagcagaagcaggagatggaggtgaagatggaggaggagaccgaggtgagagagagcgagaagcagcaggacagccagcccgaggaggtgatggacgtgctggagatggtggagaacgtgaagcacgtgatcgccgaccaggaggtgatggagaccaacagagtggagagcgtggagcccagcgagaacgaggccagcaaggagctggagcccgagatggagttcgagatcgagcccgacaaggagtgcaagaccctgagccccggcaaggagaacgtgagcgccctggacatggagaaggagagcgaggagaaggaggagaaggagagcgagccccagcccgagcccgtggcccagccccagccccagagccagccccagctgcagctgcagagccagagccagcccgtgctgcagagccagccccccagccagcccgaggacctgagcctggccgtgctgcagcccaccccccaggtgacccaggagcagggccacctgctgcccgagagaaaggacttccccgtggagagcgtgaagctgaccgaggtgcccgtggagcccgtgctgaccgtgcaccccgagagcaagagcaagaccaagaccagaagcagaagcagaggcagagccagaaacaagaccagcaagagcagaagcagaagcagcagcagcagcagcagcagcagcagcagcaccagcagcagcagcggcagcagcagcagcagcggcagcagcagcagcagaagcagcagcagcagcagcagcagcaccagcggcagcagcagcagagacagcagcagcagcaccagcagcagcagcgagagcagaagcagaagcagaggcagaggccacaacagagacagaaagcacagaagaagcgtggacagaaagagaagagacaccagcggcctggagagaagccacaagagcagcaagggcggcagcagcagagacaccaagggcagcaaggacaagaacagcagaagcgacagaaagagaagcatcagcgagagcagcagaagcggcaagagaagcagcagaagcgagagagacagaaagagcgacagaaaggacaagagaagatag

SEQ ID NO: 130869 - protein, 378 aa, Artificial Sequence
  derived and/or modified sequence
MDSLAAPQDRLVEQLLSPRTQAQRRLKDIDKQYVGFATLPNQVHRKSVKKGFDFTLMVAGESGLGKSTLVHSLFLTDLYKDRKLLSAEERISQTVEILKHTVDIEEKGVKLKLTIVDTPGFGDAVNNTECWKPITDYVDQQFEQYFRDESGLNRKNIQDNRVHCCLYFISPFGHGLRPVDVGFMKALHEKVNIVPLIAKADCLVPSEIRKLKERIREEIDKFGIHVYQFPECDSDEDEDFKQQDRELKESAPFAVIGSNTVVEAKGQRVRGRLYPWGIVEVENQAHCDFVKLRNMLIRTHMHDLKDVTCDVHYENYRAHCIQQMTSKLTQDSRMESPIPILPLPTPDAETEKLIRMKDEELRRMQEMLQRMKQQMQDQ

SEQ ID NO: 130870 - protein, 322 aa, Artificial Sequence
  derived and/or modified sequence
MVAGESGLGKSTLVHSLFLTDLYKDRKLLSAEERISQTVEILKHTVDIEEKGVKLKLTIVDTPGFGDAVNNTECWKPITDYVDQQFEQYFRDESGLNRKNIQDNRVHCCLYFISPFGHGLRPVDVGFMKALHEKVNIVPLIAKADCLVPSEIRKLKERIREEIDKFGIHVYQFPECDSDEDEDFKQQDRELKESAPFAVIGSNTVVEAKGQRVRGRLYPWGIVEVENQAHCDFVKLRNMLIRTHMHDLKDVTCDVHYENYRAHCIQQMTSKLTQDSRMESPIPILPLPTPDAETEKLIRMKDEELRRMQEMLQRMKQQMQDQ

SEQ ID NO: 130871 - protein, 149 aa, Artificial Sequence
  derived and/or modified sequence
LPNQVHRKSVKKGFDFTLMVAGESGLGKSTLVHSLFLTDLYKDRKLLSAEERISQTVEILKHTVDIEEKGVKLKLTIVDTPGFGDAVNNTECWKPITDYVDQQFEQYFRDESGLNRKNIQDNRVHCCLYFISPFGHGLRPVDGFHEGIA

SEQ ID NO: 130872 - protein, 369 aa, Artificial Sequence
  derived and/or modified sequence
MSTGLRYKSKLATPEDKQDIDKQYVGFATLPNQVHRKSVKKGFDFTLMVAGESGLGKSTLVHSLFLTDLYKDRKLLSAEERISQTVEILKHTVDIEEKGVKLKLTIVDTPGFGDAVNNTECWKPITDYVDQQFEQYFRDESGLNRKNIQDNRVHCCLYFISPFGHGLRPVDVGFMKALHEKVNIVPLIAKADCLVPSEIRKLKERIREEIDKFGIHVYQFPECDSDEDEDFKQQDRELKESAPFAVIGSNTVVEAKGQRVRGRLYPWGIVEVENQAHCDFVKLRNMLIRTHMHDLKDVTCDVHYENYRAHCIQQMTSKLTQDSRMESPIPILPLPTPDAETEKLIRMKDEELRRMQEMLQRMKQQMQDQ

SEQ ID NO: 130873 - DNA, 1137 bp, Artificial Sequence
  derived and/or modified sequence
atggatagtttagccgcaccccaagaccgtcttgtggagcagctgcttagcccaaggacccaggcacagagacgcctgaaggacatcgataagcaatatgttggctttgcgaccctgcccaaccaggtgcatcggaagtctgtgaaaaagggcttcgactttacactcatggtggctggtgagtctggtttgggaaaatcaactctagtccactctctattcttaacagatctttacaaagacagaaagttgcttagtgccgaggaacgaatcagtcagacagtcgagattttgaaacacaccgtggatattgaggagaaaggagtgaaactgaaactcactatcgtggacacccccggttttggagacgccgttaataacaccgaatgttggaaaccaatcactgactacgtagaccaacaatttgaacagtactttcgcgacgagtctgggctaaatcgtaaaaacatccaagataaccgcgtacactgttgcttatactttatttcacccttcggccacggcctgagaccggtggatgtaggattcatgaaggccctccacgagaaggtcaacatcgtgccccttatcgccaaagccgactgtctggtcccgtcagaaattcgcaagctgaaagaaagaatccgtgaagagattgacaaattcgggattcacgtgtatcaatttccagagtgtgactcagacgaggacgaagacttcaaacagcaagaccgcgagctgaaagaaagtgcgcccttcgccgtcattgggagtaacaccgtggtagaggcaaaagggcagcgggtcaggggccgcctctatccatggggcatcgtcgaggtcgagaatcaggcgcattgcgatttcgtaaagctgcgcaacatgctcatccgcacacatatgcatgatctgaaagatgtgacttgcgatgtgcactacgagaactaccgggcccactgcattcaacagatgaccagcaaattgacgcaggactcccgaatggagtcacccataccaatcctgccactgcccacccctgacgcggagacagagaaactgattcggatgaaagacgaagaattacggcgcatgcaagagatgctgcagcgaatgaagcaacagatgcaggaccaatag

SEQ ID NO: 130874 - DNA, 969 bp, Artificial Sequence
  derived and/or modified sequence
atggtagccggcgagtctggactagggaaatccacactcgtgcatagcctgttcttgacagatctgtacaaggaccgcaaattgctgtctgctgaagagcggatatcacaaaccgtggagatcctgaaacatacggttgacattgaagagaaaggggtgaaactgaaactaaccattgtggatacccccggctttggagacgccgtgaacaacaccgaatgttggaagccaattactgattacgtggaccagcagtttgagcagtactttagggatgagagcggtctgaatcgcaaaaacattcaggacaatagggtccactgctgcttgtactttatttcaccatttggtcacggcttgaggcccgtcgatgtcggattcatgaaggctctccacgagaaagtgaatattgtacctcttatcgccaaggccgactgcctagttcccagtgagattcgcaaactcaaagagcgaatccgggaagagattgataaatttggcatacatgtataccagtttcctgagtgtgattctgatgaggatgaggattttaaacagcaagaccgggagctcaaggagtcagctcccttcgcagttattggctccaatacagtcgtggaggctaagggccagagggttagagggagactttatccatggggaattgtggaggtggagaatcaggcacactgcgattttgtgaagctcagaaatatgctgattaggactcatatgcacgatctaaaggatgttacctgtgacgtgcactatgagaattatagagcacattgcatccagcagatgacttcaaagttgacgcaggactcgagaatggaaagtcccatcccaattctcccgttgcctacaccagacgccgagacagagaaattaattaggatgaaggatgaagagctccgtcgcatgcaggaaatgctgcagaggatgaagcagcagatgcaggaccagtag

SEQ ID NO: 130875 - DNA, 1110 bp, Artificial Sequence
  derived and/or modified sequence
atgtcgactggcctacggtataagtccaaactcgccaccccggaagacaaacaagatatagataagcagtacgtggggtttgccacacttcctaatcaggttcaccgcaagagcgtaaagaaaggctttgactttaccctgatggtcgccggcgaatcaggtcttgggaaatctacattggtgcatagcctgtttctaactgacttgtataaggacagaaagttgctttccgctgaagaacgcataagccaaacagtggagatcttgaagcacacagtggacatcgaggaaaagggtgttaagctgaaactgacgatcgttgatactcccgggttcggcgacgccgttaataatacagagtgttggaagcccatcactgactacgtggaccagcaattcgagcagtacttccgggacgaaagtggtctgaatcggaagaacatccaggataaccgagtccactgctgcctctacttcatctctccattcgggcatggtcttaggcctgttgatgttggcttcatgaaagctcttcacgagaaagtcaacatagtccctctgattgccaaggccgattgtctcgtgcctagcgagattagaaaactcaaggagagaattagggaggaaatagataaatttgggattcatgtttaccagttccctgagtgtgattccgatgaggacgaggacttcaagcagcaggacagagaattgaaggagagcgcaccttttgctgttatcggatcaaataccgtggtggaggcgaaggggcagcgggtaaggggccgtctgtacccctggggcattgtggaagtcgagaaccaagcccactgcgactttgtgaagctcagaaatatgctgatcaggactcatatgcatgacctcaaggacgtcacttgtgacgttcattacgaaaactaccgggctcactgtattcagcagatgacctctaaacttacccaagactctaggatggaaagtcccatccctatactaccactgccaacgcctgatgccgagacagagaaacttattcgtatgaaagacgaagaattgcgacgcatgcaggaaatgctgcagcgcatgaagcagcagatgcaggaccaatag

SEQ ID NO: 130876 - DNA, 1137 bp, Artificial Sequence
  derived and/or modified sequence
atggattccttggccgccccacaggatagactggtggaacaacttctgtctcctagaacccaagcccagcggcgcctcaaggatattgacaagcagtacgtgggatttgccaccctgcccaaccaggttcacaggaaaagtgtgaaaaaaggcttcgattttaccctgatggtcgctggggagagcggactcggtaaatctactctcgtgcactctttatttctaaccgacctgtacaaagaccgcaaactcctatctgcggaagagcggatttcccagactgtcgagatcctgaagcacaccgtggacattgaggagaagggagtgaagttaaagctgacaattgtggacacaccaggattcggtgacgccgtaaataataccgaatgctggaagcctattacagactacgttgaccaacagttcgaacagtacttcagggacgaaagcgggctgaataggaagaacatccaggacaaccgggttcattgttgcctctattttattagcccattcgggcacggcctccggcctgtagacgtcggttttatgaaagcgcttcacgagaaagtgaatatcgtgccgttaatcgccaaagccgactgccttgtccctagcgaaattcgcaagctgaaggagcggatacgagaggagatagacaaattcggtattcacgtgtatcagtttccagaatgtgacagtgatgaagatgaggactttaagcaacaagatcgtgaactaaaagaaagtgccccttttgctgtcatcggtagtaacaccgttgtggaggccaagggccagcgcgtgcggggacgtctgtacccttggggaatagtagaagtagaaaatcaagcccattgcgactttgtgaagctgcgcaacatgctcatccgaacccacatgcacgatctgaaagacgtcacctgcgatgtacactacgaaaactaccgagcccactgcattcagcagatgacttctaaactgacccaagactcccggatggaatcgccgattcccattttacccctacctactcccgatgctgaaaccgaaaagctcatccggatgaaggacgaggaactgcgccgaatgcaggagatgctgcagagaatgaagcagcaaatgcaagatcagtag

SEQ ID NO: 130877 - DNA, 1137 bp, Artificial Sequence
  derived and/or modified sequence
atggacagcctggccgccccccaggaccggctggtggagcagctgctgagccccaggacccaggcccagaggcggctgaaggacatcgacaagcagtatgtgggctttgccaccctgcccaaccaggtgcacaggaagtctgtgaagaagggctttgacttcaccctgatggtggccggggagagcggcctgggcaagagcaccctggtgcacagcctcttcctgacagacctgtacaaggacaggaagctgctgtctgctgaggagcgcatcagccagacagtggagatcctgaagcacacagtggacatcgaggagaagggcgtgaagctgaagctgaccatcgtggacaccccaggctttggagatgctgtgaacaacacagagtgctggaagcccatcacagattatgtggaccagcagtttgagcagtacttcagagatgagagcggcctgaacaggaagaacatccaggacaacagagtgcactgctgcctgtacttcatcagccccttcggccacggcctgcggcctgtggatgtgggcttcatgaaggccctgcacgagaaggtgaacatcgtgcccctgattgccaaggctgactgcctggtgcccagcgagatcaggaagctgaaggagcgcatccgggaggagattgacaagtttggcatccacgtgtaccagttcccagaatgtgacagtgatgaagatgaggacttcaagcagcaggaccgggagctgaaggagagcgccccctttgctgtgattggcagcaacacagtggtggaggccaagggccagagggtgcggggccgcctgtacccctggggcatcgtggaggtggagaaccaggcccactgtgactttgtgaagctgaggaacatgctgatccgcacccacatgcatgacctgaaggatgtgacctgtgatgtgcactatgagaactaccgggcccactgcatccagcagatgaccagcaagctgacccaggacagcaggatggagagccccatccccatcctgcccctgcccaccccagatgctgagacagagaagctgatccgcatgaaggatgaggagctgcggaggatgcaggagatgctgcagaggatgaagcagcagatgcaggaccagtag

SEQ ID NO: 130878 - DNA, 969 bp, Artificial Sequence
  derived and/or modified sequence
atggtggccggggagagcggcctgggcaagagcaccctggtgcacagcctcttcctgacagacctgtacaaggacaggaagctgctgtctgctgaggagcgcatcagccagacagtggagatcctgaagcacacagtggacatcgaggagaagggcgtgaagctgaagctgaccatcgtggacaccccaggctttggagatgctgtgaacaacacagagtgctggaagcccatcacagattatgtggaccagcagtttgagcagtacttcagagatgagagcggcctgaacaggaagaacatccaggacaacagagtgcactgctgcctgtacttcatcagccccttcggccacggcctgcggcctgtggatgtgggcttcatgaaggccctgcacgagaaggtgaacatcgtgcccctgattgccaaggctgactgcctggtgcccagcgagatcaggaagctgaaggagcgcatccgggaggagattgacaagtttggcatccacgtgtaccagttcccagaatgtgacagtgatgaagatgaggacttcaagcagcaggaccgggagctgaaggagagcgccccctttgctgtgattggcagcaacacagtggtggaggccaagggccagagggtgcggggccgcctgtacccctggggcatcgtggaggtggagaaccaggcccactgtgactttgtgaagctgaggaacatgctgatccgcacccacatgcatgacctgaaggatgtgacctgtgatgtgcactatgagaactaccgggcccactgcatccagcagatgaccagcaagctgacccaggacagcaggatggagagccccatccccatcctgcccctgcccaccccagatgctgagacagagaagctgatccgcatgaaggatgaggagctgcggaggatgcaggagatgctgcagaggatgaagcagcagatgcaggaccagtag

SEQ ID NO: 130879 - DNA, 1110 bp, Artificial Sequence
  derived and/or modified sequence
atgagcacaggcctgcgctacaagagcaagctggccaccccagaggacaagcaggacatcgacaagcagtatgtgggctttgccaccctgcccaaccaggtgcacaggaagtctgtgaagaagggctttgacttcaccctgatggtggccggggagagcggcctgggcaagagcaccctggtgcacagcctcttcctgacagacctgtacaaggacaggaagctgctgtctgctgaggagcgcatcagccagacagtggagatcctgaagcacacagtggacatcgaggagaagggcgtgaagctgaagctgaccatcgtggacaccccaggctttggagatgctgtgaacaacacagagtgctggaagcccatcacagattatgtggaccagcagtttgagcagtacttcagagatgaaagtggcctgaacaggaagaacatccaggacaacagagtgcactgctgcctgtacttcatcagcccctttggacatggcctgcggcctgtggatgtgggcttcatgaaggccctgcacgagaaggtgaacatcgtgcccctcatcgccaaggctgactgcctggtgcccagcgagatcaggaagctgaaggagcgcatccgggaggagattgacaagtttggcatccacgtgtaccagtttcctgaatgtgacagtgatgaagatgaggacttcaagcagcaggaccgggagctgaaggagagcgccccctttgctgtgattggcagcaacacagtggtggaggccaagggccagagggtgcggggccgcctgtacccctggggcatcgtggaggtggagaaccaggcccactgtgactttgtgaagctgaggaacatgctgatccgcacccacatgcatgacctgaaggatgtgacctgtgatgtgcactatgagaactaccgggcccactgcatccagcagatgaccagcaagctgacccaggacagcaggatggagagccccatccccatcctgcccctgcccaccccagatgctgagacagagaagctgatccgcatgaaggatgaggagctgcggaggatgcaggagatgctgcagaggatgaagcagcagatgcaggaccagtag

SEQ ID NO: 130880 - DNA, 1137 bp, Artificial Sequence
  derived and/or modified sequence
atggacagcctggccgccccccaggaccggctggtggagcagctgctgagcccaagaactcaagctcagaggagactgaaagacatcgacaagcagtatgtaggatttgccaccctgcccaatcaggtgcaccggaagagcgttaaaaaaggctttgacttcacactcatggtagcgggagaatctggattgggcaagtctaccttggtccactctctcttcttaaccgatctctataaggacagaaagctattgtcggccgaggagcgtatctcgcaaacagtagagatactcaagcatacggtagacattgaggaaaaaggagttaagctgaaactgacgatcgtcgataccccagggttcggggatgccgtcaataacaccgagtgctggaagccaattaccgattatgtggatcagcagttcgaacagtactttagagatgagagcggcctgaataggaagaatatccaggacaaccgcgtgcactgctgtttgtatttcatcagtccgttcggacacggactcagacctgtggacgttggcttcatgaaggctctgcatgaaaaggttaatatagtcccactgattgcaaaggctgattgccttgtcccatctgagatcagaaagctcaaagagcggattcgcgaggaaattgacaaatttggaatccacgtgtaccaatttcccgagtgtgactctgacgaggacgaggactttaaacagcaggatagagagcttaaggaatccgcaccattcgccgtcataggttctaacactgtggtggaagcaaagggccaacgagtgagaggaaggctctacccctgggggatcgtcgaggtggagaatcaggcacactgcgactttgttaagttgagaaacatgctcatccgcacacatatgcacgacctcaaggatgtgacttgcgatgttcactatgaaaattacagagcccattgtattcagcaaatgacttcaaaactgacacaggattctagaatggaatctcctataccaatcctgcctcttcccacccccgatgccgaaactgagaagctgattcgcatgaaggacgaagagctgagacggatgcaggagatgctgcagcgaatgaaacagcagatgcaggatcagtag

SEQ ID NO: 130881 - DNA, 969 bp, Artificial Sequence
  derived and/or modified sequence
atggtggccggcgagagcggcctgggcaagagcaccctggtgcactcactcttcctgaccgacctgtataaggacagaaaactcctcagtgcagaggagaggattagtcaaaccgtggaaatcctgaagcacacagtggatatcgaggagaaaggggtcaaattgaagcttactatagtggatacacctgggtttggtgacgcggtgaacaataccgaatgttggaagcctatcacggactatgtagaccagcagttcgaacagtacttcagggacgaatctgggctgaatcgcaaaaatattcaggataatcgggtacactgttgcctgtattttataagcccatttgggcacggcctcaggcccgttgatgttggctttatgaaggcgctccatgagaaagtcaacatcgtgcccttgatagctaaggcagattgtctcgtgccctctgagatcagaaagctgaaggagcgaataagggaagagattgataagtttggcatccatgtgtatcaattcccagaatgcgatagtgacgaggatgaggactttaagcagcaggacagagagctgaaggaaagcgcaccgttcgccgtgataggatcgaacaccgtggtggaggccaagggacagagggtgcgcggcaggttgtacccgtggggcatcgtggaggtagaaaatcaggcccattgtgatttcgtcaagctccgcaatatgctaatcaggacccacatgcatgacctgaaggatgttacttgtgatgtccactacgagaactaccgcgcccattgtatacaacagatgacttcgaagctgactcaggattctcggatggaaagtccaatcccaatcctccccctcccaacccccgacgccgaaaccgaaaaactgattcgcatgaaagacgaggagttgcgacgtatgcaggagatgctgcagcgaatgaagcagcagatgcaggatcagtag

SEQ ID NO: 130882 - DNA, 1110 bp, Artificial Sequence
  derived and/or modified sequence
atgagcaccggcctgcggtacaagagcaagctggccacccccgaggataaacaagacatcgacaaacagtacgtcggattcgcgacactccccaatcaggtccatcggaaaagcgttaagaagggcttcgacttcacactcatggttgcaggtgaatccggactgggtaagtctacactggtgcactccctgtttctcacagacctgtataaagatcgtaaactgctctcagccgaggaacggatttctcaaaccgttgagatccttaagcacaccgtagatatcgaagagaagggcgtgaaacttaaactcacaattgtggatacccctgggttcggcgacgctgtgaacaatacagagtgctggaaaccaatcacagactatgtcgaccagcagttcgaacagtactttcgcgatgaaagcggactgaacagaaaaaatatacaggacaaccgtgtccactgttgcctgtattttataagcccatttggacatggactgcgaccagtggacgtcgggttcatgaaagctctccacgagaaggtgaatattgttcctctgatcgccaaggcggattgtctcgtacccagcgaaatacgcaagctgaaggagaggatccgagaggagatcgataagttcggtatccacgtgtaccagtttccagaatgtgattctgacgaagacgaggatttcaaacagcaggacagggaactcaaagagagcgccccatttgcggtgattggttccaatactgtggtagaggccaagggccagagggtccggggtaggctctacccctggggaatcgtggaagtcgaaaaccaggcacactgcgatttcgtgaaactccgtaatatgctgatacgtacccatatgcatgatctgaaggacgttacctgcgacgtccactatgaaaactaccgcgcccattgtattcagcagatgaccagcaaattgacccaggacagccgtatggaatctcctatccccatcctgcccctgccaacccccgatgctgagacagagaagctgatccgaatgaaggatgaagagctgcgccgcatgcaggaaatgctacagagaatgaagcagcagatgcaggatcaatag

SEQ ID NO: 130883 - DNA, 1137 bp, Artificial Sequence
  derived and/or modified sequence
atggacagcctggccgccccccaggaccggctggtggagcagctgctaagcccacggactcaggcacagcgcaggctcaaggacatcgacaagcagtacgtggggttcgctaccttgcctaaccaggtgcatcggaagtctgtgaagaaaggtttcgattttacgctgatggttgcaggcgaatctggcctgggcaagagcacattggtgcattctctattccttactgacttgtacaaagacagaaagctgctgtccgcagaagaacggatttctcagacagtggagattctgaaacatactgtggacatcgaggagaaaggcgtgaagttaaagctgaccatcgttgatacccctggcttcggcgacgccgtgaacaatacagagtgttggaagccaatcaccgattatgtggaccagcaattcgaacagtattttcgcgacgagagtggtctcaatcggaagaatatccaggacaacagagtccattgttgtctgtacttcatttcccccttcggtcacgggctgagacccgtggacgtcggtttcatgaaggcattgcacgagaaagtcaatatcgtgccactgattgcgaaagctgactgtctggttccctccgaaatccgaaagctgaaagaacgcatcagggaggaaattgataaatttgggatacacgtataccagtttcccgagtgtgattcggatgaggatgaggactttaaacagcaggaccgggaactcaaggagtcagcacctttcgccgtgatcgggagtaacaccgttgtggaggctaagggtcaacgagtgcgcgggaggctgtacccttgggggatagtggaagtggagaaccaagcacattgcgacttcgtgaaactcaggaacatgttaatccgcacccacatgcacgatttaaaggacgtgacttgtgatgtccactacgagaactatagagcccactgcattcagcagatgacatctaagctaacccaagatagcaggatggaatcccctatcccaattctgccgctccctacccctgatgctgagacggaaaaactgataaggatgaaggacgaagaactccggaggatgcaggagatgctccaaaggatgaaacagcagatgcaagaccagtag

SEQ ID NO: 130884 - DNA, 1137 bp, Artificial Sequence
  derived and/or modified sequence
atggacagtctggcggctccgcaagataggctggtcgaacagcttctgtcccctagaacgcaggcccaacggcgtctgaaggacatcgacaagcagtacgtcggattcgccacactgcctaatcaggtgcacagaaagtcggtgaaaaaagggttcgatttcaccttaatggtggccggtgaatccggactgggcaaaagcacactggtgcactctttgttcctgaccgacctctataaggaccgaaagctattatccgccgaggagcgcatatctcagaccgtcgaaatactgaagcacacagtcgatattgaggaaaagggcgtgaagctaaagttgaccattgtggacacccctgggtttggggacgcggtaaataacaccgaatgctggaagccaatcactgactacgtggaccagcaatttgagcaatatttcagagacgaatcagggcttaaccggaagaacatacaggataatcgcgtgcattgctgtctctactttatatcccctttcgggcacggactcagacctgttgatgtcggattcatgaaggcgttacatgaaaaagtcaatattgttcctctaattgccaaagcagactgtctagttccatcggagattaggaagctgaaagagaggatcagggaagaaatcgacaagttcggaattcatgtctaccagtttccagagtgtgatagtgacgaggatgaggattttaaacagcaggaccgcgagttgaaggaaagcgccccatttgcagtcatagggagcaacactgttgtggaagcaaagggccagcgggtgagagggaggttgtatccgtggggaatcgttgaggtggaaaatcaagcgcactgcgacttcgttaaactaagaaatatgttgattaggacccacatgcacgacctgaaagacgtgacgtgcgacgtgcactatgaaaattatcgagcacactgcattcaacaaatgacctctaagctgactcaggattctaggatggagagcccaatccccattcttcctttgcctactcctgatgccgaaacagagaaacttatccgcatgaaagacgaggagctgcgaagaatgcaggaaatgcttcaacggatgaaacagcaaatgcaggatcagtag

SEQ ID NO: 130885 - DNA, 969 bp, Artificial Sequence
  derived and/or modified sequence
atggttgccggagaaagtgggttgggaaaatcaaccctggttcactctttattccttactgacctgtataaagatcgaaaactgctgagcgccgaggaaagaatttcccagaccgtcgagattttaaaacatactgtggacattgaggaaaaaggcgtaaaactcaaactcacaattgtcgacactccaggcttcggcgacgccgtgaacaacaccgagtgttggaagcccatcacagattacgtggaccagcagttcgagcagtactttcgggacgaatctggcttgaaccgcaaaaacattcaagacaacagagtccattgttgtctgtatttcatctcccccttcggccacggactacggcctgtagacgtgggattcatgaaagcgctgcacgagaaagtgaacatcgtgcccctgatagcgaaggccgattgcctggtgccttcggaaattagaaaactgaaagaacgtatccgcgaagagattgataagttcggtatccacgtctaccaatttcccgagtgcgatagcgacgaagacgaggacttcaagcagcaagacagagaactgaaggagtccgccccattcgccgtgatcggctcgaatactgtggtggaggcaaaggggcagcgtgtgcgaggcaggctgtacccttgggggatcgtagaagtggaaaatcaggcccactgtgattttgtaaagctcagaaacatgctgatccgcacacacatgcatgacctgaaggatgtcacatgtgatgtccattacgagaactacagggctcattgtatccagcaaatgacctccaaactgactcaggactctcggatggaatctcctattcccattctgccattaccaaccccagatgctgagaccgagaaactgatccgtatgaaggacgaggagctgcgtcgtatgcaggaaatgctgcagaggatgaagcagcagatgcaggatcagtag

SEQ ID NO: 130886 - DNA, 1110 bp, Artificial Sequence
  derived and/or modified sequence
atgtcaacgggtctgcgttacaagagtaagctcgcgacacctgaggacaaacaggacatagacaaacaatatgtgggttttgccactcttcccaaccaggtgcatcgaaaatctgtgaagaaaggatttgacttcactctaatggttgctggtgaaagcggactggggaaaagtaccctggttcacagcctcttcctgaccgacttgtacaaagaccggaagctacttagcgctgaggagagaatcagccagaccgtcgagattctgaagcacacagtggacatagaggagaaaggcgttaagctgaagctcactatcgtggatacccctggtttcggggatgctgttaacaatactgagtgttggaaaccaatcacagattatgtcgatcaacagtttgaacagtatttccgagatgaatcgggattaaatagaaagaatatccaggataatcgggttcattgctgtctgtattttatctctcccttcggtcatggattaaggcccgtcgatgtggggttcatgaaggcactgcacgagaaggtcaatatagtccccctaatcgcaaaagccgattgtctggtgccctccgagattcgaaaattaaaggagcggattcgcgaagagatagacaagtttgggatccatgtctatcagttcccagagtgtgattcagatgaagatgaagattttaaacagcaggatagggaactcaaagagagcgcacccttcgcggttattgggtctaacaccgttgtcgaggccaagggccaacgtgtgagggggagactgtacccctgggggatagttgaggtggagaaccaggctcactgcgactttgtgaaactgcggaatatgctgattcgaacacatatgcacgacttgaaggatgtaacgtgcgatgttcattatgagaattatagagctcactgcatccagcagatgacgtctaagctgacacaagactcacgcatggagagtcctattccgatcctgccacttcccacacctgacgcggagacagagaagctgattcgcatgaaggacgaagagcttagaagaatgcaggagatgttgcaacgcatgaagcaacagatgcaggaccagtag

SEQ ID NO: 130887 - DNA, 1137 bp, Artificial Sequence
  derived and/or modified sequence
atggatagcctggccgctcctcaagacaggcttgtcgagcaattgctgtctccccgaacacaggcacagcgacgccttaaggacattgacaaacaatatgttggctttgccactttgcctaaccaggttcaccggaaatctgtgaaaaagggctttgacttcacactgatggtcgccggagagtccggattggggaagagcactctagtccactccctgtttctaaccgatctctataaggatcgtaagctgcttagcgctgaagaaaggatttcacagaccgtggaaatcttaaagcatactgtcgacatagaggaaaaaggagtgaagcttaagctgacaatcgtcgatactccaggatttggcgacgccgtaaacaacacagaatgttggaaacccattaccgattacgtcgaccagcaattcgagcagtactttagagatgaaagtggcctgaaccgtaagaacatccaggacaaccgggtgcattgttgcctatacttcatcagtccattcgggcacgggctgcggcctgtggacgttggattcatgaaggccctccacgaaaaggtcaacatcgtgccgcttattgcaaaggctgattgtctggtgccctccgagatcaggaagttgaaggagcgcatcagagaggagatagacaagttcgggatccacgtgtaccagtttccggaatgtgatagcgacgaggacgaggactttaagcaacaggacagggaattgaaggaaagcgcgccttttgccgttattggaagcaacacagtcgttgaagctaagggacagagagtgcggggaagactgtatccctggggcatcgttgaagtggagaatcaggcccattgcgacttcgttaaactccggaacatgctgattcggacccacatgcatgacttgaaagacgtgacatgtgatgttcattacgagaattatcgggcacactgtatccagcagatgacatcaaaattgacacaggactcacgcatggagagtcccatacccatcctccctctacccacacccgacgccgagaccgagaaactcatcaggatgaaagatgaggagctgcggagaatgcaagagatgctccaaagaatgaaacagcagatgcaggaccagtag

SEQ ID NO: 130888 - DNA, 1588 bp, Artificial Sequence
  derived and/or modified sequence
cgcgggcgcctgcgacgccccgcctctggctcgggtgcgggagcggggcctgcccggactgcgacgccgccacagcttggggccagttcgcccagtcagggggatggctcggtcggcctcgggggtcgacgatcccccgggtaggcgacgtgccctgtccaggcctcacttcccgcgtccgcaaaacggggtggacaacgcagcctaaggcagagccgcgccaaggtccctcgctgtcgccgggctctggcggcctgaccgggcctggggtccgagcgtgcccccgggcctgggggggtcgccgcgatggactcgctggcagcgccccaggaccgcctggtggagcagctgctgtcgccgcggacccaggcccagaggcggctcaaggacattgacaagcagtacgtgggcttcgccacactgcccaaccaggtgcaccgcaagtcggtgaagaaaggctttgacttcacactcatggtggctggtgagtcaggcctggggaagtccacactggtccacagcctcttcctgacagacttgtacaaggaccggaagctgctcagtgctgaggagcgcatcagccagacggtagagattctaaaacacacggtggacattgaggagaagggagtcaagctgaagctcaccatcgtggacacgccgggattcggggacgctgtcaacaacaccgagtgctggaagcccatcaccgactatgtggaccagcagtttgagcagtacttccgtgatgagagcggcctcaaccgaaagaacatccaagacaaccgagtgcactgctgcctatacttcatctcccccttcgggcatgggctgcggccagtggatgtgggtttcatgaaggcattgcatgagaaggtcaacatcgtgcctctcatcgccaaagctgactgtcttgtccccagtgagatccggaagctgaaggagcggatccgggaggagattgacaagtttgggatccatgtataccagttccctgagtgtgactcggacgaggatgaggacttcaagcagcaggaccgggaactgaaggagagcgcgcccttcgccgttataggcagcaacacggtggtggaggccaaggggcagcgggtccggggccgactgtacccctgggggatcgtggaggtggagaaccaggcgcattgcgacttcgtgaagctgcgcaacatgctcatccgcacgcatatgcacgacctcaaggacgtgacgtgcgacgtgcactacgagaactaccgcgcgcactgcatccagcagatgaccagcaaactgacccaggacagccgcatggagagccccatcccgatcctgccgctgcccaccccggacgccgagactgagaagcttatcaggatgaaggatgaggaactgaggcgcatgcaggagatgctgcagaggatgaagcagcagatgcaggaccagtgacgctcgccgcggacacaccgtccgtctccgggacgccctcgcacccctggacaccagaccggactgttcccgacccggagacgcggggccacagcccccagctgaccctaatttattctcagcaccaccccctcccaggtcattg

SEQ ID NO: 130889 - DNA, 3173 bp, Artificial Sequence
  derived and/or modified sequence
cgggagcggggcctgcccggactgcgacgccgccacagcttggggccagttcgcccagtcagggggatggctcggtcggcctcgggggtcgacgatcccccgggacattgacaagcagtacgtgggcttcgccacactgcccaaccaggtgcaccgcaagtcggtgaagaaaggctttgacttcacactcatggtggctggtgagtcaggcctggggaagtccacactggtccacagcctcttcctgacagacttgtacaaggaccggaagctgctcagtgctgaggagcgcatcagccagacggtagagattctaaaacacacggtggacattgaggagaagggagtcaagctgaagctcaccatcgtggacacgccgggattcggggacgctgtcaacaacaccgagtgctggaagcccatcaccgactatgtggaccagcagtttgagcagtacttccgtgatgagagcggcctcaaccgaaagaacatccaagacaaccgagtgcactgctgcctatacttcatctcccccttcgggcatgggctgcggccagtggatgtgggtttcatgaaggcattgcatgagaaggtcaacatcgtgcctctcatcgccaaagctgactgtcttgtccccagtgagatccggaagctgaaggagcggatccgggaggagattgacaagtttgggatccatgtataccagttccctgagtgtgactcggacgaggatgaggacttcaagcagcaggaccgggaactgaaggagagcgcgcccttcgccgttataggcagcaacacggtggtggaggccaaggggcagcgggtccggggccgactgtacccctgggggatcgtggaggtggagaaccaggcgcattgcgacttcgtgaagctgcgcaacatgctcatccgcacgcatatgcacgacctcaaggacgtgacgtgcgacgtgcactacgagaactaccgcgcgcactgcatccagcagatgaccagcaaactgacccaggacagccgcatggagagccccatcccgatcctgccgctgcccaccccggacgccgagactgagaagcttatcaggatgaaggatgaggaactgaggcgcatgcaggagatgctgcagaggatgaagcagcagatgcaggaccagtgacgctcgccgcggacacaccgtccgtctccgggacgccctcgcacccctggacaccagaccggactgttcccgacccggagacgcggggccacagcccccagctgaccctaatttattctcagcaccaccccctcccaggtcattgtgtctgtttccgaggggcctggaccgtagcccccgcccagctggccctctctgaccttgggggatcaggagcgaagttgggcgggacttcagagatccgcctcccttgcccttcccccgcccccggacggtcacagcacccaaaccgcaggccctgctctggcaggcaggcaaagctaggcagaagaggattcccaggatcctgggtctgttccctgccccagtgctgcagaacggacttgggagccctcctttgcctgctcccgcgggtcacccagcgagtgctgagaccccattttctgtcgaggcgggccgagtcttcccttatccccagacgcctagcgggcagggttgggctgaatcaaatgggagccctccagacataaggaggccagaggctgcaaggagcggggtcgtgaccgcttacaccccttctccacagcccggcccgacctggagggcccccggggcactgggcggtgagccacctcctggcaactctcggtgccgtcccctgccctcgctcgaggcctcttctccccagcaccgctgtggtgtgccgggatcctgagcctaggcctcccgatgttcccacccgcatgatcccttcccgccacacgatgctccgttttcttccgttgtgaatgccgcgtcctgtcctggtgacaggagaacaatgttggtgaacgtcgcagcgggtgtccgagtgctccgtgtgcccctgagagcgggtgggagcggaagcctgagcggcctgcggcctccggcgatagtgtgctatctgccgctgcagcgcgcgtccgcgcggcctctgggctatttctggccaggccgcagcactgtggtcggtgcgggcgtggcaggggcggggcggccttatcgctcggctctcccgcctacgcctcccgctgcagagtaagccgggctgccgtcttctcgccatgggctccgggccgcgcggggcgctgagcttactgctcctgctgctggccccgccgagccgcccggccgcaggttgcccggcgccctgtagctgcgcggggacgctcgtggactgcgggcgccgcgggctgacttgggcctcgctgccgaccgccttccctgtcgacacaaccgagctggtgctgaccggcaacaacctgacggcgctgccgccggggctgctggacgcgctgcccgcgctgcgcaccgcacacctgggcgccaacccctggcgctgcgactgccgccttgtgccgctgcgcgcctggctggccggccgccccgagcgtgcgccctaccgcgacctgcgttgcgtggcgcccccagcgctgcgcggccgcctgctgccctatctggccgaggacgagctgcgcgccgcttgcgctcccggcccgctctgctggggggcgctggcggcgcagcttgcgctgctgggccttgggctgctgcacgcgttgctgctggtgctgctgctgtgccgcctgcggaggctgcgggcccgggcccgcgctcgcgccgcagcccggctgtcgctgaccgacccgctggtggccgagcgagccggaaccgacgagtcctgaggagagaaccggtgcgtcctgaggagagaaccggcgctgggcaacacgggcctgcaaactcgacaggaccctgcccgaggggccctcgcgccaacctggaccggtccccgcctcctccgctgcccaatctctcagacccaccccacctgcaggcccagaccacgtgggacagaactcctgcccaccctaccccgagggaggcgaacccgcacttccaggcttgggaggaccatggggcacaatgcggtccagaccctgctgcgtctcccttccaaactctggtgctgaataaacccttctgatctggt

SEQ ID NO: 130890 - DNA, 1336 bp, Artificial Sequence
  derived and/or modified sequence
acaggcctgcggtacaagagcaagctggcgaccccagaggacaagcaggacattgacaagcagtacgtgggcttcgccacactgcccaaccaggtgcaccgcaagtcggtgaagaaaggctttgacttcacactcatggtggctggtgagtcaggcctggggaagtccacactggtccacagcctcttcctgacagacttgtacaaggaccggaagctgctcagtgctgaggagcgcatcagccagacggtagagattctaaaacacacggtggacattgaggagaagggagtcaagctgaagctcaccatcgtggacacgccgggattcggggacgctgtcaacaacaccgagtgctggaagcccatcaccgactatgtggaccagcagtttgagcagtacttccgtgatgagagcggcctcaaccgaaagaacatccaagacaaccgagtgcactgctgcctatacttcatctcccccttcgggcatgggctgcggccagtggatgggtttcatgaaggcattgcatgagaaggtcaacatcgtgcctctcatcgccaaagctgactgtcttgtccccagtgagatccggaagctgaaggagcggatccgggaggagattgacaagtttgggatccatgtataccagttccctgagtgtgactcggacgaggatgaggacttcaagcagcaggaccgggaactgaaggagagcgcgcccttcgccgttataggcagcaacacggtggtggaggccaaggggcagcgggtccggggccgactgtacccctgggggatcgtggaggtggagaaccaggcgcattgcgacttcgtgaagctgcgcaacatgctcatccgcacgcatatgcacgacctcaaggacgtgacgtgcgacgtgcactacgagaactaccgcgcgcactgcatccagcagatgaccagcaaactgacccaggacagccgcatggagagccccatcccgatcctgccgctgcccaccccggacgccgagactgagaagcttatcaggatgaaggatgaggaactgaggcgcatgcaggagatgctgcagaggatgaagcagcagatgcaggaccagtgacgctcgccgcggacacaccgtccgtctccgggacgccctcgcacccctggacaccagaccggactgttcccgacccggagacgcggggccacagcccccagctgaccctaatttattctcagcaccaccccctcccaggtcattgtgtctgtttccgaggggcctggaccgtagcccccgcccagctggccctctctgaccttgggggatcaggagcgaagttgggcgggactt

SEQ ID NO: 130891 - DNA, 2070 bp, Artificial Sequence
  derived and/or modified sequence
ggagcgggcggcggcggcggcggcgcggaggggccgctcaccccgcagcccggcctcggcctccgccgcttgtcgtcgcgccccgcccgcgagcccgccccgcacgtcccccgccggcggccaccatgagcacaggcctgcggtacaagagcaagctggcgaccccagaggacaagcaggacattgacaagcagtacgtgggcttcgccacactgcccaaccaggtgcaccgcaagtcggtgaagaaaggctttgacttcacactcatggtggctggtgagtcaggcctggggaagtccacactggtccacagcctcttcctgacagacttgtacaaggaccggaagctgctcagtgctgaggagcgcatcagccagacggtagagattctaaaacacacggtggacattgaggagaagggagtcaagctgaagctcaccatcgtggacacgccgggattcggggacgctgtcaacaacaccgagtgctggaagcccatcaccgactatgtggaccagcagtttgagcagtacttccgtgatgagagcggcctcaaccgaaagaacatccaagacaaccgagtgcactgctgcctatacttcatctcccccttcgggcatgggctgcggccagtggatgtgggtttcatgaaggcattgcatgagaaggtcaacatcgtgcctctcatcgccaaagctgactgtcttgtccccagtgagatccggaagctgaaggagcggatccgggaggagattgacaagtttgggatccatgtataccagttccctgagtgtgactcggacgaggatgaggacttcaagcagcaggaccgggaactgaaggagagcgcgcccttcgccgttataggcagcaacacggtggtggaggccaaggggcagcgggtccggggccgactgtacccctgggggatcgtggaggtggagaaccaggcgcattgcgacttcgtgaagctgcgcaacatgctcatccgcacgcatatgcacgacctcaaggacgtgacgtgcgacgtgcactacgagaactaccgcgcgcactgcatccagcagatgaccagcaaactgacccaggacagccgcatggagagccccatcccgatcctgccgctgcccaccccggacgccgagactgagaagcttatcaggatgaaggatgaggaactgaggcgcatgcaggagatgctgcagaggatgaagcagcagatgcaggaccagtgacgctcgccgcggacacaccgtccgtctccgggacgccctcgcacccctggacaccagaccggactgttcccgacccggagacgcggggccacagcccccagctgaccctaatttattctcagcaccaccccctcccaggtcattgtgtctgtttccgaggggcctggaccgtagcccccgcccagctggccctctctgaccttgggggatcaggagcgaagttgggcgggacttcagagatccgcctcccttgcccttcccccgcccccggacggtcacagcacccaaaccgcaggccctgctctggcaggcaggcaaagctaggcagaagaggattcccaggatcctgggtctgttccctgccccagtgctgcagaacggacttgggagccctcctttgcctgctcccgcgggtcacccagcgagtgctgagaccccattttctgtcgaggcgggccgagtcttcccttatccccagacgcctagcgggcagggttgggctgaatcaaatgggagccctccagacataaggaggccagaggctgcaaggagcggggtcgtgaccgcttacaccccttctccacagcccggcccgacctggagggcccccggggcactgggcggtgagccacctcctggcaactctcggtgccgtcccctgccctcgctcgaggcctcttctccccagcaccgctgtggtgtgccgggatcctgagcctaggcctcccgatgttcccacccgcatgatcccttcccgccacacgatgctccgttttcttccgttgtgaatgccgcgtcctgtcctggtgacaggagaacaatgttggtgaacgtc

SEQ ID NO: 130892 - DNA, 4113 bp, Artificial Sequence
  derived and/or modified sequence
gttctaatgtgcaggggcttggcctgaccagtcctaccctggaacctttccaggccccatgtcctgctccgctgggcttgcctgttgggattctactggggtcatggaggtgggtggcccacagagcggagctcgggagacccccgcagtccctggagtagccacatgggagggaggcccggctggcaggagctcccagtccctccaatcctgtgggtcagagctggtgaggatgctcagagggcaagggaatgtccacagaagcacgtgggagatgggtcccatcccacccccacccctgtctctgagggcagggccacctgagggctgcagggcagcgcatgggtggccggcgtttattcagcaggctggcgggggcttccaagttttgcagggacctccagtactccggcagcctgcacccttcctttcccttcccttcccttctgtccaccctaagcctcctaggggacaggcaggctggacttcagaaaaggtgggctctgccctcctccggtcccccgaatgtcttgggaaagagtccaccaaacacacatgcacacacccgcgcacacgcacatacccaatgcatgcacacacgtacacacacacgcatacacgcatgtatacacgcgcacacacgcaggcattacacacacacacattacacacacacacccgcacggacgcgcacacacaaacgcgcgcacgcacgcacgcacgcacgggggaggtcagccccaagcagggctggggaggggtgcagggcgcggcgtgtctgtgggcacttggggcgtcgagacgccgccgggaggttttcgggcaagtctgcgagaagacggcgggccctgaactgggcgggtacccgcgctgttgcgcgtgggtcccgggagcggcctccggcgccctctggcgggcggaagccgcgcagcacctcttgggggcgggacgcgcggtggctaccgactcccggcccgccccggcccgcgtgcaggacccggtcgtcccctcctgctgtcctggagcccggactgaggccccgggggcgcggcagggctcccggtccacgcgagccatggcccgaccgcgcctcggctcagccctgccctccgcagccgctttcgggtggctccgcccgcggcccaatttccaggcgaccgtttcccggcgacggcgggcggggccgtctctgccgccccccgccgcgcgctccgcgggcgcctgcgacgccccgcctctggctcgggtgcgggagcggggcctgcccggactgcgacgccgccacagcttggggccagttcgcccagtcagggggatggctcggtcggcctcgggggtcgacgatcccccgggtaggcgacgtgccctgtccaggcctcacttcccgcgtccgcaaaacggggtggacaacgcagcctaaggcagagccgcgccaaggtccctcgctgtcgccgggctctggcggcctgaccgggcctggggtccgagcgtgcccccgggcctgggggggtcgccgcgatggactcgctggcagcgccccaggaccgcctggtggagcagctgctgtcgccgcggacccaggcccagaggcggctcaaggacattgacaagcagtacgtgggcttcgccacactgcccaaccaggtgcaccgcaagtcggtgaagaaaggctttgacttcacactcatggtggctggtgagtcaggcctggggaagtccacactggtccacagcctcttcctgacagacttgtacaaggaccggaagctgctcagtgctgaggagcgcatcagccagacggtagagattctaaaacacacggtggacattgaggagaagggagtcaagctgaagctcaccatcgtggacacgccgggattcggggacgctgtcaacaacaccgagtgctggaagcccatcaccgactatgtggaccagcagtttgagcagtacttccgtgatgagagcggcctcaaccgaaagaacatccaagacaaccgagtgcactgctgcctatacttcatctcccccttcgggcatgggctgcggccagtggatgtgggtttcatgaaggcattgcatgagaaggtcaacatcgtgcctctcatcgccaaagctgactgtcttgtccccagtgagatccggaagctgaaggagcggatccgggaggagattgacaagtttgggatccatgtataccagttccctgagtgtgactcggacgaggatgaggacttcaagcagcaggaccgggaactgaaggagagcgcgcccttcgccgttataggcagcaacacggtggtggaggccaaggggcagcgggtccggggccgactgtacccctgggggatcgtggaggtggagaaccaggcgcattgcgacttcgtgaagctgcgcaacatgctcatccgcacgcatatgcacgacctcaaggacgtgacgtgcgacgtgcactacgagaactaccgcgcgcactgcatccagcagatgaccagcaaactgacccaggacagccgcatggagagccccatcccgatcctgccgctgcccaccccggacgccgagactgagaagcttatcaggatgaaggatgaggaactgaggcgcatgcaggagatgctgcagaggatgaagcagcagatgcaggaccagtgacgctcgccgcggacacaccgtccgtctccgggacgccctcgcacccctggacaccagaccggactgttcccgacccggagacgcggggccacagcccccagctgaccctaatttattctcagcaccaccccctcccaggtcattgtgtctgtttccgaggggcctggaccgtagcccccgcccagctggccctctctgaccttgggggatcaggagcgaagttgggcgggacttcagagatccgcctcccttgcccttcccccgcccccggacggtcacagcacccaaaccgcaggccctgctctggcaggcaggcaaagctaggcagaagaggattcccaggatcctgggtctgttccctgccccagtgctgcagaacggacttgggagccctcctttgcctgctcccgcgggtcacccagcgagtgctgagaccccattttctgtcgaggcgggccgagtcttcccttatccccagacgcctagcgggcagggttgggctgaatcaaatgggagccctccagacataaggaggccagaggctgcaaggagcggggtcgtgaccgcttacaccccttctccacagcccggcccgacctggagggcccccggggcactgggcggtgagccacctcctggcaactctcggtgccgtcccctgccctcgctcgaggcctcttctccccagcaccgctgtggtgtgccgggatcctgagcctaggcctcccgatgttcccacccgcatgatcccttcccgccacacgatgctccgttttcttccgttgtgaatgccgcgtcctgtcctggtgacaggagaacaatgttggtgaacgtcgcagcgggtgtccgagtgctccgtgtgcccctgagagcgggtgggagcggaagcctgagcggcctgcggcctccggcgatagtgtgctatctgccgctgcagcgcgcgtccgcgcggcctctgggctatttctggccaggccgcagcactgtggtcggtgcgggcgtggcaggggcggggcggccttatcgctcggctctcccgcctacgcctcccgctgcagagtaagccgggctgccgtcttctcgccatgggctccgggccgcgcggggcgctgagcttactgctcctgctgctggccccgccgagccgcccggccgcaggttgcccggcgccctgtagctgcgcggggacgctcgtggactgcgggcgccgcgggctgacttgggcctcgctgccgaccgccttccctgtcgacacaaccgagctggtgctgaccggcaacaacctgacggcgctgccgccggggctgctggacgcgctgcccgcgctgcgcaccgcacacctgggcgccaacccctggcgctgcgactgccgccttgtgccgctgcgcgcctggctggccggccgccccgagcgtgcgccctaccgcgacctgcgttgcgtggcgcccccagcgctgc

SEQ ID NO: 130893 - DNA, 1137 bp, Artificial Sequence
  derived and/or modified sequence
atggacagcctggccgccccccaggacagactggtggagcagctgctgagccccagaacccaggcccagagaagactgaaggacatcgacaagcagtacgtgggcttcgccaccctgcccaaccaggtgcacagaaagagcgtgaagaagggcttcgacttcaccctgatggtggccggcgagagcggcctgggcaagagcaccctggtgcacagcctgttcctgaccgacctgtacaaggacagaaagctgctgagcgccgaggagagaatcagccagaccgtggagatcctgaagcacaccgtggacatcgaggagaagggcgtgaagctgaagctgaccatcgtggacacccccggcttcggcgacgccgtgaacaacaccgagtgctggaagcccatcaccgactacgtggaccagcagttcgagcagtacttcagagacgagagcggcctgaacagaaagaacatccaggacaacagagtgcactgctgcctgtacttcatcagccccttcggccacggcctgagacccgtggacgtgggcttcatgaaggccctgcacgagaaggtgaacatcgtgcccctgatcgccaaggccgactgcctggtgcccagcgagatcagaaagctgaaggagagaatcagagaggagatcgacaagttcggcatccacgtgtaccagttccccgagtgcgacagcgacgaggacgaggacttcaagcagcaggacagagagctgaaggagagcgcccccttcgccgtgatcggcagcaacaccgtggtggaggccaagggccagagagtgagaggcagactgtacccctggggcatcgtggaggtggagaaccaggcccactgcgacttcgtgaagctgagaaacatgctgatcagaacccacatgcacgacctgaaggacgtgacctgcgacgtgcactacgagaactacagagcccactgcatccagcagatgaccagcaagctgacccaggacagcagaatggagagccccatccccatcctgcccctgcccacccccgacgccgagaccgagaagctgatcagaatgaaggacgaggagctgagaagaatgcaggagatgctgcagagaatgaagcagcagatgcaggaccagtag

SEQ ID NO: 130894 - DNA, 969 bp, Artificial Sequence
  derived and/or modified sequence
atggtggccggcgagagcggcctgggcaagagcaccctggtgcacagcctgttcctgaccgacctgtacaaggacagaaagctgctgagcgccgaggagagaatcagccagaccgtggagatcctgaagcacaccgtggacatcgaggagaagggcgtgaagctgaagctgaccatcgtggacacccccggcttcggcgacgccgtgaacaacaccgagtgctggaagcccatcaccgactacgtggaccagcagttcgagcagtacttcagagacgagagcggcctgaacagaaagaacatccaggacaacagagtgcactgctgcctgtacttcatcagccccttcggccacggcctgagacccgtggacgtgggcttcatgaaggccctgcacgagaaggtgaacatcgtgcccctgatcgccaaggccgactgcctggtgcccagcgagatcagaaagctgaaggagagaatcagagaggagatcgacaagttcggcatccacgtgtaccagttccccgagtgcgacagcgacgaggacgaggacttcaagcagcaggacagagagctgaaggagagcgcccccttcgccgtgatcggcagcaacaccgtggtggaggccaagggccagagagtgagaggcagactgtacccctggggcatcgtggaggtggagaaccaggcccactgcgacttcgtgaagctgagaaacatgctgatcagaacccacatgcacgacctgaaggacgtgacctgcgacgtgcactacgagaactacagagcccactgcatccagcagatgaccagcaagctgacccaggacagcagaatggagagccccatccccatcctgcccctgcccacccccgacgccgagaccgagaagctgatcagaatgaaggacgaggagctgagaagaatgcaggagatgctgcagagaatgaagcagcagatgcaggaccagtag

SEQ ID NO: 130895 - DNA, 1110 bp, Artificial Sequence
  derived and/or modified sequence
atgagcaccggcctgagatacaagagcaagctggccacccccgaggacaagcaggacatcgacaagcagtacgtgggcttcgccaccctgcccaaccaggtgcacagaaagagcgtgaagaagggcttcgacttcaccctgatggtggccggcgagagcggcctgggcaagagcaccctggtgcacagcctgttcctgaccgacctgtacaaggacagaaagctgctgagcgccgaggagagaatcagccagaccgtggagatcctgaagcacaccgtggacatcgaggagaagggcgtgaagctgaagctgaccatcgtggacacccccggcttcggcgacgccgtgaacaacaccgagtgctggaagcccatcaccgactacgtggaccagcagttcgagcagtacttcagagacgagagcggcctgaacagaaagaacatccaggacaacagagtgcactgctgcctgtacttcatcagccccttcggccacggcctgagacccgtggacgtgggcttcatgaaggccctgcacgagaaggtgaacatcgtgcccctgatcgccaaggccgactgcctggtgcccagcgagatcagaaagctgaaggagagaatcagagaggagatcgacaagttcggcatccacgtgtaccagttccccgagtgcgacagcgacgaggacgaggacttcaagcagcaggacagagagctgaaggagagcgcccccttcgccgtgatcggcagcaacaccgtggtggaggccaagggccagagagtgagaggcagactgtacccctggggcatcgtggaggtggagaaccaggcccactgcgacttcgtgaagctgagaaacatgctgatcagaacccacatgcacgacctgaaggacgtgacctgcgacgtgcactacgagaactacagagcccactgcatccagcagatgaccagcaagctgacccaggacagcagaatggagagccccatccccatcctgcccctgcccacccccgacgccgagaccgagaagctgatcagaatgaaggacgaggagctgagaagaatgcaggagatgctgcagagaatgaagcagcagatgcaggaccagtag

SEQ ID NO: 130896 - protein, 598 aa, Artificial Sequence
  derived and/or modified sequence
MSASAQQLAEELQIFGLDCEEALIEKLVELCVQYGQNEEGMVGELIAFCTSTHKVGLTSEILNSFEHEFLSKRLSKARHSTCKDSGHAGARDIVSIQELIEVEEEEEILLNSYTTPSKGSQKRAISTPETPLTKRSVSTRSPHQLLSPSSFSPSATPSQKYNSRSNRGEVVTSFGLAQGVSWSGRGGAGNISLKVLGCPEALTGSYKSMFQKLPDIREVLTCKIEELGSELKEHYKIEAFTPLLAPAQEPVTLLGQIGCDSNGKLNNKSVILEGDREHSSGAQIPVDLSELKEYSLFPGQVVIMEGINTTGRKLVATKLYEGVPLPFYQPTEEDADFEQSMVLVACGPYTTSDSITYDPLLDLIAVINHDRPDVCILFGPFLDAKHEQVENCLLTSPFEDIFKQCLRTIIEGTRSSGSHLVFVPSLRDVHHEPVYPQPPFSYSDLSREDKKQVQFVSEPCSLSINGVIFGLTSTDLLFHLGAEEISSSSGTSDRFSRILKHILTQRSYYPLYPPQEDMAIDYESFYVYAQLPVTPDVLIIPSELRYFVKDVLGCVCVNPGRLTKGQVGGTFARLYLRRPAADGAERQSPCIAVQVVRI

SEQ ID NO: 130897 - DNA, 1797 bp, Artificial Sequence
  derived and/or modified sequence
atgtctgcttctgcccagcagctggctgaagagttacagatcttcgggctcgattgcgaagaggcccttattgaaaagttggttgagctgtgcgttcagtatggtcagaatgaggaggggatggtgggagaactgatcgccttctgcacatcaactcacaaggtcggactgacaagcgagattctgaactcattcgagcatgagtttctttctaagcggctgagtaaggcaaggcactccacatgtaaggatagtggtcatgctggcgctcgtgatattgtgtctatacaggaacttatcgaggtcgaagaggaagaggagattttactcaatagctacactactcctagtaaaggctcccagaagcgcgccattagcactccggaaacgcctcttacaaagaggtcggtgtcaacacgctcgcctcaccagttgctgtccccaagtagtttcagccccagcgcgaccccttcacaaaaatataacagccgtagcaacaggggcgaagtggtgacttccttcgggcttgcccagggggtgagctggtctgggaggggaggagccggcaatatcagcctgaaagtcctaggatgtccagaggctctcacaggcagctataagtcaatgtttcagaaattacccgatatcagggaagtactcacatgcaagatcgaggagctggggtctgagctgaaggagcactacaaaatcgaggctttcactccgctgttagccccagcccaagagccagtaacacttctcgggcagatcggctgtgattctaacggcaagctcaataataagtctgtaatcttggagggtgatcgggagcacagtagcggagcccaaattcccgtggatctgtctgaactcaaggagtactcactgtttcccggccaagtggtcattatggagggcattaacaccaccggccggaaattagtggcaacgaagttatacgaaggagtgccattgcctttttaccagcccacagaggaagatgctgacttcgagcagagcatggtcctcgttgcctgtggtccctacacgacatccgattctatcacatatgatccattgctggacctgatcgctgtcatcaatcatgacaggcctgacgtttgcatcctttttggcccattcctggacgctaagcacgaacaggtcgagaattgcctcctgacctccccatttgaggatatcttcaagcagtgtctgcgaaccatcattgagggcacaaggtcctccggtagccacctcgtttttgtcccgtcgctgagggacgtgcatcatgaaccagtctaccctcagcctcctttctcttactccgacctctctcgagaagacaagaagcaagtgcaatttgtgagcgagccatgttcattgtctatcaatggtgtaatctttgggctcacctccaccgacctgctcttccacctgggagccgaggagatcagttccagctctggcacttctgatcgcttttcccgtatcctcaaacacatcctcacacagagatcttactatccattgtatcctccgcaggaggacatggccatcgattacgagagtttctacgtgtatgcccagctgcctgtgacacccgacgtactgatcatcccttcagaattacgctatttcgtcaaagacgtgttgggctgcgtttgcgttaatcccggtcggctgactaaagggcaagtgggaggcacatttgcccgcctgtacctccgtagaccagctgccgacggagcagaacgccagtcaccttgcattgctgtgcaggtggtccgcatctag

SEQ ID NO: 130898 - DNA, 1797 bp, Artificial Sequence
  derived and/or modified sequence
atgtctgccagcgcccagcagctggccgaggagctgcagatcttcggcctggactgtgaggaggccctgattgagaagctggtggagctgtgtgtgcagtatggccagaatgaggagggcatggtgggggagctgattgccttctgcaccagcacccacaaggtgggcctgaccagcgagatcctgaacagctttgaacatgagttcctgagcaagaggctgagcaaggcccggcacagcacctgcaaggacagcggccacgccggggcccgggacatcgtgtccatccaggagctgattgaggtggaggaggaggaggagatcctgctgaacagctacaccacccccagcaagggcagccagaagagggccatcagcaccccagagacccccctgaccaagaggtctgtgtccaccaggagcccccaccagctgctgagccccagcagcttcagccccagcgccacccccagccagaagtacaacagccgcagcaacagaggagaggtggtgaccagctttggcctggcccagggcgtgtcctggagcggccggggcggggccggcaacatcagcctgaaggtgctgggctgcccagaggccctgaccggcagctacaagtccatgttccagaagctgcctgacatccgggaggtgctgacctgcaagattgaggagctgggcagcgagctgaaggagcactacaagattgaggccttcacccccctgctggccccagcccaggagcctgtgaccctgctgggccagatcggctgtgacagcaatggcaagctgaacaacaagagcgtcatcctggagggggaccgggagcacagcagcggggcccagatccctgtggacctgtctgagctgaaggagtacagcctcttccctggccaggtggtgatcatggagggcatcaacaccaccggcaggaagctggtggccaccaagctgtatgagggcgtgcccctgcccttctaccagcccacagaagaagatgctgactttgagcagagcatggtgctggtggcctgtggcccctacaccaccagtgacagcatcacctatgaccccctgctggacctgattgctgtgatcaaccacgacagaccagatgtgtgcatcctgtttggccccttcctggatgccaagcatgagcaggtggagaactgcctgctgaccagcccctttgaggacatcttcaagcagtgcctgcggaccatcatcgagggcaccaggagcagcggcagccacctggtgtttgtgcccagcctgagagatgtgcaccacgagcctgtgtacccccagccccccttctcctacagcgacctgagccgggaggacaagaagcaggtgcagtttgtgtctgagccctgcagcctgagcatcaatggagtcatcttcggcctgaccagcacagacctgctcttccacctgggcgctgaggagatcagcagcagcagcggcaccagtgaccgcttcagccgcatcctgaagcacatcctgacccagaggagctactaccccctgtacccaccccaggaggacatggccatcgactatgagagcttctacgtgtatgcccagctgcctgtgaccccagatgtgctgatcatccccagcgagctgcgctactttgtgaaggatgtgctgggctgtgtgtgtgtgaaccctggccgcctgaccaagggccaggtgggcggcacctttgcccggctgtacctgcggcggcctgctgctgatggagctgagcggcagagcccctgcatcgctgtgcaggtggtgcgcatctag

SEQ ID NO: 130899 - DNA, 3744 bp, Artificial Sequence
  derived and/or modified sequence
gcagctgctgactggcgggccgccaggcgcgtgcgtagagacgcccacacgcccgctgatgcgcacgcgccctgggccgcgcgtgcgcgcgtggggttccggaatgagccggggaaagcaaggggaaggtttggggttggctcccggtttcgcgcatgcgtgcactgcacaaaccatttggcgggtttttccggccactcagttctgccaccgtcactgagaagctcagcggtagcttttgggaagcaggacgttctcaccaggagagcgtcctctcgagatttctgctccctccattcagggcgtttgggagccaccccttcattttttaaaaaaagtatttctctgtgaccgacggccggggccttctgacggtctgaggtcttgcttgggccagtcacctcctgtcacggtccgcggaggggggaaggataagagggcgaggagctcatcgctcgccacccccgtgggcttcttgggcgcaggtcggagctgggtgggccggctccccggcccctggcttgggcgaccatgtccgcatccgcccagcagctggcggaggagctgcagatcttcggcctagactgcgaggaggctctaattgagaaattggtagagctttgtgttcagtatggacagaatgaggagggaatggtaggcgagcttatagccttctgcaccagcacacataaagttggccttacctcagagatcctgaactcttttgagcatgagtttctgagcaaaagattatcgaaagccaggcatagtacctgcaaggacagtggccatgcaggagctagagacattgtttccattcaagagctaattgaagtggaagaagaagaggaaatcctcttgaactcttacaccacaccttcaaagggttctcagaagcgagctatctctaccccagaaacccccctaacaaaaaggagtgtgtcaactcgtagcccccatcagctactctcaccgtcaagtttctctccaagtgctactccctcccagaaatacaactcacgaagtaaccgaggagaagtggttacctccttcggcttagcacagggagtatcttggtctgggagaggaggagctggaaacatcagcctgaaggtcttgggatgtccagaggcactaactgggagctacaaatccatgtttcagaagctcccagacattcgagaagttctgacctgtaagatagaagaacttggcagcgaactcaaggaacattacaagattgaagctttcactcctttgctagccccagcacaggagcctgtcactctgctgggccagattggctgtgatagcaacgggaagctgaacaacaagtcagtgattctcgagggagaccgggaacattcctcgggtgctcaaattccagtggatttatctgagcttaaggaatattctctgtttcctggacaggttgtaattatggaaggaatcaacaccactggtaggaaacttgttgccaccaaactctacgagggtgtgccacttccattttatcagcccactgaagaggatgcagactttgagcaaagcatggtcctggttgcctgtggaccatacaccacatctgacagcatcacgtatgaccccctgcttgacctgattgctgtcatcaaccatgaccggccagatgtctgcatcctgtttggccctttcctggatgctaagcatgaacaggtggagaattgtctactgacaagtccatttgaagacattttcaagcagtgtctacgaacaattattgaaggcacaagaagctccggctcccaccttgtctttgtcccgtcattgagagatgtgcaccatgagcctgtgtacccccagccgcctttcagctactccgatctgtctcgagaggacaaaaagcaagtacagtttgtgtccgagccctgcagcctctccataaacggagtgatcttcggcttgacatccacagatctgcttttccacctgggggccgaggagatcagtagttcttccggaacttcagacagattcagccgaatactcaagcacatcttgacccagaggagctactacccactctacccgccccaagaagacatggccattgactatgagtcgttctatgtttacgcacagctgcctgtcaccccagatgtcctcatcatcccgtcagagctgaggtacttcgtgaaggatgtcctcggctgtgtctgtgtgaaccctgggcgccttaccaaagggcaggtgggaggcaccttcgcccgactctaccttaggaggccggcagcggacggggcagagaggcagagcccatgcattgctgtgcaggtcgtcaggatctgaggcttctgtcctctgctgttctctgctgtgtgggcccttaaagtcttagccaagagccaagacatagccctgtgacaaggtgaacagttgggtgggaaaggagagaggagccagccagggaggggcagctgcagtgaccaggcccagcagggaggacttgtgcagccgggcctgcctctgagtggtgcctctcctggaaggaagctcttgcttctcagtccatgctccgtgtccagaagtaagccagctgtggatcccgcccactcagaaaaggcgagaaggctttgtgattttctacatgaatcaaacacagaaacaacttttggagaaattaaattctgagtgtgacttctgagtttgacctttcttctattttcttttatttatttattttgtttttagacggagtctcgatctgtcgcccaggctggagtgcagtggtgagatctcggctcactgcaagctctgccgcccgggttcatgccattctcctgcctcagcctcctgagtagctgggactacaggcacccaccaccacgcctggctaattttttgtatttttagtggagatggggtttcaccatgttagccaggatggtctcgatctcctgaccttgtgatctgtccgcctcagcctcccaaagtgctgggattacaggcgtgagccaccgcgcccggcccctttcttctattttctttatcctggtagtagacaaagaatgttgcctatttgacctatgtccagagaaggcagagtgtcagtcacactgggtttctatccagccccagtcctgtccagtgggtaactctcagccccactcctcatcccccaaaggccccagtgacctctatgctgcagaggtgcactgggtgggccctagagctgggctgcagagcaagcaactggctgcatgcctgggcctccctgcgcagttcctcacatgcatgctgtggtcccagcctgacctctccatctggagggggccgcctcgctgggctgttccaaagctggagtcctggtggcagctgctttgccaagtcgcgcagtagccagggcttgcctgcagcccagaacactcagacagggtcaggccttccagggttcacagcacgtcccatgcccctatgtcctggcatctggggaaaagctgtcactggccagacgtggagtggcttcctgccctaagctggcaggctgtcctgcctcacatgccagagccaagaccggcaaaccccagctgtcagggcagggaagtgggcaagggggcagcaagctgctggtgtctatgccttgactccgagataaatagatgacctaacagtggccaacttttgcctctcacctttctgacggtgaaatggaatcgagccccagacctgaccagggtacagtaaaaggtcttcctttaaacacaa

SEQ ID NO: 130900 - DNA, 1797 bp, Artificial Sequence
  derived and/or modified sequence
atgagcgccagcgcccagcagctggccgaggagctgcagatcttcggccttgactgcgaggaggccctgatcgagaaactggtggaactgtgcgtgcagtacggccagaatgaggaaggtatggttggcgagcttatcgcattttgcacatcaacacataaggtgggcttgacgtcagaaattctgaacagcttcgaacatgaattccttagcaagagattatctaaagctaggcactccacttgtaaagactctggccacgccggcgcaagagacattgtcagcattcaggagctcatcgaggttgaagaagaggaggagatcctcctgaacagttacaccactccttctaagggatctcagaagcgggccatctccacgcccgagactccacttaccaaacggagcgtttccacgcggagtccccaccagctactatctcctagctcctttagccctagcgcaacacctagtcaaaaatataacagccgttcaaacagaggagaagtggtcacgagtttcggcctcgcgcaaggggtttcgtggagcggccgcggcggcgccggcaatatttcactaaaagtgctgggttgcccagaggctctgacgggctcatataagtcaatgtttcagaagctccctgatatacgcgaagtcttaacctgtaagatcgaggagctagggagcgaactcaaagaacactataagattgaggcttttacccctttgttggcaccggcacaggaacctgtgacactccttggccagattgggtgtgacagtaacgggaagctcaacaacaagtcagtgatcctcgaaggggatcgtgaacactccagcggagctcagatcccagtcgacttgagtgaattgaaagaatatagcttatttcctggtcaagtggtaatcatggaaggtattaacaccaccggccgaaagctggtggcgaccaaactatatgagggcgtgcctttgcctttctaccagcccactgaagaagacgccgatttcgaacaatccatggttttggtggcatgtggaccatatacaacatcagacagcataacttacgatcccctgctggatctgatcgccgtgattaatcacgaccggccagacgtgtgcatcctgtttggtcccttcctcgacgctaagcatgagcaggtggagaattgcctgttgaccagcccctttgaagatattttcaagcaatgtctgcggacgattattgaaggcacccgatcctctggatcccatctcgtttttgttcctagcttaagagatgttcatcacgagcctgtgtatcctcaaccaccatttagctactcagacctgtctagagaagataaaaaacaggtccagttcgtgtcggaaccctgcagtctgagtattaacggagttatctttggcttgacaagtactgaccttttgttccacctcggcgccgaagagatttccagctcctctggcaccagcgatcgattcagccgcatcctgaaacatatactgactcagaggtcttactacccattgtaccctccacaggaggacatggcaatcgattatgaaagtttctatgtgtatgcccagctgcctgttacccccgacgttcttattattccttcagagctgcggtatttcgtaaaggatgtcctgggctgtgtgtgcgtcaatcccgggcggctgaccaagggccaagtcggggggactttcgctagactctacctcagacggcctgctgccgacggggcggagcgacagagcccttgcatcgctgtgcaagtagtgcggatctag

SEQ ID NO: 130901 - DNA, 1797 bp, Artificial Sequence
  derived and/or modified sequence
atgtcggcttcagcccagcagctggccgaggaactacaaatattcggactggactgtgaagaggccctcatcgaaaagctcgtggaactctgtgttcagtacggccagaacgaggaaggaatggtgggagaacttattgctttttgtacaagtacgcataaggtgggattgactagtgagatcctgaattcattcgagcacgagttcttgagcaaaagactgtccaaggctagacactccacttgcaaggactccggacacgccggtgccagggatatcgtgtcaattcaggaattgattgaagtcgaggaggaggaagaaattctgctgaactcttacactactccttcgaaggggagccagaaaagggcgatttcaacacccgaaaccccactgacaaagagatcggtgagcactagatcgccgcatcaactcctgagtcccagctccttctcaccatctgctacaccatcacagaaatacaacagtagatctaataggggagaagtggtgaccagcttcggcttagcccaaggagtgagctggtctggtcgcggaggggctgggaatattagcttgaaggtgctcggatgccctgaggctctcactgggtcttacaagagtatgttccaaaaactccccgatatccgggaggtcttgacttgcaagattgaagagctcggatccgagctgaaggagcattataaaatcgaggcgttcacccctctgctggccccagctcaagaacccgtgactttattaggtcagattggctgcgacagtaatggaaaattgaataacaagtcagtaatcctggaaggcgaccgggagcactcaagcggggctcagatacccgtcgatctatctgagctcaaagagtattctctctttccaggccaggttgtaataatggagggaatcaatacgacaggtcgtaagcttgttgcgacaaagctttacgaaggcgtcccgctgcccttctatcagcctacggaagaggacgctgatttcgaacagtcgatggtgctcgtcgcgtgcggcccttataccacctctgactcaattacatacgatcctctgctcgatttaatcgcagttattaaccatgatagaccagatgtgtgcatcctattcggtcccttcctcgatgcaaaacacgagcaggttgaaaactgtctgctgacatctccatttgaggatatcttcaagcagtgtctcaggacgatcattgaagggacccggtctagtggcagccatctcgtgtttgtgcccagtcttagagatgtacatcatgaaccagtttatccccagcctcccttttcttattctgatctgagccgcgaggacaaaaagcaagtgcaattcgtgagtgagccatgtagtctgtcaataaatggcgtgatttttggcttaacctccaccgaccttctctttcacttgggagcggaggagatcagctcttcgtccggaacttcagaccgattctccaggatcctcaagcatatcctgactcagaggtcttattatccactgtatcccccacaggaagatatggcaatcgactatgagtccttttacgtatacgcccagctgccagtgaccccagacgtgctgatcataccaagtgaattgcgctacttcgtgaaagatgttctcggatgtgtctgcgtgaaccccggaagactgacaaagggacaagtcggaggcacgttcgctcgcttgtacctccgcagaccagctgctgacggagctgaaagacagtctccctgcattgctgttcaggttgtccgaatctag

SEQ ID NO: 130902 - DNA, 1797 bp, Artificial Sequence
  derived and/or modified sequence
atgagcgccagcgcccagcagctggccgaggagctgcagatcttcggcctggactgcgaggaggccctgatcgagaagctggtggagctgtgcgtgcagtacggccagaacgaggagggcatggtgggcgagctgatcgccttctgcaccagcacccacaaggtgggcctgaccagcgagatcctgaacagcttcgagcacgagttcctgagcaagagactgagcaaggccagacacagcacctgcaaggacagcggccacgccggcgccagagacatcgtgagcatccaggagctgatcgaggtggaggaggaggaggagatcctgctgaacagctacaccacccccagcaagggcagccagaagagagccatcagcacccccgagacccccctgaccaagagaagcgtgagcaccagaagcccccaccagctgctgagccccagcagcttcagccccagcgccacccccagccagaagtacaacagcagaagcaacagaggcgaggtggtgaccagcttcggcctggcccagggcgtgagctggagcggcagaggcggcgccggcaacatcagcctgaaggtgctgggctgccccgaggccctgaccggcagctacaagagcatgttccagaagctgcccgacatcagagaggtgctgacctgcaagatcgaggagctgggcagcgagctgaaggagcactacaagatcgaggccttcacccccctgctggcccccgcccaggagcccgtgaccctgctgggccagatcggctgcgacagcaacggcaagctgaacaacaagagcgtgatcctggagggcgacagagagcacagcagcggcgcccagatccccgtggacctgagcgagctgaaggagtacagcctgttccccggccaggtggtgatcatggagggcatcaacaccaccggcagaaagctggtggccaccaagctgtacgagggcgtgcccctgcccttctaccagcccaccgaggaggacgccgacttcgagcagagcatggtgctggtggcctgcggcccctacaccaccagcgacagcatcacctacgaccccctgctggacctgatcgccgtgatcaaccacgacagacccgacgtgtgcatcctgttcggccccttcctggacgccaagcacgagcaggtggagaactgcctgctgaccagccccttcgaggacatcttcaagcagtgcctgagaaccatcatcgagggcaccagaagcagcggcagccacctggtgttcgtgcccagcctgagagacgtgcaccacgagcccgtgtacccccagccccccttcagctacagcgacctgagcagagaggacaagaagcaggtgcagttcgtgagcgagccctgcagcctgagcatcaacggcgtgatcttcggcctgaccagcaccgacctgctgttccacctgggcgccgaggagatcagcagcagcagcggcaccagcgacagattcagcagaatcctgaagcacatcctgacccagagaagctactaccccctgtaccccccccaggaggacatggccatcgactacgagagcttctacgtgtacgcccagctgcccgtgacccccgacgtgctgatcatccccagcgagctgagatacttcgtgaaggacgtgctgggctgcgtgtgcgtgaaccccggcagactgaccaagggccaggtgggcggcaccttcgccagactgtacctgagaagacccgccgccgacggcgccgagagacagagcccctgcatcgccgtgcaggtggtgagaatctag

SEQ ID NO: 130903 - protein, 335 aa, Artificial Sequence
  derived and/or modified sequence
MSKRKAPQETLNGGITDMLTELANFEKNVSQAIHKYNAYRKAASVIAKYPHKIKSGAEAKKLPGVGTKIAEKIDEFLATGKLRKLEKIRQDDTSSSINFLTRVSGIGPSAARKFVDEGIKTLEDLRKNEDKLNHHQRIGLKYFGDFEKRIPREEMLQMQDIVLNEVKKVDSEYIATVCGSFRRGAESSGDMDVLLTHPSFTSESTKQPKLLHQVVEQLQKVHFITDTLSKGETKFMGVCQLPSKNDEKEYPHRRIDIRLIPKDQYYCGVLYFTGSDIFNKNMRAHALEKGFTINEYTIRPLGVTGVAGEPLPVDSEKDIFDYIQWKYREPKDRSE

SEQ ID NO: 130904 - protein, 239 aa, Artificial Sequence
  derived and/or modified sequence
  misc_feature (1)..(1): Xaa can be any naturally occurring amino acid
XGDFEKRIPREEMLQMQDIVLNEVKKVDSEYIATVCGSFRRGAESSGDMDVLLTHPSFTSESTKQPKLLHQVVEQLQKVHFITDTLSKGETKFMGVCQLPSKNDEKEYPHRRIDIRLIPKDQYYCGVLYFTGSDIFNKNMRAHALEKGFTINEYTIRPLGVTVLQATREDLMHNMLLGPQLKAIKELQENPCQWIVKKTSLITSSGNTGNPRTGANEACILPGRHNPIGVLIYFLTFAM

SEQ ID NO: 130905 - protein, 181 aa, Artificial Sequence
  derived and/or modified sequence
MLQMQDIVLNEVKKVDSEYIATVCGSFRRGAESSGDMDVLLTHPSFTSESTKQPKLLHQVVEQLQKVHFITDTLSKGETKFMGVCQLPSKNDEKEYPHRRIDIRLIPKDQYYCGVLYFTGSDIFNKNMRAHALEKGFTINEYTIRPLGVTGVAGEPLPVDSEKDIFDYIQWKYREPKDRSE

SEQ ID NO: 130906 - DNA, 1008 bp, Artificial Sequence
  derived and/or modified sequence
atgagcaagagaaaggccccccaggagaccctgaacggcggcatcaccgacatgctgaccgagctggccaacttcgagaagaacgtgagccaggccatccacaagtacaacgcctacagaaaggccgccagcgtgatcgccaagtacccccacaagatcaagagcggcgccgaggccaagaagctgcccggcgtgggcaccaagatcgccgagaagatcgacgagttcctggccaccggcaagctgagaaagctggagaagatcagacaggacgacaccagcagcagcatcaacttcctgaccagagtgagcggcatcggccccagcgccgccagaaagttcgtggacgagggcatcaagaccctggaggacctgagaaagaacgaggacaagctgaaccaccaccagagaatcggcctgaagtacttcggcgacttcgagaagagaatccccagagaggagatgctgcagatgcaggacatcgtgctgaacgaggtgaagaaggtggacagcgagtacatcgccaccgtgtgcggcagcttcagaagaggcgccgagagcagcggcgacatggacgtgctgctgacccaccccagcttcaccagcgagagcaccaagcagcccaagctgctgcaccaggtggtggagcagctgcagaaggtgcacttcatcaccgacaccctgagcaagggcgagaccaagttcatgggcgtgtgccagctgcccagcaagaacgacgagaaggagtacccccacagaagaatcgacatcagactgatccccaaggaccagtactactgcggcgtgctgtacttcaccggcagcgacatcttcaacaagaacatgagagcccacgccctggagaagggcttcaccatcaacgagtacaccatcagacccctgggcgtgaccggcgtggccggcgagcccctgcccgtggacagcgagaaggacatcttcgactacatccagtggaagtacagagagcccaaggacagaagcgagtag

SEQ ID NO: 130907 - DNA, 1008 bp, Artificial Sequence
  derived and/or modified sequence
atgagcaaacggaaggccccacaggaaaccctgaacgggggtattaccgatatgctgaccgagctagccaattttgagaaaaacgtgtcacaggccattcacaagtacaacgcttatagaaaggcggcttctgtgatagccaagtaccctcacaaaatcaagtccggtgctgaggcaaagaaacttccaggtgttggcaccaaaatcgctgagaaaattgacgaatttctggctaccggtaaacttcgaaagctggagaaaataaggcaggacgatacaagtagctcaatcaacttcctcactcgagtgagcggcatcgggccctcagccgcccgcaagttcgtggacgaaggtataaagaccctggaggatctccggaagaacgaggacaagctcaatcatcatcagcggattgggctcaaatatttcggcgacttcgagaagagaatcccaagggaggagatgcttcaaatgcaggatatcgtactgaacgaagtcaagaaagtcgacagtgaatacatcgctaccgtgtgcggaagcttccggcgtggtgccgagtccagcggggatatggacgtcctgctaacccaccccagtttcacgagtgagagcactaagcagcccaagctgcttcatcaggtggtggaacagctccagaaagtgcattttattactgacacccttagtaaaggtgaaaccaaatttatgggcgtatgccaactacctagtaagaacgacgaaaaggaatacccgcacaggcgcattgatattagactgatcccgaaagaccagtactactgcggggtactgtactttactggaagcgatattttcaataaaaatatgcgggcccacgccctggaaaaggggttcaccatcaacgagtataccattagacctttgggagtgaccggagtggccggggagccactcccagtcgactcggagaaggacattttcgattatatccagtggaaataccgcgaaccgaaggatcgcagtgagtag

SEQ ID NO: 130908 - DNA, 1008 bp, Artificial Sequence
  derived and/or modified sequence
atgagcaagaggaaggccccccaggagaccctgaatggaggcatcacagacatgctgacagagctggccaactttgagaagaatgtgtcccaggccatccacaagtacaatgcctacaggaaggccgccagcgtcatcgccaagtacccccacaagatcaagtctggagctgaggccaagaagctgcccggggtgggcaccaagattgctgagaagattgatgagttcctggccaccgggaagctgaggaagctggagaagatccggcaggatgacaccagcagcagcatcaacttcctgaccagggtgtctggcatcggccccagcgctgccaggaagtttgtggatgagggcatcaagaccctggaggacctgaggaagaatgaagacaagctgaaccaccaccagagaattggcctgaagtactttggagactttgagaagaggatcccccgggaggagatgctgcagatgcaggacatcgtgctgaatgaggtgaagaaggtggacagcgagtacatcgccaccgtgtgtggcagcttcagaagaggagctgagagcagcggggacatggatgtgctgctgacccaccccagcttcaccagcgagagcaccaagcagcccaagctgctgcaccaggtggtggagcagctgcagaaggtgcacttcatcacagacaccctgagcaagggggagaccaagttcatgggcgtgtgccagctgcccagcaagaatgatgagaaggagtacccccacagaagaattgacatccgcctcatccccaaggaccagtactactgcggcgtgctgtacttcaccggcagtgacatcttcaacaagaacatgagggcccacgccctggagaagggcttcaccatcaatgagtacaccatccggcccctgggcgtgactggagtggccggggagcccctgcctgtggacagcgagaaggacatctttgactacatccagtggaagtaccgggagcccaaggacagaagtgaatag

SEQ ID NO: 130909 - DNA, 1008 bp, Artificial Sequence
  derived and/or modified sequence
atgagcaagcggaaggccccccaggagaccctgaacggcggcatcaccgacatgctcactgagctggctaacttcgaaaagaacgtgtcacaggccatccacaagtataacgcttatcggaaagcagccagtgtgatcgccaaataccctcataaaattaaaagcggagcggaggcgaaaaagctacccggagtagggaccaagattgccgagaaaatcgatgagttcctcgcgactggcaaacttaggaagctggagaagatacggcaggatgacacttcatccagcattaacttccttacgagggtttctggaatcgggccatcagcagctaggaagttcgtcgatgaaggaataaagacgcttgaggatcttcgcaagaacgaagataagctcaaccatcaccaacgcatcggtctgaagtattttggcgatttcgagaaacgcatcccacgcgaagaaatgctgcagatgcaggacattgtgctcaatgaggtcaagaaagtggactctgagtacatcgcgactgtgtgtgggtcgttccgccgcggcgctgaatcttctggtgatatggatgtcctgctgacacacccaagctttacatcggagtccaccaaacagccaaaactgttgcaccaggtggtcgaacagttgcagaaagtgcattttatcacggataccctaagtaagggcgaaactaagttcatgggagtctgtcagctgccttctaagaacgatgagaaggaatacccccaccgccggattgacattcgactgatacctaaggatcagtactactgcggtgtcctctattttactgggtcagatatttttaataaaaacatgcgggcgcatgctcttgaaaaagggttcactattaatgagtatactattcggcccctgggggtaaccggtgttgctggcgaacctctgccagttgatagtgagaaggacatcttcgattacattcagtggaagtacagagagccaaaggaccgcagcgagtag

SEQ ID NO: 130910 - DNA, 1008 bp, Artificial Sequence
  derived and/or modified sequence
atgagcaagagaaaggccccacaagaaaccctgaacggcggaattaccgatatgttgacagagctggctaacttcgagaaaaacgtttctcaggcaatccataagtataacgcttatcgcaaagcagcctctgtgattgcaaaatatccacataagataaagtcaggtgctgaggccaagaagctgccaggcgttggaacgaagatcgctgaaaaaatcgacgaattcttagccactggcaaactccgcaagctcgaaaagattcgtcaagatgacacttcctcaagcatcaactttctaacacgggtgagcgggataggcccttcggctgcaagaaagttcgtggatgaggggattaagaccctcgaggatttgaggaagaacgaggataaactgaatcatcatcagcggataggcttgaaatacttcggagacttcgagaagagaatccccagggaagagatgctgcagatgcaggacatagttttgaacgaggtcaagaaggtggattcagaatacatagccacagtctgcggctcttttagaagaggcgcagagtcttccggcgatatggatgttttactaacgcacccttcatttacaagcgagagtacaaagcagcctaaactgcttcatcaggtcgtagaacaattgcaaaaagtacactttattaccgatacattgagcaaaggagaaactaaattcatgggggtctgtcagctcccatctaagaacgacgagaaagagtaccctcaccggagaatcgatatccggttaatcccgaaagatcagtactactgcggggtgctctacttcacaggtagcgatatcttcaataaaaatatgagagcccacgcgttggaaaaaggcttcaccattaatgaatatactatccggccactgggcgtgacaggggtggcaggagagcctctgcctgtggattctgagaaagatatctttgattacatccaatggaagtaccgggagcctaaggatcggagcgaatag

SEQ ID NO: 130911 - DNA, 1329 bp, Artificial Sequence
  derived and/or modified sequence
aacaagcgccgtgcgccccgccccccatcgggggcaaccattgttccgccggtcgcgccggagctgggttgctcctgctcccgtctccaagtcctggtacctccttcaagctgggagagggctctagtccctggttctgaacactctggggttctcgggtgcaggccgccatgagcaaacggaaggcgccgcaggagactctcaacgggggaatcaccgacatgctcacagaactcgcaaactttgagaagaacgtgagccaagctatccacaagtacaatgcttacagaaaagcagcatctgttatagcaaaatacccacacaaaataaagagtggagctgaagctaagaaattgcctggagtaggaacaaaaattgctgaaaagattgatgagtttttagcaactggaaaattacgtaaactggaaaagattcggcaggatgatacgagttcatccatcaatttcctgactcgagttagtggcattggtccatctgctgcaaggaagtttgtagatgaaggaattaaaacactagaagatctcagaaaaaatgaagataaattgaaccatcatcagcgaattgggctgaaatattttggggactttgaaaaaagaattcctcgtgaagagatgttacaaatgcaagatattgtactaaatgaagttaaaaaagtggattctgaatacattgctacagtctgtggcagtttcagaagaggtgcagagtccagtggtgacatggatgttctcctgacccatcccagcttcacttcagaatcaaccaaacagccaaaactgttacatcaggttgtggagcagttacaaaaggttcattttatcacagataccctgtcaaagggtgagacaaagttcatgggtgtttgccagcttcccagtaaaaatgatgaaaaagaatatccacacagaagaattgatatcaggttgatacccaaagatcagtattactgtggtgttctctatttcactgggagtgatattttcaataagaatatgagggctcatgccctagaaaagggtttcacaatcaatgagtacaccatccgtcccttgggagtcactggagttgcaggagaacccctgccagtggatagtgaaaaagacatctttgattacatccagtggaaataccgggaacccaaggaccggagcgaatgaggcctgtatcctccctggcagacacaacccaataggagtcttaatttatttcttaacctttgctatgtaagggtctttggtgtttttaaatgattgtttcttcttcatgcttttgcttgcaatgtagtcaataaaacctcatgtactatta

SEQ ID NO: 130912 - protein, 527 aa, Artificial Sequence
  derived and/or modified sequence
MAPERLRSRALSAFKLRGLLLRGEAIKYLTEALQSISELELEDKLEKIINAVEKQPLSSNMIERSVVEAAVQECSQSVDETIEHVFNIIGAFDIPRFVYNSERKKFLPLLMTNHPAPNLFGTPRDKAEMFRERYTILHQRTHRHELFTPPVIGSHPDESGSKFQLKTIETLLGSTTKIGDAIVLGMITQLKEGKFFLEDPTGTVQLDLSKAQFHSGLYTEACFVLAEGWFEDQVFHVNAFGFPPTEPSSTTRAYYGNINFFGGPSNTSVKTSAKLKQLEEENKDAMFVFLSDVWLDQVEVLEKLRIMFAGYSPAPPTCFILCGNFSSAPYGKNQVQALKDSLKTLADIICEYPDIHQSSRFVFVPGPEDPGFGSILPRPPLAESITNEFRQRVPFSVFTTNPCRIQYCTQEITVFREDLVNKMCRNCVRFPSSNLAIPNHFVKTILSQGHLTPLPLYVCPVYWAYDYALRVYPVPDLLVIADKYDPFTTTNTECLCINPGSFPRSGFSFKVFYPSNKTVEDSKLQGF

SEQ ID NO: 130913 - DNA, 1584 bp, Artificial Sequence
  derived and/or modified sequence
atggcccccgagagactgagaagcagagccctgagcgccttcaagctgagaggcctgctgctgagaggcgaggccatcaagtacctgaccgaggccctgcagagcatcagcgagctggagctggaggacaagctggagaagatcatcaacgccgtggagaagcagcccctgagcagcaacatgatcgagagaagcgtggtggaggccgccgtgcaggagtgcagccagagcgtggacgagaccatcgagcacgtgttcaacatcatcggcgccttcgacatccccagattcgtgtacaacagcgagagaaagaagttcctgcccctgctgatgaccaaccaccccgcccccaacctgttcggcacccccagagacaaggccgagatgttcagagagagatacaccatcctgcaccagagaacccacagacacgagctgttcaccccccccgtgatcggcagccaccccgacgagagcggcagcaagttccagctgaagaccatcgagaccctgctgggcagcaccaccaagatcggcgacgccatcgtgctgggcatgatcacccagctgaaggagggcaagttcttcctggaggaccccaccggcaccgtgcagctggacctgagcaaggcccagttccacagcggcctgtacaccgaggcctgcttcgtgctggccgagggctggttcgaggaccaggtgttccacgtgaacgccttcggcttcccccccaccgagcccagcagcaccaccagagcctactacggcaacatcaacttcttcggcggccccagcaacaccagcgtgaagaccagcgccaagctgaagcagctggaggaggagaacaaggacgccatgttcgtgttcctgagcgacgtgtggctggaccaggtggaggtgctggagaagctgagaatcatgttcgccggctacagccccgccccccccacctgcttcatcctgtgcggcaacttcagcagcgccccctacggcaagaaccaggtgcaggccctgaaggacagcctgaagaccctggccgacatcatctgcgagtaccccgacatccaccagagcagcagattcgtgttcgtgcccggccccgaggaccccggcttcggcagcatcctgcccagaccccccctggccgagagcatcaccaacgagttcagacagagagtgcccttcagcgtgttcaccaccaacccctgcagaatccagtactgcacccaggagatcaccgtgttcagagaggacctggtgaacaagatgtgcagaaactgcgtgagattccccagcagcaacctggccatccccaaccacttcgtgaagaccatcctgagccagggccacctgacccccctgcccctgtacgtgtgccccgtgtactgggcctacgactacgccctgagagtgtaccccgtgcccgacctgctggtgatcgccgacaagtacgaccccttcaccaccaccaacaccgagtgcctgtgcatcaaccccggcagcttccccagaagcggcttcagcttcaaggtgttctaccccagcaacaagaccgtggaggacagcaagctgcagggcttctag

SEQ ID NO: 130914 - DNA, 1584 bp, Artificial Sequence
  derived and/or modified sequence
atggcgccagagcggttgcgaagccgggctctttccgctttcaagctcaggggacttctccttcgcggtgaagctatcaaatatctgacagaggccctgcagagcatttccgaactggagttagaggataagctcgaaaaaataattaacgccgtcgagaaacagcctctgagtagcaacatgatagaaaggtcagtggtggaagctgccgttcaggagtgtagccagagcgtggacgaaacaattgagcacgtgtttaatattattggcgcttttgatattcctcgcttcgtctacaacagcgagcgcaagaagtttctgcccctgctcatgaccaaccaccccgcacccaatctgtttgggacaccccgagataaggctgagatgtttagggaacgctacaccatcttgcaccagcgtacccatcggcacgagctgttcactcctccagtgattggaagtcacccggacgaatcagggtctaagtttcagctaaaaacaatcgagactctgctcggctccacaaccaaaattggcgacgcaatcgtgctgggaatgattactcagttaaaggaaggaaaatttttcctggaggatcctacaggtaccgtgcaactcgatctctcaaaggcacagtttcatagcggactgtacacggaagcctgcttcgtgctagctgaaggatggttcgaagatcaagtctttcatgtgaatgcgttcggcttcccaccaactgagccaagttctactaccagagcatattatggcaacattaactttttcggagggccctcaaacacaagtgtgaaaaccagcgccaaactcaaacaactcgaagaggaaaacaaggacgctatgtttgtgtttctaagtgacgtgtggctggaccaggtggaggtgctcgagaaactgcggataatgtttgctggctatagccctgctcctcctacctgcttcatcctctgcggaaacttctcatcggccccatacgggaaaaaccaagtgcaagccctcaaggatagcctgaagacacttgctgatattatctgcgaataccctgatatacatcagagctccagatttgtgtttgtgcccggccctgaagaccctggcttcggttccattctgccaagacctcctctcgccgagagtattaccaacgagtttcggcagagggtgccattctcagtcttcacgaccaatccatgccggatccagtattgtacccaggaaatcaccgtgttccgcgaggatctggtgaataaaatgtgccgaaattgcgtgaggttcccctctagtaatctggcaatccccaatcactttgtcaagactatcctttcccagggccacctgacaccgctgcctctgtatgtgtgtcctgtctactgggcctacgattatgcacttcgggtctacccagttcctgacttgctggtaatcgcagataaatacgaccctttcacaacaacaaataccgagtgtctgtgcattaaccctggctcgttcccacgttctggtttctcctttaaagttttttatcctagcaataagactgtcgaggattcaaaactgcaggggttttag

SEQ ID NO: 130915 - DNA, 1584 bp, Artificial Sequence
  derived and/or modified sequence
atggcccctgagcggctgcggagccgggccctgagcgccttcaagctgcggggcctgctgctgcggggggaggccatcaagtacctgacagaggccctgcagagcatcagcgagctggagctggaggacaagctggagaagatcatcaatgctgtggagaagcagcccctgagcagcaacatgattgaaagatctgtggtggaggccgctgtgcaggagtgcagccagagcgtggatgagaccatcgagcacgtgttcaacatcattggagcctttgacatccccaggtttgtgtacaacagcgagaggaagaagttcctgcccctgctgatgaccaaccacccagcccccaacctgtttggcaccccccgggacaaggccgagatgttccgggagcgctacaccatcctgcaccagaggacccacagacatgagctgttcaccccacctgtgattggcagccacccagatgaaagtggcagcaagttccagctgaagaccatcgagaccctgctgggcagcaccaccaagattggagatgccatcgtgctgggcatgatcacccagctgaaggagggcaagttcttcctggaggaccccactggaacagtgcagctggacctgagcaaggcccagttccacagcggcctgtacacagaggcctgctttgtgctggccgagggctggtttgaggaccaggtgttccacgtgaatgccttcggcttccccccaacagagcccagcagcaccacccgggcctactacggcaacatcaacttctttggaggccccagcaacacctctgtgaagaccagcgccaagctgaagcagctggaggaggagaacaaggatgccatgtttgtgttcctgagtgatgtgtggctggaccaggtggaggtgctggagaagctgcgcatcatgtttgctggctacagccctgccccacccacctgcttcatcctgtgtggcaacttcagcagcgccccctacggcaagaaccaggtgcaggccctgaaggacagcctgaagaccctggccgacatcatctgtgagtacccagacatccaccagagcagcagatttgtgtttgtgcccggccctgaggaccccggcttcggcagcatcctgcccaggcctcccctggccgagagcatcaccaatgagttccggcagagggtgcccttcagcgtcttcaccaccaacccctgccgcatccagtactgcacccaggagatcaccgtcttccgggaggacctggtgaacaagatgtgcaggaactgtgtgcgcttccccagcagcaacctggccatccccaaccactttgtgaagaccatcctgagccagggccacctgacccccctgcccctgtatgtgtgccctgtgtactgggcctatgactatgccctgcgggtgtaccctgtgcctgacctgctggtgattgctgacaagtatgaccccttcaccaccaccaacacagaatgtctgtgcatcaaccctggcagcttccccaggagcggcttctccttcaaggtgttctaccccagcaacaagacagtggaggacagcaagctgcagggcttctag

SEQ ID NO: 130916 - DNA, 1584 bp, Artificial Sequence
  derived and/or modified sequence
atggcccccgagcggctgcggagccgggccctgagcgccttcaagcttcggggcctgctgctgagaggcgaggctataaaatacttgacagaagctttgcagtctattagtgagctggaattagaggacaagttagagaagatcattaacgcagtggagaaacagcctctgagtagtaatatgattgagcgatctgtcgtagaagccgccgttcaagagtgttctcagagtgttgacgagaccattgagcatgtctttaacatcatcggggcctttgacattccccggttcgtttataattcagaacggaagaagttcttacccctgctcatgacaaaccatccagcccccaatttgttcggaaccccaagagataaggcagagatgtttcgggagcgatataccatcttgcatcagaggacccacaggcatgagctcttcacccctccggtgattgggtctcacccggatgaatccgggagcaagttccaactgaagactatagagactcttctgggatcaaccactaagatcggtgatgcgatcgttctgggaatgatcactcagctgaaggagggaaaattcttcctggaggacccgaccggcacagtccagcttgatctgtctaaggctcaattccacagcggactctataccgaggcttgctttgttcttgctgaaggttggttcgaagaccaggtctttcacgtgaacgcattcgggttcccaccaaccgaaccctcctctaccacgcgagcttactatggaaacatcaatttttttggtggcccttccaataccagcgtcaaaactagtgctaagttaaagcagttggaggaggagaacaaagacgccatgtttgtgttcttgagcgatgtgtggctggatcaggtggaggttctggagaagttacgaataatgttcgctggctactcacccgcgccccctacctgctttatcctttgtgggaatttctcttctgcgccatacggcaaaaaccaggtgcaggctctgaaagattctctgaagacactggcggacattatatgtgagtaccctgacattcaccagagctcgcggttcgtgtttgtccccggccctgaggatccaggtttcggctcaattcttccacggcctcctttggcagaatcaatcaccaacgagtttagacagcgcgtgccattctcagtgtttaccactaacccctgtagaatccaatattgtacacaggagattacagtgttcagagaggatcttgtcaacaagatgtgccgcaactgcgtgcgctttccttcgtctaatctcgctattccaaaccatttcgttaagaccattttgagccagggccacctcactcccttgcccctctatgtgtgccccgtctattgggcctatgactatgcattgagggtttatccagtgccagatctactggtgattgcagataagtacgacccgtttactacgacaaacacagagtgtttatgcatcaacccaggctccttccccagatcaggattttccttcaaggtgttttacccaagcaacaagacagtggaggactctaagctccagggcttctag

SEQ ID NO: 130917 - DNA, 1776 bp, Artificial Sequence
  derived and/or modified sequence
taacagggtttagcgccacgcgggccagggccgaggccggagctgggaggggcgcgcccgggaaggggcggagctgcggcggtggcgccaaatcgcaaatatggcgccggagcggctgcggagccgggcgctctccgccttcaagttgcggggcttgctgctccgtggtgaagctattaagtacctcacagaagctcttcagtctatcagtgaattagagcttgaagataaactggaaaagataattaatgcagttgagaagcaacccttgtcatcaaacatgattgaacgatctgtggtggaagcagcagtccaggaatgcagtcagtctgttgatgaaactatagagcacgttttcaatatcataggagcatttgatattccacgctttgtgtacaattcagaaagaaaaaaatttcttcctctgttaatgaccaaccaccctgcaccaaatttatttggaacaccaagagataaagcagagatgtttcgtgagcgatataccattttgcaccagaggacccacaggcatgaattatttactcctccggtgataggttctcaccctgatgaaagcggaagcaaattccagcttaaaacaatagaaaccttattgggtagtacaaccaaaatcggagatgcgattgttcttggaatgataacgcagttaaaagagggaaaattttttctggaagatcctactggaacagtccaactagaccttagtaaagctcagttccatagtggtttatacacagaggcatgctttgtcttagcagaaggttggtttgaagatcaagtgtttcatgtcaatgcctttggatttccacccactgagccctctagtactactagggcatactatggaaatattaatttttttggaggtccttctaatacatctgtgaagacttctgcaaaactaaaacagctagaagaggagaataaagatgctatgtttgtgtttttatctgatgtttggttggaccaggtggaagtattggaaaaacttcgcataatgtttgctggttattcaccagcacctccaacctgctttattctgtgtggtaatttttcatctgcaccatatggaaaaaatcaagttcaagctttgaaagattccctaaaaactttggcagatataatatgtgaatacccagatattcaccaaagtagtcgttttgtgtttgtacctggtccagaggatcctggatttggttccatcttaccaaggccaccacttgctgaaagcatcactaatgaattcagacaaagggtaccattttcagtttttactactaatccttgcagaattcagtactgtacacaggaaattactgtcttccgtgaagacttagtaaataaaatgtgcagaaactgcgtccgttttcctagcagcaatttggctattcctaatcactttgtaaagactatcttatcccaaggacatctgactcccctacctctttatgtctgcccagtgtattgggcatatgactatgctttgagagtgtatcctgtgcccgatctacttgtcattgcagacaaatatgatcctttcactacgacaaataccgaatgcctctgcataaaccctggctcttttccaagaagtggattttcattcaaagttttttatccttctaataagacagtagaagatagcaaacttcaaggcttttgagattcttaaagatcatctgaagaaaattcatcagttttctgcttaactctatatcttatgtgattctgatattacaataaaattatggtaaa

SEQ ID NO: 130918 - DNA, 1584 bp, Artificial Sequence
  derived and/or modified sequence
atggcgccagagcggttgcgtagtcgcgcactgagtgcgttcaagctccgcggtctgctcttaaggggagaagcgatcaagtatttgacagaggccctgcagagcatcagtgaactggagctggaagacaagctggaaaagattatcaacgccgtagagaagcagccgctctcttccaacatgatagaacgaagcgtcgtcgaagctgcagtgcaggagtgttctcaatccgtagacgaaacaatcgaacacgtctttaacatcataggcgcttttgatatccccagattcgtgtataactccgaacggaagaagttccttccactgctgatgaccaatcacccggcaccgaatctgttcggaacaccgagggacaaggccgagatgtttcgtgaacggtacacaatcctccatcagaggactcaccggcacgaactcttcactccaccggtaatcggctctcacccagatgagagcggcagcaagtttcaactaaagacaatcgagactctcctgggttccacaactaaaatcggcgatgcaatcgtactgggcatgatcacccagcttaaagaaggaaaattcttcctcgaggatcccacaggcacggtgcagctcgacctcagcaaggcacagtttcactcgggtctctacacggaggcatgctttgtgctcgccgaaggctggtttgaggatcaagtgttccacgtaaatgctttcggctttccccctactgaaccatctagtacaacgagagcgtattacggtaatattaattttttcggcggtccctctaatacgagcgtgaaaactagtgccaagctgaagcagctggaggaggaaaacaaggacgctatgttcgtgttcctgagcgatgtctggttggaccaggtcgaagtgctcgagaaattacggattatgtttgcaggctattctccagctccccctacttgctttattctgtgcggcaactttagcagcgcaccctacggcaaaaatcaggtgcaagccctgaaggatagcctaaagacactggccgatattatctgtgagtaccctgacattcatcagtcctctagattcgtgtttgtccccggtcccgaagaccctggtttcggaagtatcctcccccgacccccactagctgaatccatcactaacgagtttcggcagcgcgtgccattttcagtatttacaacaaatccatgtcggattcagtattgcacacaggagataactgtgttccgggaagatctcgtaaacaagatgtgcagaaattgcgttcgctttcctagctcaaatcttgcgatcccgaaccattttgtgaaaacaatccttagccagggacatctgacacccttaccgttgtatgtatgtcctgtgtattgggcctatgattatgctctgcgcgtgtatcctgttcctgatctcctggtgatcgctgacaagtacgatcccttcactaccaccaataccgagtgcctttgcattaatcctggctcatttccacggagcgggttttccttcaaggttttctatccttcaaataaaaccgtggaggattctaagttacaaggtttctag

SEQ ID NO: 130919 - protein, 1239 aa, Artificial Sequence
  derived and/or modified sequence
MSRLLWRKVAGATVGPGPVPAPGRWVSSSVPASDPSDGQRRRQQQQQQQQQQQQQPQQPQVLSSEGGQLRHNPLDIQMLSRGLHEQIFGQGGEMPGEAAVRRSVEHLQKHGLWGQPAVPLPDVELRLPPLYGDNLDQHFRLLAQKQSLPYLEAANLLLQAQLPPKPPAWAWAEGWTRYGPEGEAVPVAIPEERALVFDVEVCLAEGTCPTLAVAISPSAWYSWCSQRLVEERYSWTSQLSPADLIPLEVPTGASSPTQRDWQEQLVVGHNVSFDRAHIREQYLIQGSRMRFLDTMSMHMAISGLSSFQRSLWIAAKQGKHKVQPPTKQGQKSQRKARRGPAISSWDWLDISSVNSLAEVHRLYVGGPPLEKEPRELFVKGTMKDIRENFQDLMQYCAQDVWATHEVFQQQLPLFLERCPHPVTLAGMLEMGVSYLPVNQNWERYLAEAQGTYEELQREMKKSLMDLANDACQLLSGERYKEDPWLWDLEWDLQEFKQKKAKKVKKEPATASKLPIEGAGAPGDPMDQEDLGPCSEEEEFQQDVMARACLQKLKGTTELLPKRPQHLPGHPGWYRKLCPRLDDPAWTPGPSLLSLQMRVTPKLMALTWDGFPLHYSERHGWGYLVPGRRDNLAKLPTGTTLESAGVVCPYRAIESLYRKHCLEQGKQQLMPQEAGLAEEFLLTDNSAIWQTVEELDYLEVEAEAKMENLRAAVPGQPLALTARGGPKDTQPSYHHGNGPYNDVDIPGCWFFKLPHKDGNSCNVGSPFAKDFLPKMEDGTLQAGPGGASGPRALEINKMISFWRNAHKRISSQMVVWLPRSALPRAVIRHPDYDEEGLYGAILPQVVTAGTITRRAVEPTWLTASNARPDRVGSELKAMVQAPPGYTLVGADVDSQELWIAAVLGDAHFAGMHGCTAFGWMTLQGRKSRGTDLHSKTATTVGISREHAKIFNYGRIYGAGQPFAERLLMQFNHRLTQQEAAEKAQQMYAATKGLRWYRLSDEGEWLVRELNLPVDRTEGGWISLQDLRKVQRETARKSQWKKWEVVAERAWKGGTESEMFNKLESIATSDIPRTPVLGCCISRALEPSAVQEEFMTSRVNWVVQSSAVDYLHLMLVAMKWLFEEFAIDGRFCISIHDEVRYLVREEDRYRAALALQITNLLTRCMFAYKLGLNDLPQSVAFFSAVDIDRCLRKEVTMDCKTPSNPTGMERRYGIPQGEALDIYQIIELTKGSLEKRSQPGP

SEQ ID NO: 130920 - DNA, 3720 bp, Artificial Sequence
  derived and/or modified sequence
atgtcacgtctgctctggcgtaaggtagcgggggcaactgtgggacccggccccgttcccgcacccggccgttgggtctcctcctcagtgccggcctctgacccctcagatggccagcggagaaggcaacagcagcagcagcaacagcagcagcagcagcagcagccacagcagccacaggtcctgagcagcgaaggaggccagctgcgacacaacccgttagacatacaaatgctttcgagaggcctccacgaacagattttcggtcagggcggagaaatgcctggcgaggctgccgtaaggcgcagcgtggagcacctacagaaacatggcctttggggacagccagccgtccccctgcccgatgtcgagcttcgccttccccccttatacggcgataatctcgaccagcacttccggctgctggcccagaagcagtcattgccttacctggaagcagcaaatttgcttttgcaggcccaactgccacccaaacccccagcttgggcatgggctgagggatggacgagatatgggcccgagggtgaggccgtgcccgtggctatcccagaggagagagcgctggtttttgacgtagaggtgtgtctggccgagggtacctgtccgacattagcggtggctatatctccgtctgcttggtacagctggtgttctcagcggctggtggaggagaggtattcctggacatctcaactctctcccgccgacctgatccccctggaggtgccaaccggggcctcatcccccactcagcgggattggcaggagcaactggttgtggggcataatgtttccttcgaccgtgctcacatacgggagcagtacctcattcagggaagcaggatgcggttcttagacacaatgtccatgcatatggcgatatctggattgtcttcctttcagcggagcctgtggattgctgccaagcagggaaagcacaaggtgcagcctcctaccaagcagggccagaaatcacagcgcaaagctagaagggggcccgctattagtagctgggattggctggacatttctagcgtgaacagccttgcagaagtccaccgattgtacgtgggcggccctccactcgaaaaagagccacgcgaactgttcgtgaaaggaaccatgaaagatatcagagagaattttcaggatctcatgcagtattgcgctcaggacgtttgggcaactcatgaagttttccagcaacaactcccactgttcctggagagatgccctcacccagtaaccctggctggtatgctagaaatgggagtcagctatctgcccgtgaatcagaattgggagcgctatttggctgaggcccaggggacgtacgaagagctgcagcgcgagatgaagaaatccctgatggatcttgcaaatgacgcatgtcagttactcagtggcgagagatacaaagaggatccgtggctgtgggatttagaatgggatctccaggagttcaaacaaaagaaggctaagaaggtgaagaaagagcccgctaccgccagcaagctccctattgagggcgccggcgctccaggggatccgatggatcaagaagatctgggaccgtgttccgaggaagaggaatttcagcaggatgtcatggcccgagcctgcttacaaaaattgaaaggaacaaccgagctgttacccaagcgaccccaacacctccccggccaccctggatggtatcggaagctgtgccctaggctagatgatcccgcgtggacgcctggaccatctctgctttctctgcaaatgagagtaacccccaagcttatggccctgacctgggacggtttccccctgcactattctgaaagacacggttggggctacttggtgcctggcaggagagacaatttggctaaattgccaactgggaccacccttgagtctgcaggggtcgtttgtccttatcgagccatcgagagcctgtacagaaagcactgtctggagcaggggaagcagcaactgatgccgcaggaagccgggctggccgaagagttcctgctgacagacaatagcgcaatttggcaaaccgtggaagaactggattatctcgaggtggaagccgaggcaaaaatggagaatcttcgtgcagccgttccaggacagcccctcgccctgacggcccggggcggtcccaaagacacccagccaagttaccaccacggaaatgggccctataacgacgtggatattcccggttgctggttctttaagttaccccacaaggacgggaacagctgcaatgttggttcgccttttgccaaggacttcctaccaaagatggaagatgggacattgcaagcggggcccgggggggccagcggaccccgtgcactggaaatcaacaagatgatctctttttggcggaatgcgcataagcgaatatcctctcaaatggtcgtgtggcttccccggagcgcactccctcgggcagtaatacgacaccccgactacgatgaggaagggctgtatggagccatactgccccaagttgtgaccgcaggcaccatcacaagacgagctgttgaacctacttggttgacagcctctaatgccaggccagacagagtcggctctgaactgaaagcaatggttcaggcacccccgggctacaccctggtgggggcagacgttgatagccaggagctctggatcgctgctgttttgggcgacgcgcacttcgcgggcatgcacgggtgtactgccttcgggtggatgactttacagggaaggaaaagccgagggactgatttacacagcaaaactgccacaaccgtgggtatcagccgtgagcatgctaagatcttcaattatggtcggatctacggggcgggtcagccctttgccgagcgtcttttgatgcagtttaatcatcgactgacgcagcaggaggcggccgagaaagctcagcaaatgtacgccgcaacaaagggcctcaggtggtacaggttatctgatgaaggggagtggttagtgcgcgagttaaatctgccggttgatcgcactgaagggggatggatctccctgcaggatctgcgtaaggttcaacgcgagacggcccgaaagagtcagtggaagaagtgggaggtggtcgccgagagggcgtggaaaggtggcaccgagagcgaaatgtttaataagctggagagtatcgcaaccagtgacatcccacgaacaccggtccttggctgctgcattagtcgcgcgctagaaccaagcgctgtgcaggaagagttcatgacaagccgggtgaattgggtagtacaaagcagtgctgtagactatctgcacctgatgctggtagcgatgaaatggctattcgaagagtttgctatcgacggaagattttgcatctccatccacgatgaggtgaggtacctcgtgagagaagaggacagatatagggcagccctggctttacagataaccaatttgctgactcgctgcatgtttgcatataagttgggtttgaacgacctcccccagtctgtggcgtttttctcagccgtcgatatagaccggtgtcttaggaaggaggtgaccatggattgcaagaccccctcaaatcccacaggcatggagaggaggtacgggatcccgcagggtgaagccctcgatatctaccaaattatcgagctgacaaagggttcactcgagaaacggtcccaacctggcccctag

SEQ ID NO: 130921 - DNA, 3720 bp, Artificial Sequence
  derived and/or modified sequence
atgtccaggcttctctggcgtaaggtggccggcgccaccgtggggcccggtcccgtcccggctcctggcaggtgggtttcatcatcagtgcctgccagtgatccatccgacggccaaagaagacgccagcagcagcagcaacaacaacagcagcagcagcagcaaccacaacagccccaggttttatcttccgaaggggggcagcttcggcacaaccctctggacattcagatgctcagccgcggattgcatgaacaaatctttggccaaggaggggaaatgccaggggaagcagctgttagacggtcagtcgaacaccttcagaaacatggcctgtggggccagcctgctgttccccttcccgacgtggaactgaggcttcctcccctttacggcgacaatctggatcagcacttccgactgttggcacagaaacagagccttccatacctggaagccgctaaccttcttttgcaggcacagctgccacccaaaccaccggcctgggcgtgggccgagggatggacaaggtacggccccgagggggaggccgttcccgtcgctatcccagaagagagagcactggtgttcgatgtggaggtgtgtttggccgaaggcacctgcccaacgcttgctgtggcaataagcccgtcagcctggtatagctggtgtagtcagaggctggtagaggagcggtacagctggacctctcaactaagtcctgctgatctaataccactcgaggtccctacaggggcaagcagcccaacccaacgggattggcaggaacagcttgtggtgggacacaatgtgtcttttgacagggcccacatcagagagcagtacctcattcagggatcccggatgaggttcctggataccatgtccatgcacatggccatctctggcttatcttctttccaacgcagcctgtggatagccgcgaagcaggggaaacacaaagtgcaaccccccactaagcagggacagaagtcccagcggaaggctcgccgcggaccggcgatctccagctgggactggctggacatctcatccgtcaactcactggctgaagtgcatcgcctgtatgtgggcggtcctcctctcgaaaaggaaccccgagagttgtttgtcaagggtaccatgaaagatattagagagaacttccaggacctcatgcagtactgtgcacaagatgtttgggccactcatgaggttttccagcagcagctccccctgttccttgagaggtgtccacatccggtgacactagcgggaatgctcgagatgggtgtctcatacttgcctgtaaatcagaactgggagcggtacctggctgaagcccaggggacatacgaagagctccagcgggagatgaaaaaatccttgatggatctcgccaacgatgcatgccagctgctgtccggagaacgttacaaggaggatccttggctgtgggatctggaatgggatctgcaagagttcaagcagaaaaaagccaaaaaagtcaagaaagagcctgcaaccgcatccaagcttcccattgaaggcgccggcgccccgggcgacccaatggaccaagaggatttaggcccctgcagtgaggaggaagaattccagcaggacgtcatggcgcgggcttgcttacagaagctgaaaggcacaaccgagttattgcctaagcggccccagcaccttcccggacatccagggtggtaccgcaagctctgcccccgtcttgatgatcccgcctggaccccagggccctcactgttatctctgcagatgcgggttaccccaaaacttatggccttgacctgggacgggttccccctccactacagtgagaggcatggatgggggtatctcgtgccagggcgtagggacaatctagcgaaacttcctaccggtaccacactggaaagtgccggagttgtttgtccttaccgggccatcgagagcctatacaggaaacattgtttggaacagggcaaacagcagttaatgccccaggaagccggtctcgctgaagagttcctactcactgataattcggctatttggcaaactgtagaggagcttgattacttagaagtggaggcagaagcaaaaatggaaaatctgcgggccgccgtgcccggacaacccctggctttaacagccaggggtggaccaaaagatacacagccctcttatcatcatggcaacggtccctataatgacgtcgacatccctggatgttggtttttcaaattgccccataaggacggcaactcctgtaatgtgggctccccattcgccaaggactttctgccaaagatggaggacgggacactgcaggccggacccggtggggccagtggtcccagagctctggagataaataagatgattagtttctggaggaacgcccacaagcggattagctctcagatggtggtttggctcccaagaagcgccctcccgagagccgtcatcagacacccggattacgacgaggagggactatatggcgctattctgccacaagttgtaacagccggaacgatcactagacgagctgtggaacccacctggctgacagcctccaacgcgcgccccgatcgggtagggagtgaacttaaggcaatggtgcaggcacctcccggctacactctagttggggcagacgtggattcacaggagctgtggattgcggctgtgctgggtgacgctcacttcgcaggaatgcatggctgtactgcttttggatggatgactctgcaaggtcggaagagtcgcggaaccgatctgcattctaaaactgccactaccgtggggattagccgcgagcacgcaaagattttcaattacggtcgaatatacggagccggtcagcctttcgcagaacgcctccttatgcaattcaatcatcgccttacacaacaagaggccgccgaaaaggcccaacaaatgtacgctgccacaaaggggctgcgctggtaccgactgagcgacgagggggagtggctagtccgggagctaaacttgccagtggaccgaacagagggaggctggatttccttgcaagatttaagaaaggtgcagcgcgaaactgctagaaagagccagtggaagaagtgggaggttgtcgctgagcgggcttggaagggaggcaccgaaagcgaaatgttcaacaaactagagagcattgctacctctgatatccctcgaacacccgtgctaggctgttgtatctcaagagccttagaaccaagcgcagtgcaggaggagtttatgacaagccgggtgaattgggttgttcagtcctctgcagtggattatctgcacctgatgcttgtagctatgaagtggctctttgaggagtttgctatagatggccgtttttgtatttccatccatgatgaggtccgctatttagtacgggaggaggaccgctatagggccgcgctcgcattacagataaccaacttgctgacccgttgtatgttcgcctataagttggggctcaatgacctgccacagtccgtcgcattttttagcgcagtggacatcgatcggtgccttcgcaaggaggtaacgatggactgcaagacaccttctaaccctaccggtatggagcggagatacggcatcccacagggcgaagctttagacatctatcaaatcattgagctgactaaaggttccttggagaagcggtcccaacccggaccttag

SEQ ID NO: 130922 - DNA, 3720 bp, Artificial Sequence
  derived and/or modified sequence
atgagccggctgctgtggaggaaggtggccggggccaccgtgggccctggccctgtgcctgcccctggccgctgggtgagcagctctgtgcctgccagtgaccccagtgatggccagaggcggcggcagcagcagcagcagcagcagcagcagcagcagcagcagccccagcagccccaggtgctgagcagcgagggcggccagctgcggcacaaccccctggacatccagatgctgagccggggcctgcacgagcagatcttcggccagggcggggagatgcctggagaggccgctgtgagaagatctgtggagcacctgcagaagcacggcctgtggggccagcctgctgtgcccctgcctgatgtggagctgcggctgccccccctgtatggagacaacctggaccagcacttccggctgctggcccagaagcagagcctgccctacctggaggccgccaacctgctgctgcaggcccagctgccccccaagcccccagcctgggcctgggccgagggctggaccaggtatggccctgagggggaggccgtgcctgtggccatccctgaggagcgggccctggtgtttgatgtggaggtgtgcctggccgagggcacctgccccaccctggccgtggccatcagccccagcgcctggtacagctggtgcagccagaggctggtggaggagcgctacagctggaccagccagctgagccctgctgacctgatccccctggaggtgcccactggagccagcagccccacccagagggactggcaggagcagctggtggtgggccacaacgtgtcctttgaccgggcccacatccgggagcagtacctgatccagggcagcaggatgaggttcctggacaccatgtccatgcacatggccatcagcggcctgagcagcttccagaggagcctgtggattgctgccaagcagggcaagcacaaggtgcagccccccaccaagcagggccagaagagccagaggaaggcccggcggggccctgccatcagctcctgggactggctggacatcagctctgtgaacagcctggccgaggtgcaccggctgtatgtgggcggcccccccctggagaaggagccccgggagctgtttgtgaagggcaccatgaaggacatccgggagaacttccaggacctgatgcagtactgtgcccaggatgtgtgggccacccatgaggtgttccagcagcagctgcccctcttcctggagcgctgcccccaccctgtgaccctggccggcatgctggagatgggcgtgtcctacctgcctgtgaaccagaactgggagcgctacctggccgaggcccagggcacctatgaggagctgcagcgggagatgaagaagagcctgatggacctggccaatgatgcctgccagctgctgtctggagagcgctacaaggaggacccctggctgtgggacctggagtgggacctgcaggagttcaagcagaagaaggccaagaaggtgaagaaggagcccgccacagccagcaagctgcccattgaaggagctggggcccctggggaccccatggaccaggaggacctgggcccctgcagcgaggaggaggagttccagcaggatgtgatggcccgggcctgcctgcagaagctgaagggcaccacagagctgctgcccaagaggccccagcacctgcccggccaccctggctggtacaggaagctgtgcccccggctggatgatcctgcctggaccccaggccccagcctgctgagcctgcagatgagggtgacccccaagctgatggccctgacctgggatggcttccccctgcactacagcgagcggcacggctggggctacctggtgcctggaagaagagacaacctggccaagctgcccaccggcaccaccctggagagcgctggggtggtgtgcccctaccgggccatcgagagcctgtacaggaagcactgcctggagcagggcaagcagcagctgatgccccaggaggccggcctggccgaggagttcctgctgacagacaacagcgccatctggcagacagtggaggagctggactacctggaggtggaggccgaggccaagatggagaacctgcgggctgctgtgcccggccagcccctggccctgacagcccggggcggccccaaggacacccagcccagctaccaccacggcaatggcccctacaatgatgtggacatccctggctgctggttcttcaagctgccccacaaggatggcaacagctgcaatgtgggcagcccctttgccaaggacttcctgcccaagatggaggatggcaccctgcaggccggccctggaggagccagcggcccccgggccctggagatcaacaagatgatctccttctggagaaatgcccacaagaggatcagcagccagatggtggtgtggctgcccaggtctgccctgccccgggccgtcatccgccacccagactatgatgaggagggcctgtatggagccatcctgccccaggtggtgacagctggcaccatcacccggcgggctgtggagcccacctggctgacagccagcaatgcccggccagacagagtgggcagcgagctgaaggccatggtgcaggcccctcctggctacaccctggtgggcgcagatgtggacagccaggagctgtggattgctgctgtgctgggagatgcccactttgctggcatgcacggctgcacagccttcggctggatgaccctgcagggcaggaagagccggggcacagacctgcacagcaagacagccaccaccgtgggcatcagccgggagcacgccaagatcttcaactacggccgcatctatggagctggccagccctttgctgagcggctgctgatgcagttcaaccaccggctgacccagcaggaggccgctgagaaggcccagcagatgtatgctgccaccaagggcctgcgctggtaccgcctgagtgatgaaggagagtggctggtgcgggagctgaacctgcctgtggacagaacagaaggaggctggatcagcctgcaggacctgaggaaggtgcagcgggagacagccaggaagagccagtggaagaagtgggaggtggtggccgagcgggcctggaagggcggcacagaaagtgagatgttcaacaagctggagagcatcgccaccagtgacatccccaggacccctgtgctgggctgctgcatcagccgggccctggagcccagcgctgtgcaggaggagttcatgaccagccgggtgaactgggtggtgcagagcagcgctgtggactacctgcacctgatgctggtggccatgaagtggctgtttgaggagtttgccattgatggccgcttctgcatcagcatccatgatgaggtgcgctacctggtgcgggaggaggaccgctacagagctgccctggccctgcagatcaccaacctgctgacccgctgcatgtttgcctacaagctgggcctgaatgacctgccccagagcgtggccttcttctctgctgtggacatcgaccgctgcctgaggaaggaggtgaccatggactgcaagacccccagcaaccccaccggcatggagcggcgctatggcatcccccagggcgaggccctggacatctaccagatcatcgagctgaccaagggcagcctggagaagaggagccagcccggcccctag

SEQ ID NO: 130923 - DNA, 3720 bp, Artificial Sequence
  derived and/or modified sequence
atgagccggctgctgtggcggaaggtggccggcgccaccgtgggccctggccctgtgccagcacctgggagatgggtcagctcatccgtgccagcctccgatccctctgatggtcagcgacgccgtcagcaacagcagcagcagcagcaacaacaacagcaacagccacagcaacctcaggtcctgtcatcagaaggcggccaattgagacataaccctctggatatccagatgctatcccgaggcctgcatgaacaaatcttcgggcagggcggcgaaatgccaggcgaagcagctgtgcgtcggtctgttgagcacttacagaaacatggtctgtggggacagccagcagttccactccctgatgtcgaactgcggctgccaccactttacggggacaacctggaccagcatttccggcttctggcacagaaacagtctctgccttacttggaagctgcgaatctcctgctccaggcgcagctccccccgaagccgccggcctgggcgtgggctgagggatggaccagatacggccctgagggtgaagctgtgccggtggctattcctgaggagagagccctcgtcttcgacgtagaggtttgtctcgccgaaggtacttgtccaaccctcgccgttgctatctcgccgtctgcttggtattcctggtgttcacaacggctggtcgaagagaggtacagttggacatcccagctcagccccgcagatcttatccctctggaggtgcctaccggagcctcctcgcccacccagcgtgactggcaggaacaattggtggtcggccataatgtgtcctttgatagagcacatatacgggagcagtacctcattcaggggagccgaatgagatttctcgataccatgtccatgcacatggcaatttccgggctgtcctccttccagaggtcactctggattgcagcgaaacagggtaagcacaaagtccagcctccaacaaaacaggggcagaagagccagcggaaagcacgccggggccccgctatctctagttgggactggctagacatcagttcagtcaactcactcgccgaagtccatcgtctgtatgtgggcggccccccactggagaaggagccacgcgaattattcgtcaaagggaccatgaaggatattcgggaaaattttcaggacctgatgcaatactgcgcacaggatgtctgggccacacatgaggtctttcagcaacaattgcctctgttcctagaacgatgcccacaccccgtgacattagccggtatgctggagatgggagtgtcatatctcccagtgaaccagaattgggagaggtatcttgctgaggcacagggtacttacgaagaactgcagagggagatgaaaaagtcactgatggatctggccaacgacgcatgtcagctgctcagtggcgaacgatataaggaggatccctggctgtgggacctagagtgggatctacaggagttcaaacaaaaaaaggcaaaaaaagtgaagaaggaacccgccaccgcgagcaagctccctattgagggggccggtgcacctggagacccaatggatcaggaagatctagggccctgctccgaggaagaagaattccagcaggatgtgatggccagggcgtgtctgcaaaaactgaaaggcactacggaactgctgccgaagagacctcaacatttgcccggacaccctggttggtacagaaagttatgcccaaggctcgatgatccagcctggactcccggcccatcgctcctgagtctgcagatgcgggtcactcccaaactgatggctttgacttgggacggattccctctccattattctgagcgacatggctggggatatctggtgcccggacgccgcgataatctggccaagctccctacaggcacgacacttgagtctgccggcgtcgtgtgtccttaccgcgccatcgagtccttgtataggaagcactgcctggagcaggggaagcagcagctgatgcctcaggaagccggactggcggaagaattcctgctcacagacaattccgctatctggcagacagtcgaggagctggactacctggaggtcgaggcagaagccaagatggaaaacttgagagcagctgtgccaggtcaacccctcgccctgacagcacgcggaggacctaaggacactcagccctcatatcaccatggtaacgggccatacaacgacgtggacattcccgggtgctggttcttcaagctgccccataaggatgggaatagttgtaatgttggatccccatttgccaaggatttcttgcctaaaatggaggacggcactttgcaggcgggccctggaggcgcctctggcccgagagccttagaaattaacaagatgatttctttctggcgtaatgcccacaagcgtatttcatctcagatggtcgtgtggttaccgagatcagcccttcctagagccgtgatccggcaccccgactatgatgaggaaggcctctacggggccattctgccacaagtggtgaccgccggcacaattacaaggagagccgtggaaccaacctggttaacagctagtaacgccaggcccgatcgggttggttccgaacttaaggctatggttcaagctccacctggatatactctggtgggggctgacgtggacagccaagagctctggatagcggcggtactgggtgacgcacatttcgctgggatgcatggctgtacggccttcggatggatgacactgcaggggcgtaaatcacgcggcacggatttgcacagtaaaactgcaaccactgtcgggatcagccgcgagcatgctaagatttttaactatgggcgcatctacggcgccgggcagccattcgccgagcggcttttaatgcagtttaaccaccggctcactcagcaggaggcagccgaaaaggcccagcagatgtatgcagccacaaaagggctgaggtggtaccgcctgtctgatgaaggcgagtggttggtgagagagttgaacctccctgttgatcgcacggaaggaggctggatttccctgcaggacctgagaaaggtccagcgcgaaactgcacgcaagagccagtggaagaagtgggaggtcgtggccgagagagcatggaagggagggacagaatctgaaatgtttaacaagctcgagagtatcgctacctctgacattcctcgcacacccgtgctcgggtgttgcatctctcgggctcttgagccctccgctgtccaggaagagttcatgaccagtagagtgaactgggtggtccaatcaagtgcagtggattatctacatctgatgctcgttgcaatgaagtggctgtttgaggagtttgctatcgatgggcgtttttgcataagtatccacgatgaggtccggtacctggtaagggaagaagacaggtatagagcagctctcgcccttcagatcaccaaccttctgacaagatgcatgttcgcgtataagctgggcctaaatgatctgccccagagcgtagcctttttttctgccgttgatatagaccgttgcctcaggaaagaggtaactatggattgcaaaacaccatccaatcctactgggatggaacggagatacggcattccgcaaggggaggccctggatatttatcagattattgaactcactaaaggatctcttgagaaacgttcacagcccggtccatag

SEQ ID NO: 130924 - DNA, 3720 bp, Artificial Sequence
  derived and/or modified sequence
atgagccggctgctgtggcggaaggtggccggcgccaccgtgggcccaggtcctgttccagccccaggaagatgggtgtcttccagcgtgcctgcaagtgacccatcagacggtcagaggaggagacagcaacaacaacagcagcagcagcagcagcaacagcaacctcagcagccacaagtgctgagctccgagggcgggcagctgagacacaacccactggatattcaaatgttgagcagggggctgcacgaacagatatttggccagggcggcgaaatgcctggcgaagctgccgtcagacggagtgtagagcacctccagaagcatggactatgggggcagccggccgtcccactgccagacgtggaactgcggctgccacccctgtacggcgacaacctggatcagcacttcagactgctggctcagaaacagtccctgccttatctggaagcggccaacttactgctgcaggcccagctgccaccgaagcctcccgcctgggcctgggctgaggggtggacacgctacgggccagagggcgaggcagtaccggtcgctattcccgaggaacgggcgctcgtgttcgacgtggaagtttgtttggccgaggggacctgccctacgctagcggtggctatctctccctccgcctggtattcctggtgctctcagaggctagtggaggagaggtatagctggacaagtcaactttctccagccgatctgattccactcgaagtgcctacaggagcttcctcaccgactcagcgcgattggcaggaacagctcgtggtgggtcacaacgtttcgtttgaccgcgcccatatacgggaacagtatctgattcaaggctctaggatgcgtttcctcgatacaatgagtatgcatatggcaatttccggtctttcctcctttcagcggtcgctgtggatcgcagctaagcaggggaaacataaagtccagccacctacgaagcagggccaaaaatctcaacggaaagccaggcgcggacctgcaatctcaagctgggattggcttgatatctcctctgtgaactcccttgccgaagtccatagactctacgtgggcggtcccccactggaaaaagaaccacgagagttgttcgttaaggggaccatgaaggatatacgcgaaaactttcaggatctgatgcagtattgcgcccaggatgtgtgggctacccacgaggtctttcagcaacagttgcccctgtttctggagcgctgcccacacccagtcaccctggcgggcatgctggagatgggggtgagctacctgcccgtcaaccaaaattgggaaaggtacctcgcggaggctcaaggaacctacgaagaattacaacgggaaatgaagaaaagcctgatggacctggctaacgacgcgtgccagctgttaagcggagaaagatacaaggaggacccctggctgtgggatttggagtgggacctgcaggagtttaaacagaagaaggccaagaaagttaagaaagaacctgccaccgcctctaagctcccaatcgagggcgccggcgccccaggggatcctatggatcaagaggacctcgggccatgttcagaagaagaggaatttcagcaagatgtaatggctcgcgcctgtctacagaaattgaaaggaaccaccgaactcctgccgaagcgaccgcaacatttgccagggcatcctggttggtacagaaaattatgtcctcggctggacgaccccgcctggacacctggcccaagcctgctgtcactgcaaatgagagtcactcccaagctgatggctctcacttgggatgggtttcctctgcactattcagagcggcatgggtgggggtatcttgtcccagggcgtagagataatctggccaagctgccaacgggcactacgctggagtcagcaggagtcgtttgcccataccgggcaatagagagcctgtatcgtaagcattgtttagagcaaggaaagcagcaacttatgccgcaagaagctgggctcgctgaagaattcctcctgacggataattcagccatctggcagactgtcgaggaacttgattatctggaggtggaggctgaggctaaaatggagaatctgagggccgccgttccgggccagcctctcgcactgaccgcgagagggggccctaaggacacccagccgagttatcaccatggaaacggaccctataacgacgtcgacattcccgggtgttggtttttcaaactaccccacaaagacggtaatagttgtaatgtcggcagcccgtttgccaaagactttctgcccaagatggaagatgggacactgcaggctggtcctgggggggcctctggtccacgcgctttggaaatcaataagatgatttccttttggcgaaatgcccataagaggatctcctcccaaatggtagtctggctgcccagatccgcactcccaagagccgtaatacgccaccccgactatgatgaagaaggcctgtatggtgcaatattgccacaggtggttacggcagggactattacacgaagagccgttgaacctacatggctcaccgcaagcaatgcccggcccgatcgcgttgggtctgaactcaaagctatggttcaagctccacctggatacaccttggtcggcgcggacgtggattcccaagagctgtggatcgcagcagttctcggcgacgcacactttgctggaatgcatggttgcaccgcttttggatggatgaccctacagggacggaaaagccgtggcaccgatttgcactctaagacagctactaccgttggaatttccagggagcacgctaaaatctttaactatggacgcatatatggcgctggccagccattcgcggaacgcttacttatgcagttcaatcatcggttgactcaacaggaggccgcagagaaagctcagcagatgtacgctgcaacgaaaggcctgcgctggtatcggctgtccgacgagggggagtggttggttagggagcttaacttacccgtcgatcggaccgagggcggctggatcagtctgcaggatctgcgtaaggttcagagagagactgccagaaaaagccaatggaaaaaatgggaggtcgtggctgagcgggcctggaagggtggcacagaatctgagatgtttaataagcttgagagtattgctacatcagacattccacggactcccgtgctgggctgttgcattagtcgagccctcgaaccaagtgcggtccaagaagaatttatgacctcgagggttaactgggtggtgcagagcagcgctgtggattacctccatctcatgctggtggccatgaagtggctgttcgaggaattcgctatagacggtagattttgtatcagcatccacgatgaagttcggtacttggtccgagaggaagacaggtatcgagctgctctggccctgcaaataaccaatttattgaccaggtgtatgtttgcgtacaagcttgggctgaatgacttacctcagtccgtcgcattcttttccgctgtcgatatcgaccgatgtctgcgcaaggaagttaccatggattgcaagacgcccagcaacccaacggggatggaaagaagatatggcattccccagggagaagccctggacatctatcagatcatcgagctaactaaaggttctcttgagaaaaggtctcagcctggtccttag

SEQ ID NO: 130925 - DNA, 4502 bp, Artificial Sequence
  derived and/or modified sequence
gtagccgcgggacctagctgggtgcagacgggaagttgcggctgccagcgaagcggaccggccgggtggaggccacacgctaccccgaggctgcgtaggccgcgcgaagggggacgccgtgccgtgggcctggggtcgggggagcagcagaccgggaagcaccgtgaggaccgaggatttggggtggaaggcaggcatggtcaaacccatttcactgacaggagagcagagacaggacgtgtctctctccacgtcttccagccagtaaaagaagccaagctggagcccaaagccaggtgttctgactcccagcgtgggggtccctgcaccaaccatgagccgcctgctctggaggaaggtggccggcgccaccgtcgggccagggccggttccagctccggggcgctgggtctccagctccgtccccgcgtccgaccccagcgacgggcagcggcggcggcagcagcagcagcagcagcagcagcagcagcaacagcagcctcagcagccgcaagtgctatcctcggagggcgggcagctgcggcacaacccattggacatccagatgctctcgagagggctgcacgagcaaatcttcgggcaaggaggggagatgcctggcgaggccgcggtgcgccgcagcgtcgagcacctgcagaagcacgggctctgggggcagccagccgtgcccttgcccgacgtggagctgcgcctgccgcccctctacggggacaacctggaccagcacttccgcctcctggcccagaagcagagcctgccctacctggaggcggccaacttgctgttgcaggcccagctgcccccgaagcccccggcttgggcctgggcggagggctggacccggtacggccccgagggggaggccgtacccgtggccatccccgaggagcgggccctggtgttcgacgtggaggtctgcttggcagagggaacttgccccacattggcggtggccatatccccctcggcctggtattcctggtgcagccagcggctggtggaagagcgttactcttggaccagccagctgtcgccggctgacctcatccccctggaggtccctactggtgccagcagccccacccagagagactggcaggagcagttagtggtggggcacaatgtttcctttgaccgagctcatatcagggagcagtacctgatccagggttcccgcatgcgtttcctggacaccatgagcatgcacatggccatctcagggctaagcagcttccagcgcagtctgtggatagcagccaagcagggcaaacacaaggtccagccccccacaaagcaaggccagaagtcccagaggaaagccagaagaggcccagcgatctcatcctgggactggctggacatcagcagtgtcaacagtctggcagaggtgcacagactttatgtaggggggcctcccttagagaaggagcctcgagaactgtttgtgaagggcaccatgaaggacattcgtgagaacttccaggacctgatgcagtactgtgcccaggacgtgtgggccacccatgaggttttccagcagcagctaccgctcttcttggagaggtgtccccacccagtgactctggccggcatgctggagatgggtgtctcctacctgcctgtcaaccagaactgggagcgttacctggcagaggcacagggcacttatgaggagctccagcgggagatgaagaagtcgttgatggatctggccaatgatgcctgccagctgctctcaggagagaggtacaaagaagacccctggctctgggacctggagtgggacctgcaagaatttaagcagaagaaagctaagaaggtgaagaaggaaccagccacagccagcaagttgcccatcgagggggctggggcccctggtgatcccatggatcaggaagacctcggcccctgcagtgaggaggaggagtttcaacaagatgtcatggcccgcgcctgcttgcagaagctgaaggggaccacagagctcctgcccaagcggccccagcaccttcctggacaccctggatggtaccggaagctctgcccccggctagacgaccctgcatggaccccgggccccagcctcctcagcctgcagatgcgggtcacacctaaactcatggcacttacctgggatggcttccctctgcactactcagagcgtcatggctggggctacttggtgcctgggcggcgggacaacctggccaagctgccgacaggtaccaccctggagtcagctggggtggtctgcccctacagagccatcgagtccctgtacaggaagcactgtctcgaacaggggaagcagcagctgatgccccaggaggccggcctggcggaggagttcctgctcactgacaatagtgccatatggcaaacggtagaagaactggattacttagaagtggaggctgaggccaagatggagaacttgcgagctgcagtgccaggtcaacccctagctctgactgcccgtggtggccccaaggacacccagcccagctatcaccatggcaatggaccttacaacgacgtggacatccctggctgctggtttttcaagctgcctcacaaggatggtaatagctgtaatgtgggaagcccctttgccaaggacttcctgcccaagatggaggatggcaccctgcaggctggcccaggaggtgccagtgggccccgtgctctggaaatcaacaaaatgatttctttctggaggaacgcccataaacgtatcagctcccagatggtggtgtggctgcccaggtcagctctgccccgtgctgtgatcaggcaccccgactatgatgaggaaggcctctatggggccatcctgccccaagtggtgactgccggcaccatcactcgccgggctgtggagcccacatggctcaccgccagcaatgcccggcctgaccgagtaggcagtgagttgaaagccatggtgcaggccccacctggctacacccttgtgggtgctgatgtggactcccaagagctgtggattgcagctgtgcttggagacgcccactttgccggcatgcatggctgcacagcctttgggtggatgacactgcagggcaggaagagcaggggcactgatctacacagtaagacagccactactgtgggcatcagccgtgagcatgccaaaatcttcaactacggccgcatctatggtgctgggcagccctttgctgagcgcttactaatgcagtttaaccaccggctcacacagcaggaggcagctgagaaggcccagcagatgtacgctgccaccaagggcctccgctggtatcggctgtcggatgagggcgagtggctggtgagggagttgaacctcccagtggacaggactgagggtggctggatttccctgcaggatctgcgcaaggtccagagagaaactgcaaggaagtcacagtggaagaagtgggaggtggttgctgaacgggcatggaaggggggcacagagtcagaaatgttcaataagcttgagagcattgctacgtctgacataccacgtaccccggtgctgggctgctgcatcagccgagccctggagccctcggctgtccaggaagagtttatgaccagccgtgtgaattgggtggtacagagctctgctgttgactacttacacctcatgcttgtggccatgaagtggctgtttgaagagtttgccatagatgggcgcttctgcatcagcatccatgacgaggttcgctacctggtgcgggaggaggaccgctaccgcgctgccctggccttgcagatcaccaacctcttgaccaggtgcatgtttgcctacaagctgggtctgaatgacttgccccagtcagtcgcctttttcagtgcagtcgatattgaccggtgcctcaggaaggaagtgaccatggattgtaaaaccccttccaacccaactgggatggaaaggagatacgggattccccagggtgaagcgctggatatttaccagataattgaactcaccaaaggctccttggaaaaacgaagccagcctggaccatagcactgcctggaggctctgtatttgctcccgtggagcttcatcggggtggtgcaggctcccaaactcaggctttcagctgtgctttttgcaaaagggcttgcctaaggccagccatttttcagtagcaggacctgccaagaagattccttctaactgaaggtgcagttgaattcagtgggttcagaaccaagatgccaacatcggtgtggactacaggacaaggggcattgttgcttgttgggtaaaaatgaagcagaagccccaaagttcacattaactcaggcatttcatttattttttccttttcttcttggctggttctttgttctgtcccccatgctctgatgcagtgccctagaaggggaaagaattaatgctctaacgtgataaacctgctccaaggcagtggaaataaaaagaaggaaaaaaaagactctatcttctcatc

SEQ ID NO: 130926 - DNA, 4487 bp, Artificial Sequence
  derived and/or modified sequence
cgcttgcctctcgggtagccgcgggacctagctgggtgcagacgggaagttgcggctgccagcgaagcggaccggccgggtggaggccacacgctaccccgaggctgcgtaggccgcgcgaagggggacgccgtgccgtgggcctggggtcgggggagcagcagaccgggaagcaccgatttggggtggaaggcaggcatggtcaaacccatttcactgacaggagagcagagacaggacgtgtctctctccacgtcttccagccagtaaaagaagccaagctggagcccaaagccaggtgttctgactcccagcgtgggggtccctgcaccaaccatgagccgcctgctctggaggaaggtggccggcgccaccgtcgggccagggccggttccagctccggggcgctgggtctccagctccgtccccgcgtccgaccccagcgacgggcagcggcggcggcagcagcagcagcagcagcagcagcagcagcaacagcagcctcagcagccgcaagtgctatcctcggagggcgggcagctgcggcacaacccattggacatccagatgctctcgagagggctgcacgagcaaatcttcgggcaaggaggggagatgcctggcgaggccgcggtgcgccgcagcgtcgagcacctgcagaagcacgggctctgggggcagccagccgtgcccttgcccgacgtggagctgcgcctgccgcccctctacggggacaacctggaccagcacttccgcctcctggcccagaagcagagcctgccctacctggaggcggccaacttgctgttgcaggcccagctgcccccgaagcccccggcttgggcctgggcggagggctggacccggtacggccccgagggggaggccgtacccgtggccatccccgaggagcgggccctggtgttcgacgtggaggtctgcttggcagagggaacttgccccacattggcggtggccatatccccctcggcctggtattcctggtgcagccagcggctggtggaagagcgttactcttggaccagccagctgtcgccggctgacctcatccccctggaggtccctactggtgccagcagccccacccagagagactggcaggagcagttagtggtggggcacaatgtttcctttgaccgagctcatatcagggagcagtacctgatccagggttcccgcatgcgtttcctggacaccatgagcatgcacatggccatctcagggctaagcagcttccagcgcagtctgtggatagcagccaagcagggcaaacacaaggtccagccccccacaaagcaaggccagaagtcccagaggaaagccagaagaggcccagcgatctcatcctgggactggctggacatcagcagtgtcaacagtctggcagaggtgcacagactttatgtaggggggcctcccttagagaaggagcctcgagaactgtttgtgaagggcaccatgaaggacattcgtgagaacttccaggacctgatgcagtactgtgcccaggacgtgtgggccacccatgaggttttccagcagcagctaccgctcttcttggagaggtgtccccacccagtgactctggccggcatgctggagatgggtgtctcctacctgcctgtcaaccagaactgggagcgttacctggcagaggcacagggcacttatgaggagctccagcgggagatgaagaagtcgttgatggatctggccaatgatgcctgccagctgctctcaggagagaggtacaaagaagacccctggctctgggacctggagtgggacctgcaagaatttaagcagaagaaagctaagaaggtgaagaaggaaccagccacagccagcaagttgcccatcgagggggctggggcccctggtgatcccatggatcaggaagacctcggcccctgcagtgaggaggaggagtttcaacaagatgtcatggcccgcgcctgcttgcagaagctgaaggggaccacagagctcctgcccaagcggccccagcaccttcctggacaccctggatggtaccggaagctctgcccccggctagacgaccctgcatggaccccgggccccagcctcctcagcctgcagatgcgggtcacacctaaactcatggcacttacctgggatggcttccctctgcactactcagagcgtcatggctggggctacttggtgcctgggcggcgggacaacctggccaagctgccgacaggtaccaccctggagtcagctggggtggtctgcccctacagagccatcgagtccctgtacaggaagcactgtctcgaacaggggaagcagcagctgatgccccaggaggccggcctggcggaggagttcctgctcactgacaatagtgccatatggcaaacggtagaagaactggattacttagaagtggaggctgaggccaagatggagaacttgcgagctgcagtgccaggtcaacccctagctctgactgcccgtggtggccccaaggacacccagcccagctatcaccatggcaatggaccttacaacgacgtggacatccctggctgctggtttttcaagctgcctcacaaggatggtaatagctgtaatgtgggaagcccctttgccaaggacttcctgcccaagatggaggatggcaccctgcaggctggcccaggaggtgccagtgggccccgtgctctggaaatcaacaaaatgatttctttctggaggaacgcccataaacgtatcagctcccagatggtggtgtggctgcccaggtcagctctgccccgtgctgtgatcaggcaccccgactatgatgaggaaggcctctatggggccatcctgccccaagtggtgactgccggcaccatcactcgccgggctgtggagcccacatggctcaccgccagcaatgcccggcctgaccgagtaggcagtgagttgaaagccatggtgcaggccccacctggctacacccttgtgggtgctgatgtggactcccaagagctgtggattgcagctgtgcttggagacgcccactttgccggcatgcatggctgcacagcctttgggtggatgacactgcagggcaggaagagcaggggcactgatctacacagtaagacagccactactgtgggcatcagccgtgagcatgccaaaatcttcaactacggccgcatctatggtgctgggcagccctttgctgagcgcttactaatgcagtttaaccaccggctcacacagcaggaggcagctgagaaggcccagcagatgtacgctgccaccaagggcctccgctggtatcggctgtcggatgagggcgagtggctggtgagggagttgaacctcccagtggacaggactgagggtggctggatttccctgcaggatctgcgcaaggtccagagagaaactgcaaggaagtcacagtggaagaagtgggaggtggttgctgaacgggcatggaaggggggcacagagtcagaaatgttcaataagcttgagagcattgctacgtctgacataccacgtaccccggtgctgggctgctgcatcagccgagccctggagccctcggctgtccaggaagagtttatgaccagccgtgtgaattgggtggtacagagctctgctgttgactacttacacctcatgcttgtggccatgaagtggctgtttgaagagtttgccatagatgggcgcttctgcatcagcatccatgacgaggttcgctacctggtgcgggaggaggaccgctaccgcgctgccctggccttgcagatcaccaacctcttgaccaggtgcatgtttgcctacaagctgggtctgaatgacttgccccagtcagtcgcctttttcagtgcagtcgatattgaccggtgcctcaggaaggaagtgaccatggattgtaaaaccccttccaacccaactgggatggaaaggagatacgggattccccagggtgaagcgctggatatttaccagataattgaactcaccaaaggctccttggaaaaacgaagccagcctggaccatagcactgcctggaggctctgtatttgctcccgtggagcttcatcggggtggtgcaggctcccaaactcaggctttcagctgtgctttttgcaaaagggcttgcctaaggccagccatttttcagtagcaggacctgccaagaagattccttctaactgaaggtgcagttgaattcagtgggttcagaaccaagatgccaacatcggtgtggactacaggacaaggggcattgttgcttgttgggtaaaaatgaagcagaagccccaaagttcacattaactcaggcatttcatttattttttccttttcttcttggctggttctttgttctgtcccccatgctctgatgcagtgccctagaaggggaaagaattaatgctctaacgtgataaacctgctccaaggcagtggaaataaaaagaaggaaaaaaaa

SEQ ID NO: 130927 - DNA, 3720 bp, Artificial Sequence
  derived and/or modified sequence
atgtccagattgctgtggcgaaaggtggccggagcaactgtgggcccagggcctgtgccagccccaggccgatgggtgtccagcagtgtgccagccagtgacccttctgacggacaacggaggaggcagcagcaacagcagcagcagcagcaacagcaacagcagccccagcagccacaagtgttgtcgtcagagggtggacagctgaggcacaatccacttgatatccagatgctgtccagagggctgcatgagcagatcttcggtcagggcggagaaatgcctggagaggctgcagtgagacggagtgtcgaacatctgcagaagcacggactttggggacagccagctgttccactcccagacgtcgaacttcggctgcctccgttgtacggcgacaacctcgatcaacatttcagactgctggcccagaagcagtcattgccctacctcgaggccgctaatctcttgctgcaggcccagctgcctcctaaaccacccgcatgggcgtgggccgagggctggactaggtatggccctgagggtgaagcagtccccgtggccatcccagaggaacgggcattagtgtttgatgtggaggtctgtctcgctgaaggcacttgcccgactctcgctgtcgcaattagtccctcagcttggtattcttggtgctcacaaaggcttgtggaggaacgttattcctggacgagtcagttaagcccggcagatcttattcctctcgaggtgcctactggagcaagctctcccacgcagcgggactggcaggaacagttggtagtgggacacaatgtgagctttgatcgcgcacatatccgcgaacaatacctgatacaagggagcagaatgaggtttctggacaccatgagcatgcatatggccatatccgggctgtcctctttccagcggtcgctgtggatagctgccaagcaggggaaacacaaagtacagccccctaccaagcaaggtcagaagtcgcagagaaaagcccgtcgcggacccgctatcagctcttgggactggctggatatctcctcagtgaatagtctagctgaggtgcatcggctgtacgtgggaggaccccctcttgagaaagaaccaagggaactctttgtgaagggtactatgaaggacattcgcgagaatttccaggacctgatgcagtattgtgcgcaggatgtttgggctacgcatgaggtgttccagcagcagctccccctgttcttggagaggtgcccccatcccgtgacactggctggtatgcttgagatgggggtgtcatacctgccggttaatcagaattgggagcgatatttggcggaagcacagggcacatacgaggaacttcagcgcgagatgaagaaatccctgatggatttggctaatgacgcatgtcaactcctctccggagaaaggtacaaggaagatccctggctgtgggacttggaatgggatctgcaggaattcaagcagaaaaaagctaagaaagttaagaaagaacccgctactgccagtaagctgccaattgagggcgctggcgcacccggagaccctatggaccaggaagaccttggaccgtgctccgaggaggaagaatttcagcaggatgtaatggcccgagcatgtctccaaaaactcaagggcacgaccgaactgctgccgaagagacctcagcatcttccgggacaccccggatggtatcggaaattatgccccaggctggacgaccccgcatggacccctggaccatccctgttatcgctgcagatgcgggttacacctaaattgatggcactgacgtgggacggattcccactccattactcggagaggcacggctgggggtatctggtgccagggaggcgggacaatctcgccaagctgcccactgggacgactcttgaatcagctggggttgtctgtccataccgcgctatcgagtccctttatcgaaagcactgtcttgagcaaggtaagcaacaactcatgccccaagaggcagggctcgctgaggaatttttgttgactgacaattctgccatctggcagaccgtcgaggaactcgattatcttgaggtcgaagcagaggccaagatggaaaatcttagagctgctgtgcccggtcagcctctggcactgaccgccagagggggtcctaaagatacccagccaagctatcaccacggaaatggcccttataacgacgtggacattccagggtgctggttctttaagctgccccacaaggacggcaactcctgcaatgtaggttcccctttcgccaaggactttcttcctaagatggaggacggcacattgcaagctggaccaggtggcgcaagcgggcctcgcgctcttgagatcaacaagatgatatctttttggagaaacgcgcacaagcgcattagcagccaaatggtagtgtggctgccaagatcagccctgcctcgggctgtgatacgccatccggattatgatgaggagggcctgtacggggctatcttgccccaggtggtcactgccggaacgatcacccgacgggctgtggagcccacatggttgactgcttcaaatgccagaccagatcgagtggggagtgagctgaaggctatggtgcaggccccaccaggctataccctggtgggggcagacgtggattcccaggagttatggattgccgctgtcctgggagacgctcacttcgccggaatgcacggttgcactgccttcgggtggatgactctgcagggcaggaaatctcggggaactgacttacattccaagacagcaaccacggtcggaatctctagagaacatgccaagatttttaactatgggcgaatttatggcgctggccagcctttcgcagagagactactcatgcaattcaatcacagacttactcagcaagaggcggctgagaaggctcagcagatgtacgctgccacaaagggtctcagatggtacaggctgagcgatgaaggcgagtggcttgtcagggagctgaacctgcccgtggataggaccgaaggcggatggattagcctgcaggacctgcggaaggtccaaagagagacagccagaaagtctcagtggaagaaatgggaggtcgttgctgagcgcgcttggaaggggggaaccgaaagtgagatgttcaataagctcgaatccatagccacttctgatatcccacgcaccccagtcctgggctgctgtatcagtagagcactggagccaagcgccgttcaagaggagttcatgacctctcgagtgaactgggtggtacagtcctcggcggtggactatctgcacttgatgttggtcgccatgaaatggctttttgaggagttcgccatcgatggcagattctgcataagcatccatgatgaggtgagatatctggtccgggaagaggatcgttacagagctgcgctggccctccagatcaccaacctgcttacccgctgtatgtttgcctacaaactgggcctcaacgatttgccccagagtgtcgccttcttctccgctgttgacattgaccgatgcctaaggaaggaagtcactatggattgtaagacacctagcaaccccactggcatggagcgaagatatgggattccccagggggaagccttggatatctatcagataatcgaactcacgaagggcagtctggagaaacggtcacaaccaggtccctag

SEQ ID NO: 130928 - DNA, 3720 bp, Artificial Sequence
  derived and/or modified sequence
atgtcacgcctgctttggcgaaaagtcgccggagctactgtcggacctgggcctgtccctgcaccagggaggtgggtcagtagtagcgtccccgcttcggaccctagcgacggacaaagaaggcggcagcagcagcagcagcagcagcaacagcaacaacaacagccacagcagccacaagttctctcatcagaaggcggtcaactcaggcataatcccctcgacattcagatgctcagtcgtggcctgcacgaacaaatatttgggcagggaggagagatgccaggggaggccgctgtacggcgttccgtggagcatttgcagaaacatggactatggggtcaacctgccgttcccttgcccgatgtggagctgcgactaccacctctgtacggggacaatcttgaccagcatttcaggctgctcgcccagaaacagtccctgccgtacctagaggccgctaacttattactccaagcgcaactgcctcccaagcctccagcatgggcttgggctgagggttggacccgatatggaccagaaggcgaggcagtgcctgtcgcaataccggaggaacgagccttagtatttgacgtcgaggtttgcctggccgaaggcacatgccctactctggccgtggccattagtccttccgcttggtactcttggtgttcccagcggctggtcgaggagcggtactcttggacatcacaactctctccagctgaccttatccccctggaggtccccactggcgcaagcagtccaactcagagggactggcaggaacagctagttgtcggtcataatgtgtcatttgacagagcccacattcgcgagcagtacctcatccaaggatcgcggatgaggttcttggacacgatgtccatgcatatggcgatcagcggcctgagcagctttcagcggagcctgtggatcgctgcgaagcagggtaaacacaaggtgcagcccccaaccaagcaaggccagaagtcccagcgcaaggcgcgacgaggccctgccatcagtagctgggactggctcgacatttcttccgtaaatagcctggctgaagtgcacaggttgtacgtcggaggacctcccctggagaaagaaccgagagagctatttgtcaaaggcaccatgaaggatatcagggaaaacttccaagatctgatgcagtattgtgcccaggatgtgtgggcaactcatgaggtgttccagcagcagcttcctttgtttctggagcggtgcccccatcccgtgaccttagccggaatgctggaaatgggcgtatcttacctgcctgtgaaccagaattgggaacgctatctcgctgaggcccaaggcacatacgaggagctgcaacgggaaatgaagaagagtcttatggatctcgctaacgatgcgtgtcagctgcttagcggggaacgttacaaagaagacccgtggctctgggatctggagtgggatcttcaggagtttaagcagaagaaagctaaaaaggtgaaaaaggaacctgccactgcatctaagctgcctattgagggagctggcgctcccggtgatcccatggatcaggaagatcttggcccatgcagcgaggaggaggagttccagcaagatgttatggctagggcatgcttacagaaactgaaaggaaccactgagttattgcctaaacgtccccagcacttacccggtcaccccggatggtacaggaagctgtgtcctaggttggacgacccagcatggactccagggccttcacttctgtccttacagatgagggtgacaccgaagctgatggccctcacttgggacggattccctctgcattactctgagagacacggatgggggtaccttgtgccgggacggcgtgacaatctggcaaaactaccaacaggtaccaccctggaatcagctggtgtcgtatgtccttacagggcaatcgagagcctgtacagaaaacattgcctggaacagggaaagcagcagttaatgccacaagaagccggtctggccgaagagttccttttgaccgacaattccgccatatggcagacagtcgaggaacttgattaccttgaagtcgaagccgaagccaaaatggagaacctgcgagcagccgtgcctggccagcccctggcactgactgcaagaggaggaccaaaagacactcagccatcctatcatcacgggaatggcccttacaatgacgttgacattccagggtgttggttctttaagctgccgcataaagacgggaattcgtgtaatgtgggctcgcccttcgctaaagatttcttacccaagatggaagacggtaccctgcaggccggaccagggggagcatccggcccaagggctctggaaataaacaagatgattagtttttggcgcaatgcccacaagaggatttcctcacaaatggttgtctggctgccccgaagcgctctaccaagagctgtgataaggcatccggactatgacgaagaaggcctgtacggagccattttgccgcaggttgtcactgccggaaccataacccggagagccgtggaacctacctggctgaccgcctccaacgccaggcctgatcgggttggatcggaattaaaagccatggtgcaagcaccccctggttatacattggtcggcgcagatgtcgattctcaggaattgtggatcgctgctgtgctgggcgatgcccacttcgctggcatgcacggatgtaccgcatttggatggatgacactacagggacgcaaatctcggggaaccgatctgcactcaaagactgcgacaacagtgggtattagcagggagcacgcaaaaatctttaattatggtcgcatctatggcgcaggacagccattcgcagagcgcctgctaatgcagtttaatcatcggttaactcagcaagaagccgcagaaaaggcacagcagatgtacgctgccacaaagggcctccgttggtacaggcttagcgatgaaggggaatggctagtgcgagaactgaatttgccagtcgatagaacagaggggggatggatttcactccaggacctgcggaaggtgcaaagggaaaccgcaagaaagagtcagtggaaaaagtgggaggtcgttgccgagcgcgcttggaagggtgggacggagtcagagatgttcaataaactcgaatctatcgccacatcggacatcccacgaacacccgtgcttgggtgttgtattagcagagccctggagccatccgctgtgcaggaggagttcatgactagtcgcgttaactgggtggtgcaatcatctgcggtggactatctgcatctgatgctggtggccatgaagtggctcttcgaggagttcgctatcgatgggaggttttgcatctccatccacgacgaagtgagatacctggttagagaggaggaccgctatcgggctgctctagcgctgcagatcactaaccttttgacaagatgtatgttcgcgtacaagctgggcctcaatgatctaccacaatctgtggcgtttttcagcgcagttgacatcgatcggtgccttcgcaaagaggtgacaatggactgtaagacaccaagcaatcctacagggatggagaggcgatatggaatcccccagggagaagcactggatatctatcagataattgagcttacaaaaggcagccttgagaagaggagccagcccggaccctag

SEQ ID NO: 130929 - DNA, 3720 bp, Artificial Sequence
  derived and/or modified sequence
atgagcagactgctgtggagaaaggtggccggcgccaccgtgggccccggccccgtgcccgcccccggcagatgggtgagcagcagcgtgcccgccagcgaccccagcgacggccagagaagaagacagcagcagcagcagcagcagcagcagcagcagcagcagccccagcagccccaggtgctgagcagcgagggcggccagctgagacacaaccccctggacatccagatgctgagcagaggcctgcacgagcagatcttcggccagggcggcgagatgcccggcgaggccgccgtgagaagaagcgtggagcacctgcagaagcacggcctgtggggccagcccgccgtgcccctgcccgacgtggagctgagactgccccccctgtacggcgacaacctggaccagcacttcagactgctggcccagaagcagagcctgccctacctggaggccgccaacctgctgctgcaggcccagctgccccccaagccccccgcctgggcctgggccgagggctggaccagatacggccccgagggcgaggccgtgcccgtggccatccccgaggagagagccctggtgttcgacgtggaggtgtgcctggccgagggcacctgccccaccctggccgtggccatcagccccagcgcctggtacagctggtgcagccagagactggtggaggagagatacagctggaccagccagctgagccccgccgacctgatccccctggaggtgcccaccggcgccagcagccccacccagagagactggcaggagcagctggtggtgggccacaacgtgagcttcgacagagcccacatcagagagcagtacctgatccagggcagcagaatgagattcctggacaccatgagcatgcacatggccatcagcggcctgagcagcttccagagaagcctgtggatcgccgccaagcagggcaagcacaaggtgcagccccccaccaagcagggccagaagagccagagaaaggccagaagaggccccgccatcagcagctgggactggctggacatcagcagcgtgaacagcctggccgaggtgcacagactgtacgtgggcggcccccccctggagaaggagcccagagagctgttcgtgaagggcaccatgaaggacatcagagagaacttccaggacctgatgcagtactgcgcccaggacgtgtgggccacccacgaggtgttccagcagcagctgcccctgttcctggagagatgcccccaccccgtgaccctggccggcatgctggagatgggcgtgagctacctgcccgtgaaccagaactgggagagatacctggccgaggcccagggcacctacgaggagctgcagagagagatgaagaagagcctgatggacctggccaacgacgcctgccagctgctgagcggcgagagatacaaggaggacccctggctgtgggacctggagtgggacctgcaggagttcaagcagaagaaggccaagaaggtgaagaaggagcccgccaccgccagcaagctgcccatcgagggcgccggcgcccccggcgaccccatggaccaggaggacctgggcccctgcagcgaggaggaggagttccagcaggacgtgatggccagagcctgcctgcagaagctgaagggcaccaccgagctgctgcccaagagaccccagcacctgcccggccaccccggctggtacagaaagctgtgccccagactggacgaccccgcctggacccccggccccagcctgctgagcctgcagatgagagtgacccccaagctgatggccctgacctgggacggcttccccctgcactacagcgagagacacggctggggctacctggtgcccggcagaagagacaacctggccaagctgcccaccggcaccaccctggagagcgccggcgtggtgtgcccctacagagccatcgagagcctgtacagaaagcactgcctggagcagggcaagcagcagctgatgccccaggaggccggcctggccgaggagttcctgctgaccgacaacagcgccatctggcagaccgtggaggagctggactacctggaggtggaggccgaggccaagatggagaacctgagagccgccgtgcccggccagcccctggccctgaccgccagaggcggccccaaggacacccagcccagctaccaccacggcaacggcccctacaacgacgtggacatccccggctgctggttcttcaagctgccccacaaggacggcaacagctgcaacgtgggcagccccttcgccaaggacttcctgcccaagatggaggacggcaccctgcaggccggccccggcggcgccagcggccccagagccctggagatcaacaagatgatcagcttctggagaaacgcccacaagagaatcagcagccagatggtggtgtggctgcccagaagcgccctgcccagagccgtgatcagacaccccgactacgacgaggagggcctgtacggcgccatcctgccccaggtggtgaccgccggcaccatcaccagaagagccgtggagcccacctggctgaccgccagcaacgccagacccgacagagtgggcagcgagctgaaggccatggtgcaggccccccccggctacaccctggtgggcgccgacgtggacagccaggagctgtggatcgccgccgtgctgggcgacgcccacttcgccggcatgcacggctgcaccgccttcggctggatgaccctgcagggcagaaagagcagaggcaccgacctgcacagcaagaccgccaccaccgtgggcatcagcagagagcacgccaagatcttcaactacggcagaatctacggcgccggccagcccttcgccgagagactgctgatgcagttcaaccacagactgacccagcaggaggccgccgagaaggcccagcagatgtacgccgccaccaagggcctgagatggtacagactgagcgacgagggcgagtggctggtgagagagctgaacctgcccgtggacagaaccgagggcggctggatcagcctgcaggacctgagaaaggtgcagagagagaccgccagaaagagccagtggaagaagtgggaggtggtggccgagagagcctggaagggcggcaccgagagcgagatgttcaacaagctggagagcatcgccaccagcgacatccccagaacccccgtgctgggctgctgcatcagcagagccctggagcccagcgccgtgcaggaggagttcatgaccagcagagtgaactgggtggtgcagagcagcgccgtggactacctgcacctgatgctggtggccatgaagtggctgttcgaggagttcgccatcgacggcagattctgcatcagcatccacgacgaggtgagatacctggtgagagaggaggacagatacagagccgccctggccctgcagatcaccaacctgctgaccagatgcatgttcgcctacaagctgggcctgaacgacctgccccagagcgtggccttcttcagcgccgtggacatcgacagatgcctgagaaaggaggtgaccatggactgcaagacccccagcaaccccaccggcatggagagaagatacggcatcccccagggcgaggccctggacatctaccagatcatcgagctgaccaagggcagcctggagaagagaagccagcccggcccctag

SEQ ID NO: 130930 - protein, 210 aa, Artificial Sequence
  derived and/or modified sequence
MDDEEETYRLWKIRKTIMQLCHDRGYLVTQDELDQTLEEFKAQSGDKPSEGRPRRTDLTVLVAHNDDPTDQMFVFFPEEPKVGIKTIKVYCQRMQEENITRALIVVQQGMTPSAKQSLVDMAPKYILEQFLQQELLINITEHELVPEHVVMTKEEVTELLARYKLRENQLPRIQAGDPVARYFGIKRGQVVKIIRPSETAGRYITYRLVQ

SEQ ID NO: 130931 - DNA, 633 bp, Artificial Sequence
  derived and/or modified sequence
atggacgacgaggaggagacctacaggctctggaaaatccgcaagactatcatgcagctatgccacgatcgtggctatctggtgactcaggacgagctcgatcaaacactagaagaatttaaagcccagagtggcgacaagccaagtgagggcagaccccgcagaactgatcttactgtcttggtcgctcacaacgatgacccaaccgatcaaatgtttgtatttttcccagaggaacctaaagttgggattaagactattaaggtctactgtcagcgcatgcaggaagagaatataactagggcacttatcgtggtgcaacaggggatgaccccatctgctaagcaatccctagttgacatggccccaaagtatatcttagaacaatttcttcagcaggagctactaatcaatattaccgaacacgaacttgttcctgaacatgtcgttatgacaaaagaagaggttactgaactgctggcacggtacaagctccgcgaaaatcagttgccgaggattcaggctggggacccagttgctcgttacttcggcattaagagaggccaggtggtgaagatcattcgaccaagcgagacagccggtcggtatatcacctatagactggtgcagtag

SEQ ID NO: 130932 - DNA, 633 bp, Artificial Sequence
  derived and/or modified sequence
atggatgatgaggaggagacctaccgcctgtggaagatcaggaagaccatcatgcagctgtgccacgaccggggctacctggtgacccaggatgagctggaccagaccctggaggagttcaaggcccagagcggggacaagcccagcgagggccggcccaggagaacagacctgactgtgctggtggcccacaatgatgaccccacagaccagatgtttgtgttcttccctgaggagcccaaggtgggcatcaagaccatcaaggtgtactgccagaggatgcaggaggagaacatcacccgggccctgattgtggtgcagcagggcatgaccccatctgccaagcagagcctggtggacatggcccccaagtacatcctggagcagttcctgcagcaggagctgctgatcaacatcacagagcacgagctggtgcctgagcacgtggtgatgaccaaggaggaggtgacagagctgctggcccgctacaagctgcgggagaaccagctgccccgcatccaggccggggaccctgtggcccgctacttcggcatcaagaggggccaggtggtgaagatcatccggcccagcgagacagctggccgctacatcacctaccgcctggtgcagtag

SEQ ID NO: 130933 - DNA, 633 bp, Artificial Sequence
  derived and/or modified sequence
atggacgacgaggaggagacctaccggctgtggaagatccggaagactattatgcaactctgtcatgaccgcggctacctggtgacgcaagatgagctggaccagaccctggaggaatttaaagctcagtcgggagacaaacctagcgaggggcgcccaagaaggaccgacctgacggtgctggtcgcacacaacgatgatcccaccgatcagatgtttgtgtttttccccgaggagcctaaggtgggcatcaagactattaaagtgtactgtcaacgcatgcaggaggagaacattacgcgagctcttatcgtagtgcagcagggaatgaccccatccgcgaagcagtccctcgtcgacatggcaccaaagtatattctcgagcagtttctgcagcaagagttgcttatcaacatcaccgaacacgaacttgttccagaacacgtcgtgatgacgaaagaggaggtgacagagttgctggcaaggtataagctgcgtgagaatcagttgccgagaattcaggccggggatcccgtggcccgatacttcggcataaagcgcggacaagtcgtgaaaattattcgcccttctgaaaccgcgggacgctatataacgtataggctcgtgcagtag

SEQ ID NO: 130934 - DNA, 2866 bp, Artificial Sequence
  derived and/or modified sequence
ggattcggcgcaggcgcagtccgcgcgggttctcgcgcggagaaggggtgcgagcggcggcggcggcggaggctgccatggacgacgaggaggagacgtaccggctctggaaaatccgcaagaccatcatgcagctgtgccacgaccgtggctatctggtgacccaggacgagcttgaccagaccctggaggagttcaaagcccaatctggggacaagccgagtgaggggcggccgcggcgcacggacctcaccgtgctggtggcccacaacgatgaccccaccgaccagatgtttgtgttctttccagaggagcccaaggtgggcatcaagaccatcaaggtgtactgccagcgcatgcaggaggagaacatcacacgggctctcatcgtggtgcagcagggcatgacaccctccgccaagcagtccctggtcgacatggcccccaagtacatcctggagcagtttctgcagcaggagctgctcatcaacatcacggagcacgagctagtccctgagcacgtcgtcatgaccaaggaggaggtgacagagctgctggcccgatataagctccgagagaaccagctgcccaggatccaggcgggggaccctgtggcgcgctactttgggataaagcgtgggcaggtggtgaagatcatccggcccagtgagacggctggcaggtacatcacctaccggctggtgcagtagctaccgcctgacagcccctagaggcggacacacagcgacccccatccctgcaggacaaacgcccctgccctgccagaatccggcccccacagctctcacggctgctgctcctctggactccccaaggcaggtggcctccacccacgttctcccgtcctggggtgaggcttcctgtggcccagcccgccccattcacctgtggatttgtgcgagatgcagcctcagaaggaacaaggcccccagagggaggtcacctgggggcagctggtgccgggtcttcacccagaccacgctgggtcccctctgttgggggtttggggtccgggtctcccaccagccactgcttcctcctgggccctcggccttccacccctcgtcttccctccctcgggggccctgatgcgtggcggcccccgcccggcctcggctctttactccattcacagccatgcacgcgctcaagccaccagggtgcgagatgccagctctggagttctcggttgttgtaggaggttgggtgttttcaaatggtaaagatgttttgagcaaataaatttgcttgatacagaaaccaggccgactaacaaggtttccagcaggtggccttgcctcaccccaagcacacgaggtcagcctggcaggtgtgccctcctcgcgctggcttcaggggtcagtgtctccccaggccctcgccctgccctcccacttcgtgctcctgggtaaggcgtgagcgtgtctgtctcttcccttcccgtgagggtgtggagttgttctctggcttgtgcagctgtggtttgcggccagttcctcttacagacgtttgggatctggctctacttccccgtttgcttactgtctgatttcagaaggcctcgcctgcccaagtttaacctagccacgtggttctctcacagtagctttattaagatgtaattcaccctcgggcggtcggtggtctgtaacgcgcccactgttctgtgcagcagggtccccagatccccaggccgcggactgtgtgtgtgatggggacagtgcttccccttctctccaaatgtacttttttcaaaattgtcttggccaaagcaagccagacccaaagggacaaacactgatgtcactcctaggaggtcactagagtcgtcagagactggaagtaggatgggggttcccgggactggggagttgggtggggatgggggttcccagggctggggaggagggaggggacagagtgtgtcatgtgcacagttttagtttgggaagatgagaaaattctggaggtggccgggcgcggtggctcacgcctgtaatcccagcactttgggaggccgaggtgggcggatcacctgaggtcgggagttcgagaccagcctgaccaacatggcaaaatcccatcactgcaaaaaatacaaaaattacctgggcgtggtggtgcatgcctgtaatcccagctacttgggagctaaggcaggagaatcacttgaacccaggaagtggaggatcgcttgagctcaggagttaaaagaccagcccgggcaacacagagaaaccccccacctctacaaaaaactttaagattacctgggcacagtggctcacacctgtaatcccaacactttgggaggctgaggcgggaggatcatttgagcccaggaggccgaggctgcagtgagctacgattgtgctcctgtactccagcctgggccacagggtcacaccctgtctcaaaaaaaaaaaaaaatgcagttccacaggcgcatgggccacgtttccagtgcttggtggccatgtggggctgacgtgcgaaaccttagagccgggggatacgtccgtcatcgagaacgttttcctggactgccctgggctgcaggtggacgtgacgaggtcattcgatgcctgaccgtctgcacagcctgtggtgaagaccacccgggctcccacctcgcggggccccgtggcggggggttcccttcctcacacatccctcccctagggggaggcccagggccacgccacggggctctctctgtcccctccctggccccttcttctaagcttgcagctgccacagaaaatcttctaagcttgcagctgccacagaaaacacccgattaaaaactttttatttcagcaaaataaacgtgcctgtgaaagaa

SEQ ID NO: 130935 - DNA, 633 bp, Artificial Sequence
  derived and/or modified sequence
atggacgacgaagaggagacctacagactgtggaagatcaggaagaccataatgcagttatgccacgatcggggttatctggtgacgcaggacgaactcgatcaaacattggaggaattcaaagcgcagtcgggtgataagccgagcgaaggaagacctaggcggaccgaccttacggtgcttgtggcccataatgacgacccgactgatcagatgttcgtattttttcccgaagagccgaaggtggggattaagacaattaaggtttactgccagaggatgcaagaggagaatatcacgcgagctttaatagtggtccaacaaggtatgacaccgtcagcaaagcagtcactggtggacatggcacctaaatacattcttgaacaatttctccagcaggagctgctcatcaatatcaccgaacacgaactcgtcccagagcacgtagtgatgacaaaggaggaggtgactgaactgctggccaggtacaagcttcgcgagaaccaactccccaggatacaggcaggtgaccccgtagccaggtatttcgggattaaacgtggccaggttgtgaagataatccgaccctccgagaccgccggaaggtatattacctaccggctcgtccagtag

SEQ ID NO: 130936 - DNA, 633 bp, Artificial Sequence
  derived and/or modified sequence
atggacgacgaggaggagacctacagactgtggaagatcagaaagaccatcatgcagctgtgccacgacagaggctacctggtgacccaggacgagctggaccagaccctggaggagttcaaggcccagagcggcgacaagcccagcgagggcagacccagaagaaccgacctgaccgtgctggtggcccacaacgacgaccccaccgaccagatgttcgtgttcttccccgaggagcccaaggtgggcatcaagaccatcaaggtgtactgccagagaatgcaggaggagaacatcaccagagccctgatcgtggtgcagcagggcatgacccccagcgccaagcagagcctggtggacatggcccccaagtacatcctggagcagttcctgcagcaggagctgctgatcaacatcaccgagcacgagctggtgcccgagcacgtggtgatgaccaaggaggaggtgaccgagctgctggccagatacaagctgagagagaaccagctgcccagaatccaggccggcgaccccgtggccagatacttcggcatcaagagaggccaggtggtgaagatcatcagacccagcgagaccgccggcagatacatcacctacagactggtgcagtag

SEQ ID NO: 130937 - protein, 172 aa, Artificial Sequence
  derived and/or modified sequence
MFYHISLEHEILLHPRYFGPNLLNTVKQKLFTEVEGTCTGKYGFVIAVTTIDNIGAGVIQPGRGFVLYPVKYKAIVFRPFKGEVVDAVVTQVNKVGLFTEIGPMSCFISRHSIPSEMEFDPNSNPPCYKTMDEDIVIQQDDEIRLKIVGTRVDKNDIFAIGSLMDDYLGLVS

SEQ ID NO: 130938 - DNA, 519 bp, Artificial Sequence
  derived and/or modified sequence
atgttctaccacatttctctggaacatgaaatcctcttgcatccccgatactttggcccaaacttgctcaacaccgtcaaacagaagctcttcacagaggtggaaggaacatgcacgggcaagtacggtttcgttattgctgtcaccactattgataacatcggggccggcgtgattcagcctggacggggtttcgtgctgtatccagtgaagtataaagccatcgtttttcgcccttttaagggggaagtcgtcgacgcggtagtaacacaggtcaataaagtcggcctctttaccgaaatcgggccaatgagttgttttattagccgccactccattccctcggaaatggaattcgaccccaactctaatccaccttgctacaagacaatggatgaagacattgtcatacaacaagatgatgagattcgcttaaagattgttggcaccagggtggacaagaatgatattttcgcaattgggtccctgatggatgactatttaggccttgtgagctag

SEQ ID NO: 130939 - DNA, 519 bp, Artificial Sequence
  derived and/or modified sequence
atgttctaccacatcagcctggagcacgagatcctgctgcacccccgctacttcggccccaacctgctgaacacagtgaagcagaagctgttcacagaggtggagggcacctgcaccgggaagtatggctttgtgattgctgtgaccaccatcgacaacatcggggccggggtcatccagcccggccggggctttgtgctgtaccctgtgaagtacaaggccatcgtgttccggcccttcaagggggaggtggtggatgctgtggtgacccaggtgaacaaggtgggcctcttcacagaaattggccccatgagctgcttcatcagccgccacagcatccccagcgagatggagtttgaccccaacagcaaccccccctgctacaagaccatggatgaagatattgtcatccagcaggatgatgagatccggctgaagatcgtgggcaccagggtggacaagaatgacatctttgccatcggcagcctgatggatgactacctgggcctggtgtcctag

SEQ ID NO: 130940 - DNA, 519 bp, Artificial Sequence
  derived and/or modified sequence
atgttctaccacatcagcctggagcacgagatcctgctgcacccccggtacttcggacctaatctgttaaatacggttaagcaaaaactcttcaccgaagtcgaaggaacttgcactggaaaatacggtttcgtcattgccgtcacaaccattgacaatataggcgccggggtgatccagccaggacggggcttcgtgctgtatcccgttaagtacaaggccatcgtttttcggccctttaaaggtgaagtggttgatgctgtggtgactcaggttaataaagtggggctcttcaccgaaattggtcctatgagctgcttcatctcgcggcactctataccaagcgagatggagttcgacccaaattctaacccgccctgttacaagaccatggatgaggacattgtgatccaacaggacgatgaaattcggttgaaaatcgttggaacacgtgtggataagaacgatatcttcgccatcggctcgcttatggacgactacctaggtcttgtgtcctag

SEQ ID NO: 130941 - DNA, 827 bp, Artificial Sequence
  derived and/or modified sequence
agtcgcagcaagcgcggaactggggttgcggcgtctaagtgtttccggtggattcccagggactgtcggaggtgtggactctgcctgcctacctggtctgggaagatgttctaccatatctccctagagcacgaaatcctgctgcacccgcgctacttcggccccaacttgctcaacacggtgaagcagaagctcttcaccgaggtggaggggacctgcacagggaagtatggctttgtaattgctgtcaccaccattgacaatattggtgctggtgtgatccagccaggccgaggctttgtcctttatccagttaagtacaaggccattgttttccggccatttaaaggggaggtcgtggatgctgttgtcactcaggtcaacaaggttggactcttcacagaaattgggcccatgtcttgcttcatctctcgacattccatcccttcagagatggagtttgatcctaactccaacccaccatgttacaagacaatggatgaggatattgtgattcagcaggacgatgagatccgcttaaagattgtggggacccgtgtggacaagaatgacatttttgctattggctccctgatggacgattacttggggcttgtaagctgagcctggtggcctcctacccttggtcctactctaggaagtgtgattgtcacacttatcatgttgtccagaggtccagtctggctgctgttgtggaggcaaggaaggcaactcatcccagaaggcatctggtgcttcttgtagcttaactactgcctcctcatttttcagtatgtgttctaagtataaaaagtccttggttctca

SEQ ID NO: 130942 - DNA, 519 bp, Artificial Sequence
  derived and/or modified sequence
atgttctatcacattagcttggagcacgagatccttctccaccccagatacttcggtccaaatctgctgaataccgttaaacagaagctctttactgaggtggaagggacgtgcactgggaagtatggttttgtgatcgcagttacaaccatcgacaacataggagccggtgttatacagcccggaaggggcttcgtgctatatccagtgaaatataaagcaatagtttttcggccattcaagggggaggtggtagacgccgtcgtgactcaggtaaacaaggtaggcctgtttacagaaattggccctatgagctgtttcatcagtcggcactctataccttcagagatggaattcgaccctaacagtaatcctccatgttataaaactatggacgaagacatcgtgatccagcaggacgatgagatcagactgaaaatagtcgggacgcgggttgacaaaaatgacatcttcgccattggtagcctgatggatgactacctggggttggtgtcatag

SEQ ID NO: 130943 - DNA, 519 bp, Artificial Sequence
  derived and/or modified sequence
atgttctaccacatcagcctggagcacgagatcctgctgcaccccagatacttcggccccaacctgctgaacaccgtgaagcagaagctgttcaccgaggtggagggcacctgcaccggcaagtacggcttcgtgatcgccgtgaccaccatcgacaacatcggcgccggcgtgatccagcccggcagaggcttcgtgctgtaccccgtgaagtacaaggccatcgtgttcagacccttcaagggcgaggtggtggacgccgtggtgacccaggtgaacaaggtgggcctgttcaccgagatcggccccatgagctgcttcatcagcagacacagcatccccagcgagatggagttcgaccccaacagcaaccccccctgctacaagaccatggacgaggacatcgtgatccagcaggacgacgagatcagactgaagatcgtgggcaccagagtggacaagaacgacatcttcgccatcggcagcctgatggacgactacctgggcctggtgagctag

SEQ ID NO: 130944 - protein, 743 aa, Artificial Sequence
  derived and/or modified sequence
MNNPSETSKPSMESGDGNTGTQTNGLDFQKQPVPVGGAISTAQAQAFLGHLHQVQLAGTSLQAAAQSLNVQSKSNEESGDSQQPSQPSQQPSVQAAIPQTQLMLAGGQITGLTLTPAQQQLLLQQAQAQAQLLAAAVQQHSASQQHSAAGATISASAATPMTQIPLSQPIQIAQDLQQLQQLQQQNLNLQQFVLVHPTTNLQPAQFIISQTPQGQQGLLQAQNLLTQLPQQSQANLLQSQPSITLTSQPATPTRTIAATPIQTLPQSQSTPKRIDTPSLEEPSDLEELEQFAKTFKQRRIKLGFTQGDVGLAMGKLYGNDFSQTTISRFEALNLSFKNMCKLKPLLEKWLNDAENLSSDSSLSSPSALNSPGIEGLSRRRKKRTSIETNIRVALEKSFLENQKPTSEEITMIADQLNMEKEVIRVWFCNRRQKEKRINPPSSGGTSSSPIKAIFPSPTSLVATTPSLVTSSAATTLTVSPVLPLTSAAVTNLSVTGTSDTTSNNTATVISTAPPASSAVTSPSLSPSPSASASTSEASSASETSTTQTTSTPLSSPLGTSQVMVTASGLQTAAAAALQGAAQLPANASLAAMAAAAGLNPSLMAPSQFAAGGALLSLNPGTLSGALSPALMSNSTLATIQALASGGSLPITSLDATGNLVFANAGGAPNIVTAPLFLNPQNLSLLTSNPVSLVSAAAASAGNSAPVASLHATSTSAESIQNSLFTVASASGAASTTTTASKAQ

SEQ ID NO: 130945 - protein, 766 aa, Artificial Sequence
  derived and/or modified sequence
MADGGAASQDESSAAAAAAADSRMNNPSETSKPSMESGDGNTGTQTNGLDFQKQPVPVGGAISTAQAQAFLGHLHQVQLAGTSLQAAAQSLNVQSKSNEESGDSQQPSQPSQQPSVQAAIPQTQLMLAGGQITGLTLTPAQQQLLLQQAQAQAQLLAAAVQQHSASQQHSAAGATISASAATPMTQIPLSQPIQIAQDLQQLQQLQQQNLNLQQFVLVHPTTNLQPAQFIISQTPQGQQGLLQAQNLLTQLPQQSQANLLQSQPSITLTSQPATPTRTIAATPIQTLPQSQSTPKRIDTPSLEEPSDLEELEQFAKTFKQRRIKLGFTQGDVGLAMGKLYGNDFSQTTISRFEALNLSFKNMCKLKPLLEKWLNDAENLSSDSSLSSPSALNSPGIEGLSRRRKKRTSIETNIRVALEKSFLENQKPTSEEITMIADQLNMEKEVIRVWFCNRRQKEKRINPPSSGGTSSSPIKAIFPSPTSLVATTPSLVTSSAATTLTVSPVLPLTSAAVTNLSVTGTSDTTSNNTATVISTAPPASSAVTSPSLSPSPSASASTSEASSASETSTTQTTSTPLSSPLGTSQVMVTASGLQTAAAAALQGAAQLPANASLAAMAAAAGLNPSLMAPSQFAAGGALLSLNPGTLSGALSPALMSNSTLATIQALASGGSLPITSLDATGNLVFANAGGAPNIVTAPLFLNPQNLSLLTSNPVSLVSAAAASAGNSAPVASLHATSTSAESIQNSLFTVASASGAASTTTTASKAQ

SEQ ID NO: 130946 - protein, 528 aa, Artificial Sequence
  derived and/or modified sequence
MADGGAASQDESSAAAAAAADSRMNNPSETSKPSMESGDGNTGTQTNGLDFQKQPVPVGGAISTAQAQAFLGHLHQVQLAGTSLQAAAQSLNVQSKSNEESGDSQQPSQPSQQPSVQAAIPQTQLMLAGGQITGLTLTPAQQQLLLQQAQAQAQLLAAAVQQHSASQQHSAAGATISASAATPMTQIPLSQPIQIAQDLQQLQQLQQQNLNLQQFVLVHPTTNLQPAQFIISQTPQGQQGLLQAQNLLTQLPQQSQANLLQSQPSITLTSQPATPTRTIAATPIQTLPQSQSTPKRIDTPSLEEPSDLEELEQFAKTFKQRRIKLGFTQGDVGLAMGKLYGNDFSQTTISRFEALNLSFKNMCKLKPLLEKWLNDAENLSSDSSLSSPSALNSPGIEGLSRRRKKRTSIETNIRVALEKSFLENQKPTSEEITMIADQLNMEKEVIRVWFCNRRQKEKRINPPSSGGTSSSPIKAIFPSPTSLVATTPSLVTSSAATTLTVSPVLPLTSAAVTNLSALQTPPPTTQQP

SEQ ID NO: 130947 - protein, 54 aa, Artificial Sequence
  derived and/or modified sequence
MNNPSETSKPSMESGDGNTGTQTNGLDFQKQPVPVGGAISTAQAQAFLGHLHQV

SEQ ID NO: 130948 - protein, 463 aa, Artificial Sequence
  derived and/or modified sequence
MVHSSMGAPEIRMSKPLEAEKQGLDSPSEHTDTERNGPDTNHQNPQNKTSPFSVSPTGPSTKIKAEDPSGDSAPAAPLPPQPAQPHLPQAQLMLTGSQLAGDIQQLLQLQQLVLVPGHHLQPPAQFLLPQAQQSQPGLLPTPNLFQLPQQTQGALLTSQPRAGLPTQPPKCLEPPSHPEEPSDLEELEQFARTFKQRRIKLGFTQGDVGLAMGKLYGNDFSQTTISRFEALNLSFKNMCKLKPLLEKWLNDAETMSVDSSLPSPNQLSSPSLGFDGLPGRRRKKRTSIETNVRFALEKSFLANQKPTSEEILLIAEQLHMEKEVIRVWFCNRRQKEKRINPCSAAPMLPSPGKPASYSPHMVTPQGGAGTLPLSQASSSLSTTVTTLSSAVGTLHPSRTAGGGGGGGGAAPPLNSIPSVTPPPPATTNSTNPSPQGSHSAIGLSGLNPSTGPGLWWNPAPYQP

SEQ ID NO: 130949 - DNA, 1392 bp, Artificial Sequence
  derived and/or modified sequence
atggtccatagttccatgggagcaccggagatccgcatgagtaaaccgttagaagctgagaagcagggcctggacagtcctagcgaacacacagacaccgaacggaatggacctgatacaaaccaccagaatcctcaaaacaaaacgagtccattctccgtgtccccaacaggccctagcacaaaaatcaaagccgaggacccttcaggtgatagcgccccggctgcaccattgcctccacagcccgcccagccccacctcccccaggcccagctcatgctgactggtagccagttggcaggagacatccagcaattactccagttgcagcagctggtgctcgtgcccgggcatcacctgcagccgccagcacagttcctgctgccacaggctcagcagtctcagccgggcttgctgcccacacctaatctgtttcagcttcctcagcagacacagggtgcactgctcacaagtcagccacgcgccgggctgccgacacagcctcccaaatgtcttgagcccccgtcacatcctgaggagcccagcgacctggaggaactggagcagttcgccaggactttcaagcagaggaggatcaaactgggattcacgcagggcgacgttggattggctatggggaagttatatggtaatgactttagccaaactaccatctccagatttgaggctcttaacctaagttttaaaaacatgtgtaaactcaaacccctattggaaaagtggctgaacgacgctgagacgatgagtgtggactcgtcactcccctccccaaaccagctcagctccccttcgctcggcttcgacggccttccaggacgcaggcgaaaaaaaaggacctccatcgagaccaacgttaggttcgctcttgaaaaatccttcctggcaaatcagaaacccaccagcgaggagatactactcatcgctgaacagctgcatatggagaaagaagtaataagagtgtggttttgtaacaggcggcagaaggaaaagcgcatcaatccatgctccgccgcacctatgcttccatcaccaggcaaacctgccagctacagccctcacatggtgaccccccagggcggcgctggtactctccctctatcccaagcctcctcatcactgtccacgactgtaaccaccctttcatccgctgttggaaccctccacccatcccgaacagccggggggggtggaggcggcggcggcgcggcccccccgctgaattctatacctagtgtgacacctcctccccccgcgacaacaaacagtaccaatccaagcccacaaggttctcactcagcgatcggccttagcggcctgaatccatctacaggacccggactgtggtggaatccggccccttatcaaccttag

SEQ ID NO: 130950 - DNA, 1392 bp, Artificial Sequence
  derived and/or modified sequence
atggtgcacagctccatgggcgcccctgagatccgcatgagcaagcccctggaggccgagaagcagggcctggacagccccagcgagcacacagacacagaaagaaatggaccagacaccaaccaccagaacccccagaacaagaccagccccttctctgtgagccccaccggccccagcaccaagatcaaggccgaggaccccagcggggacagcgccccagctgcccccctgcccccccagcctgcccagccccacctgccccaggcccagctgatgctgaccggcagccagctggccggggacatccagcagctgctgcagctgcagcagctggtgctggtgcccggccaccacctgcagcccccagcccagttcctgctgccccaggcccagcagagccagcccggcctgctgcccacccccaacctcttccagctgccccagcagacccagggcgccctgctgaccagccagccccgggccggcctgcccacccagccccccaagtgcctggagccccccagccaccctgaggagcccagcgacctggaggagctggagcagtttgcccggaccttcaagcagaggcgcatcaagctgggcttcacccagggagatgtgggcctggccatgggcaagctgtatggaaatgacttcagccagaccaccatcagcagatttgaggccctgaacctgtccttcaagaacatgtgcaagctgaagcccctgctggagaagtggctgaatgatgctgagaccatgtctgtggacagcagcctgcccagccccaaccagctgagcagccccagcctgggctttgatggcctgcccggcagaagaaggaagaagaggaccagcattgagaccaacgtgcgctttgccctggagaagagcttcctggccaaccagaagcccaccagcgaggagatcctgctgattgctgagcagctgcacatggagaaggaggtgatccgggtgtggttctgcaacagacggcagaaggagaagaggatcaacccctgcagcgctgcccccatgctgcccagccctgggaagccagccagctacagcccccacatggtgaccccccagggcggggccggcaccctgcccctgagccaggccagcagcagcctgagcaccaccgtgaccaccctgagcagcgctgtgggcaccctgcaccccagcaggacagctgggggcggcggcggcggcggcggggccgccccacccctgaacagcatccccagcgtgaccccacctcctccagccaccaccaacagcaccaaccccagcccccagggcagccacagcgccatcggcctgagcggcctgaaccccagcacaggccctggcctgtggtggaacccagccccctaccagccctag

SEQ ID NO: 130951 - DNA, 1392 bp, Artificial Sequence
  derived and/or modified sequence
atggtgcacagcagcatgggcgcccccgagatccggatgagcaagcctctagaagccgagaaacaggggctggattcaccttctgaacatacagacaccgagaggaatgggcctgacaccaaccaccagaacccacagaataagacctctccattctcagtatcgccaacaggcccctctaccaagatcaaggcggaggatccttcaggagacagcgcccccgccgcccctcttcctcctcagcccgctcagccgcacctccctcaggctcaattaatgctgactggaagtcaactggccggcgacatccagcaactgctgcagcttcaacaattggtcctggtgcctggtcaccacctccagccacctgcacagtttctcttgccccaggcgcagcagtctcagcccggtctcctccctacacccaacctgtttcagcttccacaacagactcagggcgctttacttactagtcaaccacgagcaggcctgccaacacagccgccaaagtgcttggagccccccagtcaccctgaggagccctccgacctcgaagagctggagcagttcgcccgcacgttcaagcagaggcgtatcaaactcggatttacgcagggcgacgtgggactcgcaatgggtaagctgtatggcaacgatttctcccagactactatttcgcggtttgaagcactaaatctgtccttcaagaatatgtgtaaacttaagccgttgctggaaaaatggctgaatgacgcagaaactatgtctgtggactctagcctgccaagccctaaccagctgagcagtcccagtctcgggttcgacggcctccctggccgacgaagaaaaaaaagaacatccattgagaccaatgtgaggttcgccctggaaaaaagtttcctcgccaaccagaagccaacatccgaggagatattgttaatcgcagagcaactgcatatggaaaaggaggtgattagggtctggttttgcaacagacggcaaaaagaaaaacgtattaacccctgcagcgccgcccccatgctgccgtctcccgggaaacctgcatcctattcaccccacatggttactccgcaaggtggcgccggcactttgcccctgagccaggcatcatcttcactgtcaacgacagtgacaactctgtcctctgctgtaggcacccttcacccatctagaaccgctgggggcggcggcggcggcggaggcgctgccccgcctctgaactctattccctccgtgactccccctcccccggcaactaccaatagcaccaacccttctcctcagggatctcactctgccataggactgagcggactcaatccttctactgggccaggcttgtggtggaatccggcaccgtaccagccctag

SEQ ID NO: 130952 - DNA, 4513 bp, Artificial Sequence
  derived and/or modified sequence
ggctcggcccccagagagggtggggagatgacacagttgttcccccagccctggcggggcgggcagcatggttcactccagcatgggggctccagaaataagaatgtctaagcccctggaggccgagaagcaaggtctggactccccatcagagcacacagacaccgaaagaaatggaccagacactaatcatcagaacccccaaaataagacctccccattctccgtgtccccaactggccccagtacaaagatcaaggctgaagaccccagtggcgattcagccccagcagcacccctgccccctcagccggcccagcctcatctgccccaggcccaactcatgttgacgggcagccagctagctggggacatacagcagctcctccagctccagcagctggtgcttgtgccaggccaccacctccagccacctgctcagttcctgctaccgcaggcccagcagagccagccaggcctgctaccgacaccaaatctattccagctacctcagcaaacccagggagctcttctgacctcccagccccgggccgggcttcccacacagccccccaaatgcttggagccaccatcccaccccgaggagcccagtgatctggaggagctggagcaattcgcccgcaccttcaagcaacgccgcatcaagctgggcttcacgcagggtgatgtgggcctggccatgggcaagctctacggcaacgacttcagccagacgaccatttcccgcttcgaggccctcaacctgagcttcaagaacatgtgcaaactcaagcccctcctggagaagtggctcaacgatgcagagactatgtctgtggactcaagcctgcccagccccaaccagctgagcagccccagcctgggtttcgacggcctgcccggccggagacgcaagaagaggaccagcatcgagacaaacgtccgcttcgccttagagaagagttttctagcgaaccagaagcctacctcagaggagatcctgctgatcgccgagcagctgcacatggagaaggaagtgatccgcgtctggttctgcaaccggcgccagaaggagaaacgcatcaacccctgcagtgcggcccccatgctgcccagcccagggaagccggccagctacagcccccatatggtcacaccccaagggggcgcggggaccttaccgttgtcccaagcttccagcagtctgagcacaacagttactaccttatcctcagctgtggggacgctccaccccagccggacagctggagggggtgggggcgggggcggggctgcgccccccctcaattccatcccctctgtcactcccccacccccggccaccaccaacagcacaaaccccagccctcaaggcagccactcggctatcggcttgtcaggcctgaaccccagcacgggccctggcctctggtggaaccctgccccttaccagccttgatggcagcgggaatctggtgctgggggcagccggtgcagccccggggagccctggcctggtgacctcgccgctcttcttgaatcatgctgggctgcccctgctcagcaccccgcctggtgtgggcctggtctcagcagcggctgcggctgtggcagcctccatctccagcaagtctcctggcctctcctcctcatcctcttcatcctcatcctcctcctcctccacttgcagcgagacggcagcacagacccctggaggtccaggggggcccgaggcagggtccaaacctgagtgagggccagccatgcctcccctcccattcctctggtccctgccttggtcccttgcctgggaagagggcgaggaggccagtggtggggacgcagagggtcctcagagcaggagtgacaagggaggaaagaccaaaaaaacaaccaaccaaaaaaaaaaaaaaaaaggaaagaaactaaccaacaaaagagaaaaccaaaaataatcacaacagaaaccagctgccccaaaggaaccagaggtgaaaaacaaacaaaaaaaaaccaaaaacaaaccaaaaaaaaaaaaaacccacaaaatcaaacaaaccaaaaaaccagtcgcgagccagacctcagcgtgctcaccctcactgctacgacgccaaataaaaaccccagccaggggcggagaagcctccagcaggtcagacctcatgccaccgagccctggctgtgggaccaacccccaaccctgcctcccccgtgggggctacagaaggaaaaagagaagatgccagcttcctaatcccagcccccagccctgggccagcgaagacagggcacagcctgggcagatgggctggggcttagcaccacccaccaaatgttcttttccagaaggtgaaagagaaagggcctgaacaaccttacaccaaatattcagtagcttcatccaaaggatgtacagaatttttagcattgtgctcaacagaatgtgtccctaccatgtgtccccttctcccctggcccccagctctccccacctgggcagggggtcttgctttaacctcctccctccccccagcaggggagagttcaagggaaggcctgcggacaacttttcatcccctgttcctccctcttttcccctttgaagggtgggctaggccattttgccaagttctagctctcacaagtccctcctcaaccctgtcaccctcctctgctctggaactgactccctccccagcctatgggaaggtggaaatttcaggcaagaggggatgaagacattcagttgagggcattcagttgtctttttccatcctgtctgtttccctgaaaaaaaaaaaaattcatattccagtgcctatccgtgggatccttcacgttctttgacattaaccagaaaccaaaaagagaactcacctcgcttttcccaccctgtgcccctctggtactggcgaatgcctctccctccccccacatgcacgcacgcacacaccccagtggtggggttcctcgagatggcatccccatcagggtccatgtggtggggacagtgccacagcctgtggtccccatctgagagggcgcggtggtggccaccactcccacaagacctccacaactcttggctggaccctgtgtttgaccagccccggacacgtctccactgacgacggacagaggagagacaccactgggagccaccctgccctcctgctattgtggaggccaacaaagttttgaaccgaaaaccaaaaaaacagaaacaaacaaacaataaatttaaactagaaaaaaaatttatatatatatataaacatatatatatatatatatataaaagggaaagaagatgaggactcttcaagaataagatggaaccgcgaggcggagccaagcccctgcaccggtggtccaggcccttgttccccaaggcggatggaaggacggatgcttctttctcttcacaaatacctcatggacgttgtctttgggaaagccggagggggcggctggggcagggcctgtccctcggccagggcagatggaagcgggtgggcggggctgagagagggtatcagggacaggggtgaagagccccaaactcccctcccaaatcaactgaaaaagctttaaaaaaagacaggaaaaaaaggagtaagaaagcaaaaagaacagatgaaggaaaacttaacaacttttgggtggtttgattcctcctttgatttctttttcggttctcttttgtctgacctctctcctcccctccttcctctctcctcccctccttcctctctcctctcctccttcctgtctcctctctctccctttgctctcctctcttctctctcaatcttgttctttctgtgtctctcctcaaaccaaagtgttgcagtgaaggacacgagccattgaaatcagggtggggcctgacagccgtagtgtggcccctgccccttgttgggcaggagcagagagagaggagagccctgagaccgcagggctttggcctgggcagcttccactttctgccggacactctgaggagaggcagatggagctccaggcctcagcgttctcttttttccttgtctcccttctcccacccgggaaatgaaactgttgggctgggcgacggaggcagcagagactcggccattgcaggggcctctgggtgccttgtccgggcagtggtgaagtagccgcccctcccaccccggcacgatggggcctggcacctcgtctacccaacctcaccggaatgtaagcatctccgctgaacgactccctgcccttaccctacctctgagtttgtccatgtttatttcctgaagagagaagggactggcaagagggcttgggccccagcccaagggtggagagggggccaagggctcctgaccaaataggaaggacatttgagcagagcaaaatgaaaggaattacaaccaaaaaccccctccgagaagacaggcagcatggaaggcatggtggagatgactcaaacaaaaactatgattctagaccaaaaaggaaaaaaaaaaaaaaaaaa

SEQ ID NO: 130953 - DNA, 1392 bp, Artificial Sequence
  derived and/or modified sequence
atggtccacagctctatgggagcccctgagataaggatgtcaaagcctttagaggccgagaaacaagggctagactcccccagcgaacacaccgatactgagcgaaacggcccagacacaaaccaccaaaacccacagaataagacatctccattctcggtttctccaaccgggccttccaccaagattaaggccgaagacccgtctggggactcagcgcctgcagctccgctcccaccacagcccgctcagccccacctgccccaagcccagctgatgctgaccggtagtcaactcgccggagacattcaacagttgctgcaactgcagcagttggttctcgtcccgggacaccacctccagcctccagcacaattcttgttgccccaggcgcagcagtctcagcccggacttttaccaactccgaatcttttccagctgccacagcagacccagggcgctctcctgacgagccaacccagggccggtctgccgacacagcctccaaaatgtctagaacctcccagtcatccagaagagccctccgatcttgaggaactggaacagttcgcacgcacttttaaacagaggcgtatcaagctgggattcacccaaggcgatgttggtctcgcaatgggaaagctctatggaaacgatttctcacaaactactatttcaagatttgaagccctcaatctctcgttcaaaaatatgtgtaaattgaagcctctgctcgagaaatggctgaacgacgccgaaacaatgtcagtagatagctccttgcccagtccgaaccagctgtcttccccttcgctggggtttgatggactcccaggcaggcggagaaaaaagcggacatctattgaaaccaatgttcgttttgctctggagaagtcgttcttagcaaatcaaaagccgactagtgaagagatcctgttaatcgcagaacagctgcacatggagaaggaggtgatccgcgtctggttctgtaataggaggcagaaggagaagaggattaacccctgcagcgcagctccgatgctgcctagccccggaaagcctgcgtcctattctccccacatggtcactccccagggcggtgccggtaccctgccgctgtcacaggcttcgtcaagtctgtcaaccacggtgactaccctgtcctctgctgtcggaaccttacacccgtcaaggaccgccggagggggtgggggaggcggaggcgctgcaccacccttgaactctatcccatctgtgacaccacctcccccagccacgaccaatagcactaacccttccccacagggatcgcatagcgcaatcggactgagcggactgaatccgagcactggccctggtctgtggtggaaccccgctccataccagccttag

SEQ ID NO: 130954 - DNA, 1392 bp, Artificial Sequence
  derived and/or modified sequence
atggtgcacagcagcatgggcgcccccgagatcagaatgagcaagcccctggaggccgagaagcagggcctggacagccccagcgagcacaccgacaccgagagaaacggccccgacaccaaccaccagaacccccagaacaagaccagccccttcagcgtgagccccaccggccccagcaccaagatcaaggccgaggaccccagcggcgacagcgcccccgccgcccccctgcccccccagcccgcccagccccacctgccccaggcccagctgatgctgaccggcagccagctggccggcgacatccagcagctgctgcagctgcagcagctggtgctggtgcccggccaccacctgcagccccccgcccagttcctgctgccccaggcccagcagagccagcccggcctgctgcccacccccaacctgttccagctgccccagcagacccagggcgccctgctgaccagccagcccagagccggcctgcccacccagccccccaagtgcctggagccccccagccaccccgaggagcccagcgacctggaggagctggagcagttcgccagaaccttcaagcagagaagaatcaagctgggcttcacccagggcgacgtgggcctggccatgggcaagctgtacggcaacgacttcagccagaccaccatcagcagattcgaggccctgaacctgagcttcaagaacatgtgcaagctgaagcccctgctggagaagtggctgaacgacgccgagaccatgagcgtggacagcagcctgcccagccccaaccagctgagcagccccagcctgggcttcgacggcctgcccggcagaagaagaaagaagagaaccagcatcgagaccaacgtgagattcgccctggagaagagcttcctggccaaccagaagcccaccagcgaggagatcctgctgatcgccgagcagctgcacatggagaaggaggtgatcagagtgtggttctgcaacagaagacagaaggagaagagaatcaacccctgcagcgccgcccccatgctgcccagccccggcaagcccgccagctacagcccccacatggtgaccccccagggcggcgccggcaccctgcccctgagccaggccagcagcagcctgagcaccaccgtgaccaccctgagcagcgccgtgggcaccctgcaccccagcagaaccgccggcggcggcggcggcggcggcggcgccgccccccccctgaacagcatccccagcgtgaccccccccccccccgccaccaccaacagcaccaaccccagcccccagggcagccacagcgccatcggcctgagcggcctgaaccccagcaccggccccggcctgtggtggaaccccgccccctaccagccctag

SEQ ID NO: 130955 - protein, 338 aa, Artificial Sequence
  derived and/or modified sequence
MMAMNSKQPFGMHPVLQEPKFSSLHSGSEAMRRVCLPAPQLQGNIFGSFDESLLARAEALAAVDIVSHGKNHPFKPDATYHTMSSVPCTSTSSTVPISHPAALTSHPHHAVHQGLEGDLLEHISPTLSVSGLGAPEHSVMPAQIHPHHLGAMGHLHQAMGMSHPHTVAPHSAMPACLSDVESDPRELEAFAERFKQRRIKLGVTQADVGAALANLKIPGVGSLSQSTICRFESLTLSHNNMIALKPVLQAWLEEAEAAYREKNSKPELFNGSERKRKRTSIAAPEKRSLEAYFAIQPRPSSEKIAAIAEKLDLKKNVVRVWFCNQRQKQKRMKYSAVH

SEQ ID NO: 130956 - DNA, 1182 bp, Artificial Sequence
  derived and/or modified sequence
cgctgagcagcgctcacttggagagcggcaagcaagctagacaagcctgattccatgtcacccgctgccaccctgccaggagcgcgaagatgatggccatgaactccaagcagcctttcggcatgcacccggtgctgcaagaacccaaattctccagtctgcactctggctccgaggccatgcgccgagtctgtctcccagccccgcagctgcagggtaatatatttggaagctttgatgagagcctgctggcacgcgccgaagctctggcggcggtggatatcgtctcccacggcaagaaccatccgttcaagcccgacgccacctaccataccatgagcagcgtgccctgcacgtccacttcgtccaccgtgcccatctcccacccagctgcgctcacctcacaccctcaccacgccgtgcaccagggcctcgaaggcgacctgctggagcacatctcgcccacgctgagtgtgagcggcctgggcgctccggaacactcggtgatgcccgcacagatccatccacaccacctgggcgccatgggccacctgcaccaggccatgggcatgagtcacccgcacaccgtggcccctcatagcgccatgcctgcatgcctcagcgacgtggagtcagacccgcgcgagctggaagccttcgccgagcgcttcaagcagcggcgcatcaagctgggggtgacccaggcggacgtgggcgcggctctggctaatctcaagatccccggcgtgggctcgctgagccaaagcaccatctgcaggttcgagtctctcactctctcgcacaacaacatgatcgctctcaagccggtgctccaggcctggttggaggaggccgaggccgcctaccgagagaagaacagcaagccagagctcttcaacggcagcgaacggaagcgcaaacgcacgtccatcgcggcgccggagaagcgttcactcgaggcctatttcgctatccagccacgtccttcatctgagaagatcgcggccatcgctgagaaactggaccttaaaaagaacgtggtgagagtctggttctgcaaccagagacagaaacagaaacgaatgaagtattcggctgtccactgattgcggcagggcgcagcgtcgggagccgggagagcctagtgctcatccctcccgggttcgggggatggttatcggg

SEQ ID NO: 130957 - DNA, 1017 bp, Artificial Sequence
  derived and/or modified sequence
atgatggctatgaattcaaagcagccctttgggatgcaccctgtcctgcaagagccgaagttcagctccctgcattcaggatccgaggccatgaggcgggtctgtttgccagccccccagcttcaagggaacatttttggttcatttgatgaatcactgctagcaagggctgaggcccttgcagcagttgatatcgtcagccatggaaagaatcatcctttcaaaccagacgctacttatcacacgatgagttccgttccctgcaccagcacctctagcacagttcctatatcacatcccgcagccctcacttcacacccacatcatgccgtgcaccaggggcttgaaggggatctcctcgagcacatcagccccactctcagtgtgagcgggctgggtgctcccgagcactcggtgatgcctgcccagattcacccccaccatctgggtgcaatgggacacctccatcaggccatgggaatgagtcacccccacactgtggctccacactccgcgatgcctgcctgtctctcagatgttgaatcagatcccagagaacttgaggcgtttgcagagcgcttcaagcagagacgtattaagctcggcgtcacacaggctgatgtgggggccgcgctagcaaacttgaagataccaggcgtcggatcgctgtcccagtctaccatatgccgctttgaaagtctgaccttatcacacaataatatgatcgcacttaaacccgtcctacaagcttggcttgaagaggctgaggctgcgtacagggaaaaaaacagcaagccagagctgtttaatggatctgagcggaagcgaaagcgcacctctattgcggccccagaaaaaagatcacttgaagcctattttgccattcagccgaggccatcgagcgagaagattgccgcaatagctgagaaattggacctgaaaaagaatgtggtgcgagtgtggttctgcaaccagaggcagaaacagaaaaggatgaaatattcagccgtgcattag

SEQ ID NO: 130958 - DNA, 1017 bp, Artificial Sequence
  derived and/or modified sequence
atgatggccatgaacagcaagcagcccttcggcatgcaccctgtgctgcaggagcccaagttcagcagcctgcacagcggcagcgaggccatgagaagagtgtgcctgcctgccccccagctgcagggcaacatcttcggcagctttgatgagagcctgctggcccgggcagaggccctggccgctgtggacatcgtgagccacggcaagaaccaccccttcaagccagatgccacctaccacaccatgagctctgtgccctgcaccagcaccagcagcacagtgcccatcagccaccctgctgccctgaccagccacccccaccacgctgtgcaccagggcctggagggggacctgctggagcacatcagccccaccctgtctgtgtctggcctgggcgcccctgagcacagcgtgatgcctgcccagatccacccccaccacctgggcgccatgggccacctgcaccaggccatgggcatgagccacccccacacagtggccccccacagcgccatgcctgcctgcctgagtgatgtggagagtgacccccgggagctggaggcctttgctgagcgcttcaagcagaggcgcatcaagctgggcgtgacccaggctgatgtgggcgccgccctggccaacctgaagatccctggggtgggcagcctgagccagagcaccatctgccgctttgagagcctgaccctgagccacaacaacatgattgccctgaagcctgtgctgcaggcctggctggaggaggccgaggccgcctaccgggagaagaacagcaagccagagctgttcaacggcagcgagaggaagaggaagaggaccagcattgctgcccctgagaagaggagcctggaggcctactttgccatccagccccggcccagcagcgagaagattgctgccatcgccgagaagctggacctgaagaagaatgtggtgcgggtgtggttctgcaaccagaggcagaagcagaagaggatgaagtacagcgctgtgcactag

SEQ ID NO: 130959 - DNA, 1017 bp, Artificial Sequence
  derived and/or modified sequence
atgatggccatgaacagcaagcagcccttcggcatgcaccccgtgctgcaagagcccaagttctcatccctccattctggcagcgaggctatgcggagagtctgtttgcctgcaccacagttgcagggcaatatattcggatctttcgatgagtcattgttggctcgggccgaggcccttgctgccgtggatatcgtttcacatgggaaaaaccatccttttaagcccgacgccacctaccatactatgtctagcgtgccctgcacatccaccagctccacagtgcctattagtcaccccgccgcactgacctcccatccccaccacgcagtgcaccagggactggagggcgacctcctggaacacatctcacctactctttctgtatctggtctcggagcgccggagcactcagtcatgcccgcacagatccacccgcaccaccttggggctatgggacatctgcaccaggctatgggcatgtcccacccacacaccgtggctccccattctgccatgcccgcctgcctctccgacgtcgaaagtgacccacgtgagctggaggctttcgccgagcgcttcaagcaacggaggataaagctgggggtgacacaagcagatgtgggagcagctctggccaatctgaagattccaggtgtgggctctctgagccaatccactatttgtaggttcgaaagccttacgctttcgcacaacaatatgattgccttgaaaccagttttacaagcatggctcgaagaggcggaagccgcctatagggagaaaaattcgaagccagaattgttcaatggtagcgaacgtaaacgaaagaggactagcattgcggcccccgaaaagcgcagcctcgaggcctactttgccattcagcctagacccagctcagagaaaatagctgccattgccgagaaactggacctcaagaagaacgtcgtccgtgtatggttctgcaatcagcgacagaaacaaaagcgcatgaagtactccgcagtgcactag

SEQ ID NO: 130960 - DNA, 1017 bp, Artificial Sequence
  derived and/or modified sequence
atgatggcaatgaattcaaagcaaccattcggaatgcacccggtcctgcaagagcccaaattcagctccctccatagcggctccgaagcaatgaggagggtctgtcttcctgctcctcagcttcaaggcaacatttttggctcctttgacgagtctctgctggcgagggcggaagcactggctgccgtcgatattgtctcccatggtaagaaccaccctttcaaacccgatgccacatatcacaccatgagctctgtgccatgcacctctacttctagtaccgttccgatctcccaccctgctgcattgacatctcatccgcatcatgctgtgcaccagggacttgagggtgacctcctggagcatatttcccccaccctgtctgtttctggcctcggcgctcccgaacactcggtgatgcctgcacagatccatcctcatcatctgggcgctatggggcatttacaccaggccatgggtatgagccatccccatacagtggcccctcatagcgccatgcccgcttgcctgtcagacgtagaatcggatccaagggagctcgaagcatttgccgaacgctttaaacagcgtcggataaagctgggggtgacgcaggcagatgtgggggctgccctcgctaacttgaagattccgggagtcggcagcctgtctcagagcacgatttgcagatttgagtctctcacattgtcccataataacatgattgcactgaagcctgttctgcaagcttggcttgaagaggctgaggcagcatatagagagaaaaattctaagccggagctgttcaacggttccgagagaaaacgaaaacgcacttcgattgccgctcctgagaaaagatcattggaggcttattttgctattcagccgagaccttcttccgaaaaaatcgctgctattgccgagaagctcgatttgaagaaaaatgtggtccgagtctggttctgtaaccaacgccaaaagcagaaaaggatgaaatattccgccgttcattag

SEQ ID NO: 130961 - DNA, 1017 bp, Artificial Sequence
  derived and/or modified sequence
atgatggccatgaacagcaagcagcccttcggcatgcaccccgtgctgcaggagcccaagttcagcagcctgcacagcggcagcgaggccatgagaagagtgtgcctgcccgccccccagctgcagggcaacatcttcggcagcttcgacgagagcctgctggccagagccgaggccctggccgccgtggacatcgtgagccacggcaagaaccaccccttcaagcccgacgccacctaccacaccatgagcagcgtgccctgcaccagcaccagcagcaccgtgcccatcagccaccccgccgccctgaccagccacccccaccacgccgtgcaccagggcctggagggcgacctgctggagcacatcagccccaccctgagcgtgagcggcctgggcgcccccgagcacagcgtgatgcccgcccagatccacccccaccacctgggcgccatgggccacctgcaccaggccatgggcatgagccacccccacaccgtggccccccacagcgccatgcccgcctgcctgagcgacgtggagagcgaccccagagagctggaggccttcgccgagagattcaagcagagaagaatcaagctgggcgtgacccaggccgacgtgggcgccgccctggccaacctgaagatccccggcgtgggcagcctgagccagagcaccatctgcagattcgagagcctgaccctgagccacaacaacatgatcgccctgaagcccgtgctgcaggcctggctggaggaggccgaggccgcctacagagagaagaacagcaagcccgagctgttcaacggcagcgagagaaagagaaagagaaccagcatcgccgcccccgagaagagaagcctggaggcctacttcgccatccagcccagacccagcagcgagaagatcgccgccatcgccgagaagctggacctgaagaagaacgtggtgagagtgtggttctgcaaccagagacagaagcagaagagaatgaagtacagcgccgtgcactag

SEQ ID NO: 130962 - protein, 360 aa, Artificial Sequence
  derived and/or modified sequence
MAGHLASDFAFSPPPGGGGDGPGGPEPGWVDPRTWLSFQGPPGGPGIGPGVGPGSEVWGIPPCPPPYEFCGGMAYCGPQVGVGLVPQGGLETSQPEGEAGVGVESNSDGASPEPCTVTPGAVKLEKEKLEQNPEESQDIKALQKELEQFAKLLKQKRITLGYTQADVGLTLGVLFGKVFSQTTICRFEALQLSFKNMCKLRPLLQKWVEEADNNENLQEICKAETLVQARKRKRTSIENRVRGNLENLFLQCPKPTLQQISHIAQQLGLEKDVVRVWFCNRRQKGKRSSSDYAQREDFEAAGSPFSGGPVSFPLAPGPHFGTPGYGSPHFTALYSSVPFPEGEAFPPVSVTTLGSPMHSN

SEQ ID NO: 130963 - protein, 122 aa, Artificial Sequence
  derived and/or modified sequence
MAGHLASDFAFSPPPGGGGDGPGGPEPGWVDPRTWLSFQGPPGGPGIGPGVGPGSEVWGIPPCPPPYEFCGGMAYCGPQVGVGLVPQGGLETSQPEGEAGGGEQLRWGLPGALHRHPWCREA

SEQ ID NO: 130964 - protein, 123 aa, Artificial Sequence
  derived and/or modified sequence
MAGHLASDFAFSPPPGGGGDGPGGPEPGWVDPRTWLSFQGPPGGPGIGPGVGPGSEVWGIPPCPPPYEFCGGMAYCGPQVGVGLVPQGGLETSQPEGEAGVGVETPMGPPRSPAPHPFPFPLL

SEQ ID NO: 130965 - protein, 185 aa, Artificial Sequence
  derived and/or modified sequence
MAGHLASDFAFSPPPGGGGDGPGGPEPGWVDPRTWLSFQGPPGGPGIGPGVGPGSEVWGIPPCPPPYEFCGGMAYCGPQVGVGLVPQGGLETSQPEGEAGVGVESNSDGASPEPCTVTPGAVKLEKEKLEQNPEESQDIKALQKELEQFAKLLKQKRITLGYTQADVHPGGSIWEGIQPNDHLPL

SEQ ID NO: 130966 - DNA, 1411 bp, Artificial Sequence
  derived and/or modified sequence
ccttcgcaagccctcatttcaccaggcccccggcttggggcgccttccttccccatggcgggacacctggcttcggatttcgccttctcgccccctccaggtggtggaggtgatgggccaggggggccggagccgggctgggttgatcctcggacctggctaagcttccaaggccctcctggagggccaggaatcgggccgggggttgggccaggctctgaggtgtgggggattcccccatgccccccgccgtatgagttctgtggggggatggcgtactgtgggccccaggttggagtggggctagtgccccaaggcggcttggagacctctcagcctgagggcgaagcaggagtcggggtggagagcaactccgatggggcctccccggagccctgcaccgtcacccctggtgccgtgaagctggagaaggagaagctggagcaaaacccggaggagtcccaggacatcaaagctctgcagaaagaactcgagcaatttgccaagctcctgaagcagaagaggatcaccctgggatatacacaggccgatgtggggctcaccctgggggttctatttgggaaggtattcagccaaacgaccatctgccgctttgaggctctgcagcttagcttcaagaacatgtgtaagctgcggcccttgctgcagaagtgggtggaggaagctgacaacaatgaaaatcttcaggagatatgcaaagcagaaaccctcgtgcaggcccgaaagagaaagcgaaccagtatcgagaaccgagtgagaggcaacctggagaatttgttcctgcagtgcccgaaacccacactgcagcagatcagccacatcgcccagcagcttgggctcgagaaggatgtggtccgagtgtggttctgtaaccggcgccagaagggcaagcgatcaagcagcgactatgcacaacgagaggattttgaggctgctgggtctcctttctcagggggaccagtgtcctttcctctggccccagggccccattttggtaccccaggctatgggagccctcacttcactgcactgtactcctcggtccctttccctgagggggaagcctttccccctgtctccgtcaccactctgggctctcccatgcattcaaactgaggtgcctgcccttctaggaatgggggacagggggaggggaggagctagggaaagaaaacctggagtttgtgccagggtttttgggattaagttcttcattcactaaggaaggaattgggaacacaaagggtgggggcaggggagtttggggcaactggttggagggaaggtgaagttcaatgatgctcttgattttaatcccacatcatgtatcacttttttcttaaataaagaagcctgggacacagtagatagacacacttaaaaaaaaaaa

SEQ ID NO: 130967 - DNA, 1080 bp, Artificial Sequence
  derived and/or modified sequence
atggctggccacctggcctctgacttcgcattctcacctccacctgggggcgggggcgacggtccaggcgggccagagcccggctgggtggatcccaggacttggctctctttccagggcccaccaggtggacccgggataggtcccggagtgggaccaggcagcgaggtgtgggggatcccaccatgccctccaccttatgagttctgcggtggcatggcctattgtggacctcaagttggcgtgggtctggttccccagggcggcctcgagactagtcagcccgagggcgaagcaggcgtcggggtagaaagcaacagtgacggcgccagcccagagccttgcacagtaacccccggtgctgtgaagctggaaaaagaaaagttggagcagaaccccgaggagtcccaggatataaaagcattacaaaaggagctggaacagttcgccaaactgctgaagcagaaacgcatcacacttggatacacccaggctgatgtcggcttgaccctgggagtgctgtttgggaaagtcttttcccagacaactatttgccgttttgaggcactgcagttaagctttaagaacatgtgtaaactgcgacctttactgcagaagtgggtcgaagaggccgacaataatgaaaatttacaagagatctgcaaggccgagaccctggtgcaggcccggaaacgcaaaagaacatctattgagaaccgggtgagaggcaacctggaaaatctgtttctgcagtgtcccaaacccactctgcagcagatttcccacattgcacaacagttggggctggagaaggatgtggtgagagtttggttttgcaaccggaggcagaaaggcaaacgctccagttcagattacgctcaacgagaagacttcgaagccgccggctctcctttttctggtggccctgtgagttttcctctcgcccctgggccacacttcgggactcccggctatggctctccccatttcaccgccctttatagcagcgtgccattccctgagggtgaagcattccctccagtgtccgtaacaacactgggcagtccaatgcacagcaac

SEQ ID NO: 130968 - DNA, 1080 bp, Artificial Sequence
  derived and/or modified sequence
atggccggacacctggcttccgatttcgcattcagtccccctcctgggggtggaggggacggccccggcggcccagagcccgggtgggttgacccccggacatggttgtcgtttcagggccccccagggggacctggcataggacctggggtgggtccaggctccgaggtctggggtattccaccatgccccccaccatacgagttctgcgggggtatggcatactgcgggccacaagtgggcgtcggcctggtacctcagggtgggttggagacatcccaaccagagggtgaagccggtgtgggggtcgagagcaatagcgacggagcctcccctgagccctgcaccgtgacccccggcgcagtgaaactagagaaagaaaaactcgagcaaaatcccgaggaaagccaggatatcaaagcattgcagaaggagctggaacagtttgcaaaactgcttaaacagaagcggattactctcgggtacacccaagctgatgtgggattgacactgggcgtgctgttcggaaaggtgtttagtcagaccactatatgtcggtttgaggccttgcaactgagttttaagaatatgtgcaagttaaggccattactgcagaagtgggtggaggaggcagacaacaatgaaaatcttcaggagatctgcaaagcagaaaccctcgtgcaagcccgcaagcgcaaaaggacttcaatcgagaaccgagtcagaggaaacttggagaacctttttttgcagtgcccaaaacccactcttcagcagataagtcacattgcccagcagctgggactcgaaaaggacgtggtgcgagtttggttttgcaaccggcggcagaagggaaagaggagcagtagcgactacgctcaaagagaggactttgaggcagccgggagtccttttagtggtggccctgtgagcttcccacttgcccctggacctcattttggcacacccggctatgggagtcctcactttactgctctctattctagcgtgccatttcccgagggggaggctttccccccagtgagcgtcacgacactgggaagcccgatgcatagtaat

SEQ ID NO: 130969 - DNA, 1080 bp, Artificial Sequence
  derived and/or modified sequence
atggcgggacacctcgcttctgatttcgcatttagccctccaccaggcggtgggggagacgggcctggaggccccgagcccgggtgggttgatccccgaacttggctttcgtttcaaggacctcccggagggcctggtatcggaccaggcgtgggccctgggtcagaagtatggggaataccgccatgtcctcctccatacgagttttgcgggggcatggcctattgtggaccgcaagtgggggtagggctcgtgccccagggagggcttgaaactagtcagcccgaaggcgaggcaggggtcggcgtcgagagtaactccgacggcgccagtccagaaccttgcaccgtcactccaggcgcggtcaaattggaaaaagagaaactcgagcagaatcccgaggagagccaggatatcaaggcgctccagaaagaactcgaacagtttgccaagctgttaaagcagaagagaatcacactcggctatacccaggcagacgttggcctgactctaggggtgctgtttggcaaagtgttctcccagacaaccatttgccggtttgaagccttacagctgtcgttcaagaatatgtgcaagcttagacctctcctccaaaagtgggttgaggaggctgacaacaacgagaacctgcaagaaatctgtaaagccgaaacattagtgcaggccaggaaaagaaagagaacttccattgagaatagagtgcggggtaacctggaaaacctgttccttcagtgtcctaagcctaccttacagcagataagccacatcgcccagcagttgggactggaaaaagacgtcgttagggtctggttctgcaataggcgacagaaggggaagcgctccagttccgactacgcacagcgagaggattttgaggcggcaggctcccctttcagtggcggaccagtgagctttcctctcgcccccggtccccattttggtacccctggttacggctcgccacactttaccgcactctatagcagtgttccttttcccgaaggtgaagcctttcccccagtctccgtaaccacactcggaagtccaatgcactccaac

SEQ ID NO: 130970 - DNA, 1080 bp, Artificial Sequence
  derived and/or modified sequence
atggctgggcacctagctagtgactttgcgttcagccctccaccagggggggggggggatggtcccgggggccccgagcctggatgggtggatccgagaacatggttgtctttccagggacccccagggggcccagggataggcccaggcgtggggcccggaagtgaagtgtggggcattcccccctgccccccgccctacgaattttgcggcggaatggcttactgtggcccacaagttggcgtggggctcgtgcctcagggggggcttgaaacatctcagcctgagggagaggctggagtgggagtggagtccaattcagatggcgctagccccgagccatgtaccgtgacccccggagctgtgaagttagaaaaagaaaagctggagcagaaccctgaagaaagtcaggatatcaaagcgttacagaaggagcttgagcagttcgccaagctcctgaaacagaagcgaattactctgggctacacacaggcagacgtgggcctcaccctcggggtgctgtttgggaaagtgttttcgcaaactacaatctgcagattcgaggccctgcagttgtccttcaagaacatgtgtaaactgaggcctttgttgcaaaaatgggtggaggaagccgacaacaatgagaatctgcaggagatctgtaaggctgagacgctcgttcaggccagaaaaaggaagcgcacttccatcgaaaaccgcgtccgagggaatttagagaatttgttccttcagtgtccaaaacccactcttcagcagatttcacatatcgcccagcagctgggcttggaaaaagatgtagtcagagtgtggttctgcaatcgcaggcagaagggcaaacgaagcagctccgattacgcacaacgcgaagatttcgaggccgcaggttctcctttttcgggcggccctgtcagcttccctctcgcccctgggccccattttggaacccccggctatgggtcccctcacttcaccgcactatattcaagcgtgcccttccccgagggcgaggcatttccgcccgtctctgtcactactctcgggagcccaatgcactcaaat

SEQ ID NO: 130971 - DNA, 1080 bp, Artificial Sequence
  derived and/or modified sequence
atggccggacacctcgcctctgatttcgccttctcgcccccgccaggcgggggaggagatggccccggaggtccggaaccaggctgggtggacccacgaacctggctgagcttccaaggtccgccgggaggcccgggaatcggaccaggagttggtccgggatcggaagtgtggggcatcccaccgtgcccaccgccgtacgagttctgcggagggatggcttactgtggaccccaggtgggtgtgggactggtgcctcaaggcggactggagactagccagccggaaggagaggccggagtgggcgtcgaaagcaactcagacggagcatcgcctgaaccatgtaccgtgactccgggagccgtcaaactggagaaggagaaattggagcaaaaccctgaggagtcgcaggatatcaaggcgcttcaaaaggagctggagcagttcgcaaaacttctgaagcagaagcgcatcactctgggctacacccaagcagacgtgggcctgactctcggcgtgctctttgggaaagtctttagccagactaccatttgcagatttgaagctctccaactctcatttaaaaacatgtgcaaactgcggccgctgctccagaagtgggtggaagaggcggacaacaacgagaatctccaggaaatttgcaaggccgaaaccctggtgcaagcacggaagagaaagcggaccagcatcgagaatcgcgtgaggggaaacttggaaaatctgttccttcagtgtccgaagcctacgctgcaacagatcagccatatcgcgcagcagctgggcctggaaaaggacgtcgttagggtctggttctgcaatcgccggcagaagggaaagagatcctcctcagactatgcccagcgcgaagatttcgaagccgctggatccccgttctcgggtgggcctgtctcgttcccattggcgcctggtccgcactttgggacccccgggtacgggtcgcctcatttcacggctctgtactcctccgtgcctttccccgaaggagaagcgttcccgccagtctccgtgactaccctcggatcaccaatgcactcaaac

SEQ ID NO: 130972 - DNA, 1080 bp, Artificial Sequence
  derived and/or modified sequence
atggcaggccacctcgcgagcgacttcgctttcagcccgcctcccggtggtggcggcgacggcccgggcgggccggagcctggttgggttgacccccggacttggctttcgttccagggccctccgggtggcccaggtattggccctggggtcggacctggttccgaggtctggggtattcccccttgccctccaccctatgaattctgcggtggtatggcctactgcggtcctcaagtcggcgtcggcttggtcccacagggtgggctggagacctcccaacccgagggtgaggccggtgtgggtgtcgaatccaactccgatggagcttcacccgaaccttgtactgtcacccccggcgccgtcaagctggagaaggagaagctcgaacagaatcccgaagagtcccaggacatcaaggcgctgcagaaagagcttgagcagttcgccaagctgctcaagcagaagcgtatcacactgggatacacccaggccgacgtcggactgaccttgggagtgctctttggcaaggtcttctctcaaaccacaatctgcagattcgaagccttgcagctctcattcaagaacatgtgcaagctccgccccttgcttcagaagtgggtggaggaggccgacaacaacgagaatttacaagagatctgtaaggcggaaaccttggttcaggcccgcaaaagaaagcgaacatccatcgagaacagagtgcgcggcaacctggagaacctgttcttacagtgccctaagcccaccctgcagcagatctcgcatatcgcgcagcagttgggactggaaaaggatgtcgtgcgtgtgtggttctgtaaccggcgtcagaagggtaaacgctcgtcttctgattacgctcagcgagaggatttcgaggctgcgggctcgcccttttccggcggtccagtctctttccccctggcgcccggcccgcacttcggcaccccgggatatggcagtcctcatttcacagccctctactcgagcgtcccgttcccggagggcgaggccttcccccccgtttccgtcacaactctcggttcccctatgcattcgaac

SEQ ID NO: 130973 - DNA, 1080 bp, Artificial Sequence
  derived and/or modified sequence
atggcagggcacctggcatcggacttcgcgtttagccctccgccgggaggcggcggagatgggccgggcggccctgaaccgggttgggtcgatccacggacttggctttcttttcaggggccgcctggcggaccgggaatcggaccaggggtggggccgggatccgaggtgtggggaatccccccgtgcccacccccgtacgaattctgcgggggaatggcctactgcgggccccaggtgggagtgggcttggtcccgcaaggaggcctggaaacttcccagccggagggcgaggctggcgtcggagtggaaagcaactcagatggcgcttcaccagagccctgcactgtgactcctggagccgtgaagctggaaaaggaaaagctcgagcagaatccggaagaaagccaggatatcaaggcactgcagaaggagttggagcagttcgccaaactgctgaagcagaaaagaatcactctgggatacactcaggcggacgtgggactgacccttggagtgctgtttggaaaggtgttctcgcaaaccactatctgcagattcgaggccctccagctgtcgttcaaaaacatgtgtaagctgcggccgctcctgcaaaagtgggtggaagaagcggataacaacgaaaatctccaggaaatttgtaaggccgaaactcttgtgcaggcacgcaagagaaaacggacgagcatcgaaaaccgggtgcgcggcaacctcgagaacctgttcctccaatgcccgaagccgacgctccagcaaattagccacatcgcgcaacagctgggccttgaaaaggatgtcgtccgtgtgtggttctgtaataggagacagaagggcaagaggtcatcctccgattacgcccagcgcgaagattttgaggcggccgggtcgcctttctctggagggccggtgtcttttccgctcgctccgggaccacatttcggaactccaggatacggatcacctcacttcaccgccctgtattcctccgtgccgttccccgaaggagaggccttcccgccagtgtcggtcacgactctgggttccccgatgcattccaat

SEQ ID NO: 130974 - DNA, 1080 bp, Artificial Sequence
  derived and/or modified sequence
atggctgggcatctcgcgagcgatttcgcattctccccgccaccgggtggagggggagatggccctggaggaccagaaccaggatgggtggatccgcgcacttggctctctttccagggaccgccgggagggccggggatcggaccaggagtgggaccgggatcagaggtatggggcatcccgccatgcccgccaccgtacgagttctgtggaggaatggcttactgcggacctcaggtgggagtcggtctggtgccccagggagggctggagacgtcccagccagaaggagaggcgggagtgggagtggagagcaactcggacggagcaagcccggagccctgcaccgtgactccgggagccgttaagctcgaaaaagagaagttggagcaaaaccctgaggaatcacaggacatcaaggccctgcagaaggagctggaacagttcgcaaagctgctgaaacaaaagaggatcacccttggatacacccaggcagatgtcggactgactctgggcgtgctgtttgggaaggtgttctcccaaactactatctgcagattcgaggcgctccaactctcgttcaagaacatgtgcaagctcagaccactgctccagaagtgggtggaagaagccgacaacaatgaaaaccttcaagaaatctgcaaggctgaaaccctggtccaagcaagaaagcggaaacgcacttcgatcgaaaaccgcgtgagaggaaacctcgaaaatctgttcctgcagtgcccaaagcctaccctccagcagattagccacatcgcccaacaactgggtctggagaaggacgtcgtgagggtgtggttttgcaatagacgccagaagggcaagcgttcctcgagcgactacgcccagcgcgaggatttcgaagccgcgggatccccattctcaggcgggccggtgtcattcccccttgccccaggcccgcacttcggaactccgggttatggctcccctcacttcaccgctctgtactcgtcggtgccattcccggagggagaagcattcccacctgtgagcgtgactaccctggggtcacctatgcactccaac

SEQ ID NO: 130975 - DNA, 1080 bp, Artificial Sequence
  derived and/or modified sequence
atggctggccacctggcctctgacttcgctttttctcccccgccagggggtggcggggacgggcccggaggtcccgagccaggctgggtcgaccctcgcacctggttaagtttccaaggcccaccaggtggccctggtatcggccctggtgtggggcctggctccgaggtgtgggggatccccccctgcccgcctccctatgagttttgtggaggtatggcatattgtgggccccaggtgggggttgggctggttccccagggagggctcgaaacctctcagcccgagggagaggcaggcgtgggggtcgagtccaattccgacggggcctcacccgaaccatgtacagttacccccggcgccgtgaaactggagaaagaaaaactcgaacagaaccccgaagaaagtcaggacattaaggccctgcaaaaagagctggaacagttcgccaaactcctgaagcagaagcgcatcactctcggttacacgcaggctgatgtgggattgactctcggagtcctgttcgggaaggtatttagtcaaaccaccatttgccgattcgaggcattacagctgagcttcaaaaacatgtgcaagctgagaccactgctacaaaaatgggtggaagaagcggacaataatgaaaatctgcaagagatctgcaaggcagagacccttgtgcaggctcggaaaagaaaacgtacaagcatcgagaaccgggtccgtggtaacttggagaatctgttcctgcagtgccccaaaccaaccctgcagcagataagtcatatcgcacagcagctaggcctagaaaaggatgtggtgcgagtgtggttctgcaaccggagacagaaggggaaacggtcatcctctgactacgctcagcgcgaagactttgaggccgcagggagtccttttagtgggggcccggtgagttttccactcgcgcccgggccacacttcggaaccccagggtacggcagccctcacttcaccgccctgtacagcagtgtgccatttcccgaaggagaagcttttcctccagtgtctgtaaccaccctcggcagtcctatgcactctaat

SEQ ID NO: 130976 - DNA, 1080 bp, Artificial Sequence
  derived and/or modified sequence
atggccggtcacctcgctagcgattttgctttctcacctccccctggcgggggtggcgatggcccggggggtccagaacctggatgggtggacccaaggacttggctcagttttcagggcccacccggaggacccggcatcggcccaggcgtgggtcctgggtccgaggtgtgggggatccctccttgtcctcctccgtacgaattctgtggggggatggcatattgtgggccacaggtgggggtgggattggtgcctcaggggggcctagaaacttcccagcctgagggcgaggcgggagttggagttgagagcaattctgacggagcgagtccagagccttgcacagtcaccccaggggctgtgaagttggagaaggagaagctggagcaaaatcccgaggaaagccaggatatcaaggccctgcagaaggagctcgagcagtttgccaagctgctgaaacaaaaacgaattacactagggtacacccaagccgatgtgggtctaactctgggcgtgctgtttggtaaagtgttcagccaaactacgatttgtagattcgaggcgttgcaactgtctttcaaaaacatgtgtaagctgcggcccttactacagaaatgggtggaggaggctgataataatgaaaatctacaagaaatctgtaaagcagaaacgttggttcaagcaaggaagagaaagaggacaagcatcgaaaaccgcgtcagggggaatctggaaaacttattccttcaatgcccaaaacctaccctgcaacagattagtcacatcgcgcagcaattaggcctcgagaaggatgtggtcagagtgtggttctgcaacaggcgccaaaagggtaaacggagctcctctgattatgcacagcgggaagattttgaagctgccggatctccgttcagtgggggacccgtcagttttccgttggcccccggcccgcatttcggcactcccggctatggtagcccacatttcacggctctctactctagcgtgcccttccctgagggcgaagcgtttcctccagtctcagtaaccacccttgggagtccaatgcactcgaat

SEQ ID NO: 130977 - DNA, 1080 bp, Artificial Sequence
  derived and/or modified sequence
atggcgggccatcttgcttccgacttcgctttcagcccgccgccaggaggagggggcgatggacctgggggaccagaacctggatgggtggacccgagaacctggctctccttccagggacctccgggcgggccaggaatcggaccaggagtgggaccgggctcagaagtctggggaatcccgccgtgccctccaccttatgagttttgtggtggaatggcttactgtggaccccaggtcggcgtcggccttgtgccacagggaggcctggaaacttcccaacctgagggtgaagcgggcgtgggggtggagagcaactcggacggtgcctcccccgaaccgtgcaccgtgactccgggagccgtgaagctggaaaaagaaaagctcgagcaaaacccggaagaatcccaagatatcaaggctctgcagaaggagttggagcagtttgccaagctcctcaagcaaaaacggatcactctgggctacacccaggccgatgtcgggttgacgcttggagtccttttcggcaaggtgttcagccaaaccacgatctgcagattcgaagccctccaactgtctttcaaaaacatgtgcaagctgcgtcccctgctgcagaagtgggtggaggaagccgacaataacgaaaacctgcaggaaatctgtaaggccgagactctcgtccaggcacggaagcgcaagagaaccagcatcgaaaatcgcgtgagggggaacctcgaaaacctgttccttcaatgcccgaagcctactcttcagcagatctcgcatatcgcccaacaactgggactggaaaaggacgtggtgcgggtctggttctgcaaccggaggcagaagggcaaacggtcaagctccgattacgcgcagcgcgaggacttcgaagcagcgggcagccctttcagcggcggacccgtcagcttcccgctggctccaggaccgcatttcggaactccaggctacggatcgccgcattttactgcgctgtactcatccgttccttttccggaaggggaagcattccctccagtgagcgtgaccactctgggctcccctatgcacagcaat

SEQ ID NO: 130978 - DNA, 1080 bp, Artificial Sequence
  derived and/or modified sequence
atggccggacatcttgcatcggattttgccttttctcccccaccaggaggaggcggagatggtcccggtggacctgaaccaggttgggtggatcctcgaacttggctctcgttccaaggacccccgggcggacctggaattggaccaggcgtgggtcctggctccgaagtatggggtatcccaccatgtcctcctccttatgagttttgtggtggaatggcatactgcgggcctcaagtgggtgttggcctcgttccacaaggtgggttggaaacgagccaaccggaaggtgaagcaggcgtcggagtcgaatccaactcggatggagcgagtcctgagccatgcaccgtgaccccaggagccgtaaaactggaaaaggaaaagttggagcagaacccagaagaaagccaagacattaaagcccttcaaaaggaactggagcaatttgctaagctcctcaaacagaaaagaataactctggggtacactcaggcagatgtgggtctgactcttggggtgctctttgggaaggtgttctcgcagaccactatctgtaggtttgaggcattgcaactttccttcaaaaacatgtgcaagctcagaccattgctgcagaagtgggtggaggaggccgacaataatgaaaaccttcaagagatctgtaaggcagaaaccctggttcaagcacggaagagaaaacgcacttcgattgaaaacagagtgcggggtaacctcgaaaaccttttcctccagtgtcccaagccgaccctgcagcaaatttcgcatattgctcagcagctgggtcttgagaaggatgtggtccgcgtgtggttttgtaatcgtaggcagaagggtaaacgatcttcgagtgactacgcgcagcgcgaggactttgaggcagcagggtccccgttctccggaggacccgtcagctttccactggcgcccggtcctcacttcggcacccccggctacggatcccctcattttacggcactgtactcatccgtccccttccctgaaggagaagcgtttccgcccgtgtcagtgacgacccttgggagccctatgcacagtaat

SEQ ID NO: 130979 - DNA, 1080 bp, Artificial Sequence
  derived and/or modified sequence
atggctggacatctggccagtgatttcgccttcagtccaccaccgggaggggggggagacggaccaggggggcccgaacctggttgggtcgatcctcgaacctggctttcattccagggaccacctgggggacccggtatcggccccggagttggacctggctccgaagtgtgggggattcctccatgccctccaccatacgagttctgtggtgggatggcctattgcggacctcaagtcggagtgggcctagtgccccagggggggttagagacatctcagcctgagggagaagcgggcgtgggagtggaatccaactctgacggagcatcacctgagccttgcactgtgacgcccggagccgtcaagctggagaaagaaaaactggagcagaatcccgaagagtcacaggacattaaggccctacaaaaagaactcgagcagttcgccaagctgctaaagcaaaaacgcatcactcttgggtatactcaggccgacgtgggactgacactaggtgtgctcttcggcaaggtgtttagccagaccacgatttgcaggtttgaggccttgcaacttagtttcaaaaacatgtgtaagttgagaccacttctgcagaagtgggttgaagaggccgataataatgaaaacctccaagagatttgtaaagctgaaaccctggtgcaggccagaaagagaaaaagaactagcattgaaaacagagtgcgagggaatctagaaaacctttttttacaatgtcccaagcctaccctccagcagataagccacattgcacaacaactggggctggagaaggacgtggtgcgagtatggttctgcaacagaaggcagaagggtaagcgaagctctagtgattacgcacagcgagaggactttgaagctgctggctcacccttctcaggcggacccgtgagctttccactggccccgggcccccacttcgggacaccaggatatgggtcccctcactttacagctttgtactctagtgtgccttttccagagggtgaagcctttccccccgtgtcagttaccacgctcggatccccaatgcactcaaac

SEQ ID NO: 130980 - DNA, 1080 bp, Artificial Sequence
  derived and/or modified sequence
atggccggccatttggccagtgatttcgcttttagtcccccccctggtggggggggcgatggtcccggagggcccgaaccaggatgggtcgatccacgcacctggctctcttttcaaggaccccccggagggccaggaatagggccaggcgtaggaccaggctccgaggtttggggtattccaccgtgcccacccccgtacgagttctgcggagggatggcatattgcggaccgcaagtcggagtgggacttgtccctcaaggtggactcgaaactagccagccagagggagaagcgggggtaggcgtggaatccaactcagacggcgcctcacctgaaccatgtaccgtcacacccggtgccgtgaagcttgagaaagagaagctggaacagaatccagaggaatcccaggatattaaagcactccagaaagagctggagcagtttgcgaagctgctcaagcagaagcggatcaccctcggctacacccaggcggatgtgggtcttacccttggggtgctgtttggcaaggtgtttagccagacaacgatttgtaggtttgaggccttgcagctctcctttaaaaacatgtgtaagcttcgccccttgctgcagaaatgggtcgaggaagccgacaataatgagaacctgcaggagatttgcaaggccgaaactctggtccaagccaggaagagaaagcggactagcatcgaaaatagagtacgaggcaacctcgaaaatcttttcctgcagtgcccgaaaccaactttgcagcagatcagtcacattgcccagcagctgggcttggaaaaggacgtcgttagagtctggttttgcaatcgccggcagaaagggaagaggtcttcctcagactatgctcagcgcgaagacttcgaagccgccggctctccgttttccggcggcccagtgagtttcccactcgcgcccggtcctcactttggaacgccaggatatggctcaccacatttcacggcgttgtactcctcagtaccctttccggagggagaagcctttccgcctgtgagtgtcaccacactcgggtctcctatgcattctaac

SEQ ID NO: 130981 - DNA, 1080 bp, Artificial Sequence
  derived and/or modified sequence
atggccggacatctcgcatctgactttgcattctctcctccaccgggaggtggaggggacggaccaggaggtccagaacctggttgggtggaccccaggacctggctgagctttcaaggtcccccagggggtccagggattggaccgggcgtgggccctggatctgaagtctggggcattcccccgtgtcccccaccttacgaattttgtggaggcatggcttactgcggtccgcaagtgggcgttggcctggtcccacaaggaggtcttgaaaccagtcagccagagggagaggctggtgtgggtgtcgaatccaatagcgacggtgcctcgccagagccttgcactgtgacccctggggcagtgaaacttgagaaggaaaagctggaacaaaaccccgaagaatcccaggacataaaggcactccagaaggaactggagcaatttgcaaaattgctgaaacagaagcgtattaccctgggttacactcaggcagacgtaggtcttaccctgggtgtgcttttcggaaaggtgttttcccaaactaccatctgtcggtttgaagcgctgcaattgtcgttcaagaacatgtgcaaactcaggccactgctccaaaagtgggtggaggaagctgacaataacgaaaatcttcaagagatttgtaaggcggaaaccctcgtccaggcaagaaagagaaaacgaacgtccattgaaaacagagtccggggcaatctggagaacctgttccttcagtgtcctaaacctaccttgcagcagatttcacacatcgcccagcagctgggactcgagaaggatgtcgtgcgagtgtggttttgcaatcgtcggcaaaagggcaagagaagctcctcggactatgcccagcgcgaagattttgaagcagcgggttccccattttcggggggtcctgtttccttccccctggcaccagggccgcactttggtactcccggttacgggagcccccatttcacggctctctactcatcggtcccatttccagaaggtgaggcatttcctccagtgtccgtcaccactcttgggagccccatgcactcgaat

SEQ ID NO: 130982 - DNA, 1080 bp, Artificial Sequence
  derived and/or modified sequence
atggctggacatctggcatctgatttcgctttcagtccaccacctggcggtggcggggacggtccaggtggacccgagcctggctgggtggacccgagaacctggttgtcttttcaaggcccccccgggggccctggaatcggcccgggagtcggacccggatcggaggtatgggggatcccaccctgcccccccccctacgagttctgtggaggtatggcttactgcggaccacaggtgggcgtcggccttgtgccccagggcggtctggaaacaagtcagccagagggcgaagcaggggtgggcgtggagagcaactccgatggcgctagccccgagccatgcactgtaacccccggcgccgtgaaactggaaaaagaaaaactagagcaaaacccagaagagtcccaagacataaaagctctgcagaaagaactcgagcagtttgctaagctgctgaaacagaaacgcatcacattgggttacacccaggccgatgttggcctcactctgggggtgctgttcggcaaggtcttttcacagacaacaatctgccgattcgaggctctgcagttatcattcaagaatatgtgtaagctgcgaccactcttgcagaagtgggtggaagaagccgataacaacgaaaaccttcaagagatatgcaaagctgagacactcgtgcaggctcgcaaacgcaagcgtaccagtatagagaatagggtgcgggggaaccttgagaacctctttcttcaatgccccaaacctactctgcagcagatttcacacatagcacagcagctcggactggaaaaagatgtagtgagggtgtggttttgtaatcggagacagaaagggaagaggtcttctagcgactacgcccagagggaagattttgaagccgccgggagtccattttccgggggccccgtttctttccccctggcaccaggacctcatttcgggacccccggctacggatcccctcacttcacggcactgtatagctccgtcccttttcctgagggcgaggcttttccgcctgtctcagtgacaactcttggttcccccatgcacagcaac

SEQ ID NO: 130983 - DNA, 1080 bp, Artificial Sequence
  derived and/or modified sequence
atggcaggtcatcttgcatccgattttgcgtttagcccacctcccggaggtggcggggatggaccgggaggaccagagcctggttgggtggacccaagaacctggctctcatttcaaggtcctcctggcgggccgggtatcggacctggcgtggggccggggagcgaagtgtggggcatcccgccttgccccccaccttacgaattttgtggagggatggcatactgtggaccacaagtcggagtgggacttgtgccacaaggcggactcgaaacctcgcagcccgagggcgaagcgggtgtgggagtggagtcaaacagcgatggggcatcaccagaaccctgtactgttacgcctggagccgtgaaacttgaaaaggagaaacttgagcagaaccccgaggaatcccaggacataaaggcactgcagaaggagctggaacagtttgccaaattgctcaaacaaaagcggattacgctcgggtacactcaggcagatgtgggacttactctgggcgtgctgtttggtaaggttttcagccagacgactatttgtcgatttgaggcactgcaactctcgttcaagaacatgtgcaaacttcgaccacttcttcagaaatgggtggaagaagctgataacaatgagaatctgcaagaaatctgcaaggccgaaactctcgtgcaagcccgcaagcggaagagaacttcaatcgaaaacagggtcaggggaaacctcgagaatcttttccttcagtgtccaaagcctactctgcagcaaatttcgcatatcgcacaacagttgggccttgaaaaggacgtcgttagggtgtggttttgtaatcgccgccaaaagggtaagcgctcatcgtccgactacgcgcagcgggaggatttcgaggctgccggctcgcccttttccggcgggcctgtgtcctttccgcttgcacccgggccgcatttcgggactccaggttacggatccccccattttaccgcactctactcgtcggtgccgttcccagaaggtgaagcgtttccaccagtctcagtcactaccctcggtagccctatgcactccaac

SEQ ID NO: 130984 - DNA, 1080 bp, Artificial Sequence
  derived and/or modified sequence
atggctggacacctggcatccgatttcgcattcagcccgcccccgggcggcggaggagacggacctggcggaccggagccgggatgggtggatccccggacttggctgtcgttccagggacctccaggaggccctggaattggtcctggagtgggacctgggagcgaggtgtggggaatcccgccttgcccgccgccttacgaattttgcggggggatggcctattgcggaccccaggtgggagtgggactcgtccctcagggagggcttgagacttcgcagccggagggggaagcgggagtcggagtcgaatcgaactcagatggagccagcccagaaccgtgtacggtgactccaggggctgtcaaacttgaaaaggagaaactcgaacagaacccagaagaatcccaggacatcaaagccttgcagaaggagcttgaacaattcgcgaagctcttgaagcaaaaaaggatcacgttgggctacacccaagccgacgtgggactgaccctgggagtgctctttgggaaggtgttctcccagactactatctgccggtttgaggcactccagctgtcgtttaagaacatgtgcaaactgcggccactcctgcagaagtgggtggaagaggccgacaataacgaaaatctccaggagatctgtaaagctgaaaccttggtgcaagctagaaagagaaaacgaacctcaatcgagaaccgggtgaggggaaatctcgaaaatcttttcctgcagtgccctaaaccgaccctccaacaaatttcacatatcgcacaacaactgggtctggagaaggacgtagtgagagtgtggttttgcaaccgccgccagaaggggaagagatcaagctcagactatgcccaaagagaggatttcgaagccgcaggttcgcctttctccggtgggccggtcagtttcccattggccccgggtccgcattttggcaccccgggatatggcagccctcacttcactgccttgtactcctctgtccccttcccggaaggagaagccttcccgccggtgtcagttaccacgttgggctcgccgatgcactcaaac

SEQ ID NO: 130985 - DNA, 1080 bp, Artificial Sequence
  derived and/or modified sequence
atggctggacatcttgctagtgattttgctttctcaccaccacctggaggaggcggtgatggaccaggtggtccagaaccaggatgggtagatccaagaacttggctttcattccaaggaccgccaggaggaccgggtattggaccaggcgtaggtccgggatctgaagtttggggtattccaccatgcccacctccgtacgagttttgcggaggaatggcttattgtggcccacaagtgggcgtcggacttgtgccacaaggaggcttagaaactagtcaaccagagggagaagctggagttggagtggagtcaaattctgacggtgcctctccagagccatgtactgttacgccaggggcagttaagcttgaaaaagaaaaattggaacaaaatccagaggaatcccaagatataaaggctcttcaaaaagaattagagcaatttgccaaattgctcaagcaaaaaagaattacacttggttatacacaagctgacgtaggactaactctgggcgtgctctttggaaaagtcttctctcaaacaacgatctgcagattcgaagcactccagctttctttcaaaaacatgtgtaaacttcggcccctgttgcaaaaatgggtggaggaagcagataataacgaaaatcttcaggaaatctgtaaagcagaaacgctggtgcaggctagaaaacgaaagcgaacatccatcgaaaatagggttagaggaaacctcgagaatctgttcttgcagtgccctaaacccacactgcaacagattagtcacattgctcaacagttgggacttgaaaaggacgttgttagagtctggttctgcaatcggcgacaaaaaggcaaaagatcttcctctgattatgctcaaagggaggattttgaggctgctggttcgccattcagtggagggccggtttcgttcccactggcgccaggaccgcatttcggtacgcctgggtatgggtcgccacacttcacggcgctatactcctctgttccattcccggaaggagaggctttcccgccagtgtcagtgacaactctcggaagtccgatgcacagcaac

SEQ ID NO: 130986 - DNA, 1080 bp, Artificial Sequence
  derived and/or modified sequence
atggctggacacttggcttctgactttgcattctcgccaccaccaggcgggggcggagacgggcctggaggccccgaacctggctgggtagatccgaggacttggctcagcttccagggaccaccaggtggccccggaattggacctggagtagggcccggctctgaagtgtggggcatcccaccctgtcctcccccttacgaattctgcggaggaatggcctactgtggccctcaggtgggagtgggcctggtgcctcagggtggactggaaacttctcaacccgagggcgaggcaggcgttggagttgagagcaactctgatggagccagtcccgagccatgtacagtcactcctggagctgtcaagctcgagaaagaaaagctggaacagaatcctgaagaatcccaggacatcaaagcattacagaaagaactagaacaatttgctaagctcctcaagcaaaagagaatcactcttggctatacccaggcggatgttggactgactctgggcgtattgtttggaaaagtgttcagccagacaacaatctgcagatttgaagctcttcagctgagtttcaagaacatgtgtaagttacggccgctgctgcagaaatgggttgaggaagctgacaacaacgaaaacctgcaggagatctgtaaggctgaaactttagttcaggctcgcaagaggaagaggacaagcatagaaaacagggtgaggggcaacctcgaaaacctgttcctgcaatgtcctaaacccacattgcaacagatctcacatatcgcgcagcagctgggactggagaaagatgtcgtgcgcgtttggttctgcaaccgccgtcaaaagggcaaacggtctagctctgattacgcccaaagggaggacttcgaagctgccgggagtccattttccggaggacccgtttcctttcccctggcccctgggccacacttcggcacccccggatatgggagtcctcacttcactgccctgtatagctccgtgccctttccggagggagaggcttttcctcccgtgtcagtgacaacgttgggcagccctatgcactctaat

SEQ ID NO: 130987 - DNA, 1080 bp, Artificial Sequence
  derived and/or modified sequence
atggctgggcatctcgcttcggacttcgccttttccccgccaccaggaggaggcggagacggcccagggggcccagaaccggggtgggtggaccctagaacgtggctgtccttccaaggacccccgggtggccctgggatcggacctggagtgggaccgggatctgaagtctggggaatccctccctgcccgcctccttacgaattctgcggtggtatggcgtactgtggaccgcaggttggggtgggcctggtgccacagggcggactggaaacctcccagccggaaggcgaagccggcgtgggggtggaatctaactccgatggcgccagcccggagccgtgtaccgtcactccaggggcagtgaagttggagaaagagaagctggagcagaatccggaggagtcacaggacatcaaggcgcttcaaaaagaactggagcaattcgctaagctgctcaaacagaaacgaatcactctgggttacactcaggccgatgtgggactgaccctgggcgtgctgtttggaaaggtgttctcacaaaccactatttgccgcttcgaagctctccaactcagctttaagaatatgtgcaagctgcgtccgctgttgcagaagtgggtggaagaagctgacaacaatgagaaccttcaagagatctgtaaggcggagactctggtgcaagcgaggaagcggaagaggacctccatcgaaaaccgggtgagaggcaatctggaaaacttgtttcttcagtgcccaaaaccgaccctccaacagattagccacatcgctcagcaattgggactggaaaaagatgttgtccgggtttggttctgtaaccgccgccaaaagggaaagcgctcgtcgtcagactacgcccagagagaagatttcgaagccgccggtagccccttctccggagggccagtgtccttcccgcttgccccgggaccccatttcgggaccccgggttatgggtcgccacacttcacggcgttgtactcatctgtgccatttcccgagggtgaggcgttccctcccgtctccgttactactctgggtagcccgatgcactcgaac

SEQ ID NO: 130988 - DNA, 1080 bp, Artificial Sequence
  derived and/or modified sequence
atggcgggccatctggctagcgactttgcgttctcaccgccaccaggaggtggcggggacgggccgggcggaccggagccagggtgggtggacccacgtacctggctgtccttccaaggaccgccaggaggaccgggtattggcccgggtgtgggtccggggtcggaagtgtgggggatcccaccgtgcccgcctccttacgaattttgtggaggcatggcatattgcggaccgcaggtgggagtgggattggtaccgcagggaggcttggaaactagccagccagagggtgaagcgggagtgggtgtagaatccaattccgacggagcttccccagaaccctgcaccgtgacgccaggtgccgtgaagctggaaaaggaaaaactcgaacaaaatcccgaggaatcacaagatatcaaagcgctccagaaggaactcgaacaattcgctaaacttctgaagcagaagcggatcacccttggctacacccaagcggatgttggccttactctgggggtgctgttcggaaaggtgttttcgcagaccaccatttgccgcttcgaggccctgcagttgtcgtttaagaatatgtgcaagctgcgcccgctgcttcagaaatgggtcgaggaagcggataacaatgaaaacttgcaagagatttgtaaggccgagactctggtgcaggctcggaagcggaagagaacttccatcgaaaacagagtgagaggaaacctggagaacctgttcctccagtgtccgaagccgaccctccaacaaatcagccacatcgcacagcagctgggactggagaaagacgtcgtgagagtgtggttttgcaatcgccgacagaagggaaaacggtcctccagcgactacgcacagcgcgaggatttcgaggctgccggaagcccgttcagcggcggaccggttagcttcccgctggccccgggaccccatttcggaaccccaggatacggatctccccactttacggccctgtactcgagcgttccattcccggagggagaagcctttccacccgtctcggtcactaccctcgggtccccgatgcacagcaac

SEQ ID NO: 130989 - DNA, 1080 bp, Artificial Sequence
  derived and/or modified sequence
atggccgggcatctcgcgagcgattttgccttctctccaccaccagggggtggaggagatggtcctggaggtccggaaccgggatgggtcgatccacgtacctggctctccttccagggtccacccggaggtcccggaattgggccaggggtgggacctggatcggaagtgtggggaatacctccatgtccaccaccgtacgaattttgtggcggcatggcttactgtggaccacaagtgggagtgggcttggtgccacaaggaggactggaaacctcgcaacctgaaggcgaggcaggagtgggagtcgaatccaatagcgacggtgcatcccctgagccatgcacggtgaccccaggtgcggtgaaacttgaaaaagagaagctggaacagaatccagaagagagtcaggatatcaaggcacttcaaaaagaactcgaacagtttgcaaagttgctcaagcaaaaaagaatcacgctgggatacactcaggcagatgtgggtctgactctcggagtcctgtttggtaaagtgttctcacagaccaccatttgtagatttgaggcattgcagctgagctttaagaatatgtgcaagctcaggcccctgcttcagaagtgggtggaagaagctgacaacaacgaaaacctgcaggagatttgtaaagctgaaaccctggtccaagcacgcaagcgcaaaaggacttcaattgagaaccgggtcagagggaatctggagaacctctttctccagtgccctaagcctaccttgcaacaaatttcccatatcgcacaacagctggggttggaaaaggatgtggtgcgtgtctggttctgtaaccgccgtcagaaggggaagcgatcgtcatccgactacgcacaacgggaagattttgaggcggcaggatcaccattttcgggtggcccagtgagcttcccattggcgcctggacctcactttggcaccccaggctatggctcgcctcatttcaccgctctgtactcgtcagtcccatttcctgagggcgaggcctttcctcccgtgtccgtgacgaccctcggatccccgatgcattcgaac

SEQ ID NO: 130990 - DNA, 1080 bp, Artificial Sequence
  derived and/or modified sequence
atggcaggacacctggccagcgacttcgcctttagccctcctccgggagggggaggagatgggcccggagggccggagccaggttgggtggacccgagaacttggctgtccttccagggcccaccgggcggacctgggatcggccctggagtcggcccgggatcggaagtgtggggaattccgccatgtccgccaccgtatgaattctgcgggggaatggcttactgcggcccgcaagtcggtgtgggcctggtcccgcagggaggactggaaacctctcagcctgaaggggaggcgggagtgggagtggaatcgaactcggacggagcatcgccagaaccctgcaccgtcactccgggcgccgtgaaactggaaaaggagaagctcgagcagaacccggaagaatcacaggatatcaaggcccttcaaaaggagctggaacaatttgcgaaactgttgaagcagaaaagaatcaccctgggttacacccaggccgacgtcggactgactctgggggtgctgttcggaaaagtgttttcgcagaccacgatctgccgattcgaagcactgcaactctcttttaagaatatgtgcaaactgcgcccgctgctgcaaaagtgggtggaggaggccgacaacaatgagaacctgcaggagatttgtaaggcggaaaccctggtgcaagcacgcaagagaaagcggactagtatcgagaaccgggtgagaggaaacttggaaaacctgttcttgcagtgccctaaaccaactctccagcaaatcagccacatcgcccagcagctcggcctggaaaaagacgtggtgagagtctggttttgcaatcgacgccagaaggggaagaggtccagctcagactatgcgcagcgtgaggacttcgaggccgccgggtcgccattctcaggtggcccggtgtcattcccactcgccccaggaccgcacttcggcacccccggctacgggtcaccgcatttcactgctctgtacagctcggtgcccttccctgaaggagaagcgtttccgcccgtgtccgtgactactttgggatctccaatgcattcgaat

SEQ ID NO: 130991 - DNA, 1080 bp, Artificial Sequence
  derived and/or modified sequence
atggcggggcacctggcttccgacttcgctttttcgcctcctccgggtggcgggggcgacggccccggtggaccggaacctggttgggtcgacccaagaacctggctgtcattccaaggaccaccgggcggtccaggaatcggcccgggtgttgggccgggtagcgaggtttggggcattcctccgtgccctccaccatacgagttctgtggcggcatggcttactgcggacctcaggtaggcgtgggcttggttccgcaaggtggcctggagacttcacagccggaaggggaagcgggcgtcggtgtggagagcaacagcgacggagcctctccagagccgtgcacggttacgccgggtgccgttaagttggagaaagaaaagttggaacaaaatcctgaggaaagccaggacattaaagcacttcaaaaggaactagaacagttcgcgaagttgctgaagcagaaacgcatcacattggggtacactcaagcagacgtcggcctgactctcggcgtgttgtttgggaaagtgttttcccaaactaccatttgtcgcttcgaagcgctgcaactgtctttcaagaatatgtgcaagctgcgtcctctgcttcagaaatgggttgaagaagcggacaacaacgagaacctgcaggaaatttgtaaagccgagactctggtgcaggcccggaaacggaaacgcacctcaattgagaaccgcgttagggggaacctggagaacctgttcctgcaatgtcccaagccaaccctgcagcagatttcacatatcgcccagcagcttggcctggagaaggatgtggtgagagtgtggttctgtaaccggaggcaaaaaggcaaaaggagctctagcgactacgctcagcgagaagattttgaagccgctggaagcccgttcagcgggggcccagtaagcttccctctagcccctggtcctcacttcggtacgcctggttatggttcaccacactttaccgctctgtacagttcggtccctttccctgaaggtgaagcctttccaccagtcagcgtgacaacccttggtagtcccatgcatagcaat

SEQ ID NO: 130992 - DNA, 1080 bp, Artificial Sequence
  derived and/or modified sequence
atggccggtcatctggcgagcgacttcgcatttagcccacctcctggcgggggcggggacggccccggcggccctgaaccgggatgggtcgatcctaggacctggttgtcgttccagggaccacccgggggccctggcatcggccccggggtcgggccaggtagtgaggtctgggggatcccaccctgccctcctccatatgaattctgcggaggaatggcatattgcggcccacaggtgggggtcggactggtaccccagggcggcctcgaaacaagtcagcctgagggcgaggccggcgttggcgtcgagagcaacagcgacggcgcttctccagaaccctgcaccgtgacgccgggggccgtgaagctggagaaggagaaacttgaacagaatccggaagaatcccaggatataaaggctctccaaaaggaactggagcaatttgcaaaactactgaaacagaagcggattactctgggttacacccaagccgacgtggggttaaccttgggtgtcttgtttggtaaagtgtttagtcaaacgacgatctgtcggtttgaagctttacagcttagtttcaagaatatgtgcaagctccggccactgcttcagaagtgggtggaagaagccgataataatgagaatctgcaggagatttgtaaggccgaaacactcgtgcaagctcggaaacgtaagcgtacctccatagaaaacagggttaggggtaacttggaaaatctgtttctgcagtgccccaagccaactctgcagcagatatctcatatcgcacagcagcttgggcttgagaaggacgtggtgagggtatggttctgcaatagacggcagaagggtaaacggagttcgagcgactatgctcagcgcgaggattttgaggcagccggaagtccctttagcggaggacccgtatctttccctctcgcacctggaccccatttcgggacccctggctacgggagtcctcattttacagctttgtatagcagtgtcccttttccggaaggtgaagcgttccctcccgtttcggtaaccacactgggaagccccatgcattcgaat

SEQ ID NO: 130993 - DNA, 1080 bp, Artificial Sequence
  derived and/or modified sequence
atggcaggccacctggcatccgactttgctttctcccccccccctggcggaggaggagatggtccaggggggccagagcccggctgggtggacccacggacctggctctcgtttcaaggcccccctggcggaccaggtattggaccaggggtgggcccgggctccgaagtctggggaatcccaccatgccctcccccttacgagttctgcggaggtatggcctattgcggtccgcaggtgggcgtaggtctagtgccacagggcggtctggagacatctcagccggaaggggaggcaggtgttggtgtagagagcaacagcgatggagcgagccccgaaccttgcaccgtgacacccggggctgttaaactcgaaaaggagaaattggaacagaaccctgaggagtctcaagacattaaggccctgcagaaggagttggagcagttcgctaaactgttgaaacagaagcgtatcaccctggggtatacccaggctgatgtcggccttacactgggagtgctattcggcaaagtgttctcccaaacaaccatctgccgatttgaggctcttcagctttcctttaagaatatgtgcaagctgaggccccttctacagaaatgggtggaagaggccgataataatgaaaaccttcaagagatctgtaaggccgagactctcgtccaggcccgcaaacgcaaacgcacctctatcgaaaatagggtgcgaggcaacctggagaatttatttctgcagtgcccaaagcctacactgcaacaaattagccacatagctcagcaactcggcctcgaaaaggacgttgtgcgcgtttggttttgcaaccggcgccagaagggaaaacggtcttcctctgactatgcccagagggaagacttcgaggccgctggctcgcccttctccgggggacctgtgtcattccccctggcccctggcccgcatttcgggactcccggctatggcagcccccactttactgccctatatagtagtgtcccttttcctgaaggcgaagctttccctccagtctccgtgacaactctggggtcacctatgcattctaat

SEQ ID NO: 130994 - DNA, 1080 bp, Artificial Sequence
  derived and/or modified sequence
atggcgggacatctcgcatcagatttcgccttttcgccgcctccaggaggaggaggagacggccctggagggccggaacctggctgggtggacccacgcacgtggctgagcttccagggaccccctggaggaccggggatcggccctggtgtcggaccgggatcagaggtctggggtatccctccatgcccgcctccttacgaattctgcggaggaatggcgtactgcgggcctcaggtgggggtcggactcgtcccccaaggaggccttgaaacgtcgcaaccggaaggtgaggcaggggtcggggtggagagcaattccgacggggcgtcaccggagccatgcactgtgactccgggggccgtcaagctcgaaaaagagaagctggagcagaacccggaagagagccaagatatcaaggccctgcagaaggaactggaacagttcgctaagttgcttaagcagaaaaggataactctcggatacactcaggctgatgtgggtctgactctcggagtgctcttcggaaaggtgttctcccagaccactatctgtaggtttgaggctctccaactgtcgttcaaaaacatgtgtaaactgaggcccctgctgcagaaatgggtcgaggaggccgacaacaacgagaaccttcaagaaatttgcaaggcagaaacgttggtgcaagccagaaaacgcaagcggaccagtatcgagaaccgagtgaggggcaacctggaaaacctgttcctgcagtgcccgaagcccaccctccagcaaatttcacatatcgcccagcaacttggattggagaaggacgtggtccgcgtatggttctgtaaccgcagacagaagggcaagcggtcgtcatccgactatgcccagcgagaggattttgaagctgcaggcagccctttctcaggggggccggtgtcattcccgctggccccgggtccacactttggcacccctggatatggtagcccgcactttactgccctgtactcgagcgtgccttttcctgaaggcgaggcgttccccccagtcagcgtgaccaccctgggttcgccgatgcactccaat

SEQ ID NO: 130995 - DNA, 1080 bp, Artificial Sequence
  derived and/or modified sequence
atggccggacatctcgcttccgacttcgctttctctccccctcccgggggggggggggatgggcccggaggacctgaacctggatgggtggaccccaggacatggctttcctttcagggacctcctgggggacccggaatagggccaggagtggggccaggatctgaagtttggggaatacccccttgtcctccaccctatgaattctgcggagggatggcctattgcgggcctcaggtgggagtagggctagtccctcagggaggacttgagacaagtcagcctgaaggggaagccggagtaggggtggaatcaaatagtgatggagcctcacccgagccttgtacagtcactcctggagccgttaaactggaaaaagaaaaactggaacagaatccagaagaatcacaagacataaaggcacttcagaaagaattggaacagttcgccaagctgctgaaacagaaacgaataacattagggtatacacaggccgatgtggggctaacattgggggtgttatttggaaaagtgttttcacaaactactatctgtcgattcgaggctctccagttatcattcaaaaacatgtgtaagctaagaccactattacagaaatgggtggaagaagctgataataatgaaaatctccaggaaatctgtaaagcagaaacactcgtgcaggccagaaaacggaaacgcacttctatcgaaaatcgagtacgcggaaacctggaaaacctctttctgcaatgcccaaaaccaacactccagcagatttctcatatcgcacagcagcttggactggagaaagatgtggtcagagtgtggttctgtaaccgcaggcagaagggaaaaaggtcttcttccgattatgcgcagcgcgaagattttgaggctgcagggtcccctttcagtggggggcctgtatccttccctctagcaccagggccgcattttggaactcccgggtatgggtccccacattttacagcactatacagttcagtgccttttccagaaggggaagcttttccccctgtttctgtcacaacactggggtctcccatgcactccaat

SEQ ID NO: 130996 - DNA, 1080 bp, Artificial Sequence
  derived and/or modified sequence
atggctggccacctggcctccgactttgcgttttccccgccacctggcggagggggagatggtccggggggccctgagcccggttgggtggatccccgaacttggctttcgtttcagggacccccgggcggacctggaatcggcccaggtgtaggacccggatccgaagtgtggggaatccccccttgtcctccgccgtatgaattctgcggaggtatggcctactgcggtcctcaggtgggtgttggacttgttccacaaggtggcctggaaaccagccagccggagggagaagcgggcgtgggagtcgagagcaatagtgacggagcaagccctgaaccatgcaccgtgaccccgggagctgtcaagctggaaaaagagaagttggagcagaacccggaagagtcccaggacataaaggccctgcaaaaagagttggaacaattcgccaagctcctcaagcaaaagagaatcaccctgggctacactcaggcggacgtgggactgacccttggcgtactgttcggaaaggtcttttcgcagaccacgatctgtcggttcgaggctttgcagctgtcatttaagaacatgtgcaaattgcggcctcttcttcaaaagtgggtggaggaagcggacaataacgagaacctccaggaaatctgcaaggctgagacgctggtgcaagctcgcaagcggaaaagaacttcaatcgaaaaccgcgtgaggggtaatctcgagaatctgttcctgcagtgcccgaagccgactctccaacagatttcccatatcgcacaacaactgggactggagaaagacgtggtccgggtgtggttctgcaacagacgccagaaggggaagcgctcgtcgagcgattacgcgcagagagaagatttcgaggccgcaggatcgccattctcgggagggccggtcagctttcccctggcacctggaccacatttcgggactccaggctatggctcgccgcacttcaccgccttgtactcgtcagtgccgttccccgaaggcgaggccttcccaccagtgtccgtgacgactctgggctcaccgatgcactcaaac

SEQ ID NO: 130997 - DNA, 1080 bp, Artificial Sequence
  derived and/or modified sequence
atggccggccatctcgccagcgattttgcgttctctcccccaccagggggaggtggtgacggccccggcgggccggagccaggatgggttgatcctcgaacttggctttcgttccagggaccacccggtgggccggggattggccccggagtgggccctggctccgaggtgtggggtatacctccctgccctcccccatacgagttctgcggaggtatggcctactgtggaccgcaggtcggcgttggtctggtaccacagggcggactggagacatcccagcctgaaggagaagcaggcgtaggcgtggagtctaatagcgacggagcctcgccggagccctgtacagtcacccccggcgctgtaaaactagaaaaggaaaaactcgaacaaaatcccgaggaaagtcaagacattaaggcattacagaaagaactcgagcagttcgctaagctcttgaaacagaaaaggatcacactcggctacacccaagctgacgtaggcctgaccctgggcgttttgttcgggaaagttttttcccaaacgactatatgcagattcgaagccctgcagctgagcttcaaaaacatgtgcaaacttcgacccctgctgcagaaatgggtggaggaggcggataacaatgaaaatctgcaggaaatttgcaaggcggaaacactggtgcaagccagaaaacgaaaacggacatcaattgaaaacagagtcaggggaaacctcgagaacctgttcttgcagtgtcccaaaccaaccctgcagcaaatctcacacattgcacagcagttagggctggagaaggatgttgtccgggtgtggttctgtaaccggagacagaaggggaaaaggtctagctccgattatgctcagagagaggattttgaagccgcgggctcccctttttcgggcggcccagtctcttttcctctagcgcccgggccccactttggaacccctggatacggatcccctcactttactgctctgtattcttccgtgcccttccccgaaggagaagcttttccccccgtgtctgtaacaacactcgggagtcccatgcatagcaac

SEQ ID NO: 130998 - DNA, 1080 bp, Artificial Sequence
  derived and/or modified sequence
atggcgggccacctggcatcagacttcgctttctcgcccccacctggtgggggcggcgatggccccggtggtcctgaacctgggtgggtagaccctaggacctggctcagcttccaaggtcctcctgggggcccgggaattggcccgggggtcggccccgggtccgaggtgtggggcatcccaccttgccctcccccctatgagttctgcggaggtatggcctactgcggcccacaagtcggggtggggctggttccgcagggcggcctagaaacgtcccagcccgagggggaagctggcgtcggagtcgagtctaattctgatggggcctctccggaaccctgcacagtcacccctggagccgtgaagctggaaaaggaaaagctcgagcaaaaccccgaggagagtcaggacatcaaggcactgcagaaagagttagagcagttcgctaagctgcttaaacagaagcgtataaccttggggtacacccaggccgatgtgggtttgaccctgggcgtcctatttggcaaggttttctctcagaccaccatttgtaggttcgaagctcttcaactctcatttaaaaatatgtgtaaattgaggcccctcctacagaagtgggtggaggaggccgacaataatgagaatctccaagagatctgtaaagctgaaacattggtgcaggctaggaaaagaaaaaggacgtcgatagagaatagggtaagaggcaatcttgagaatctgtttcttcagtgtcctaagcctacactgcagcagatcagtcatattgcccagcagctcggcttggagaaggatgtggttagggtctggttttgtaacagacgccagaaggggaagagatcctcttctgactacgctcagcgcgaagatttcgaagctgccggatcaccattttccggtggccccgtgagctttcccttggcccctgggccacacttcggcacacctggatacggcagcccacacttcaccgccttgtacagtagtgtcccattccctgagggcgaagctttccccccagtatctgtgaccacgctggggtctccaatgcacagcaac

SEQ ID NO: 130999 - DNA, 1080 bp, Artificial Sequence
  derived and/or modified sequence
atggcaggacatttagcctcagactttgctttttcgccaccacccggcggaggcggagatggcccagggggtcccgaacccggttgggtggatccccgcacttggcttagtttccaaggccctcccggcggccctggtatcggcccaggggtaggcccgggcagtgaggtctggggaattccaccctgccccccaccttatgaattttgtgggggtatggcgtactgcggccctcaggtgggagtcggcctcgtcccgcagggtggtctggaaacctcgcagcccgaaggggaggccggagttggagtggaaagcaacagcgacggtgcatcccctgagccttgtactgtcacacctggggcagttaagctagagaaggagaagctcgaacagaatcccgaggagagtcaagacatcaaggcattgcagaaggaactcgaacagttcgccaaactgctcaaacagaagcgaatcacgttgggatacactcaggcagatgtggggctgactctaggggtcctgtttggcaaggtattttctcaaaccacaatctgtagattcgaggccctccagctgtctttcaaaaacatgtgtaagcttcgcccccttctacagaagtgggtggaagaggcagacaacaacgagaacctccaagagatctgcaaggcggagacattggtgcaggctcggaaacgcaagcggacatccatcgagaaccgggtgcgggggaaccttgagaatctatttcttcagtgtccaaaacccactctacagcagatttcccacatcgcccaacagcttggtctggagaaagacgttgtgcgggtgtggttctgcaaccgccggcagaagggcaaaaggtcctcttcagattacgcccaaagagaagactttgaagccgccggctcaccgtttagtggcgggccagtctcctttccattagctccggggccccacttcgggactccgggatatgggagtccccatttcaccgcactgtactcttcagttccctttcctgaaggagaggcgttcccccctgtatcggtgaccactctcggctcaccaatgcattctaat

SEQ ID NO: 131000 - DNA, 1080 bp, Artificial Sequence
  derived and/or modified sequence
atggccgggcatttggcgtcggattttgcttttagtccgccgcctggtggcggaggcgatggaccgggtggtccggagcctggctgggttgatcctcgaacgtggttatcttttcagggaccccccggtggtcctggtattgggccgggagtcgggccgggctcggaagtctggggcatcccaccttgtccgccaccttatgaattttgtggaggtatggcttattgtgggccgcaagttggtgttggacttgtgccacaaggtggcttagaaacatctcaaccagaaggagaagctggagtcggagtagaatcaaatagcgatggtgcgtcgccagagccctgtaccgttacaccgggagcagttaaactggagaaggaaaagcttgaacaaaaccctgaagaaagccaagatatcaaagccttgcaaaaagaactcgagcaatttgctaaattgcttaaacaaaaaaggattactttgggctacacgcaagcggacgttggattaactctcggtgttttgtttgggaaagttttttcacagacaacgatttgtagatttgaggcattgcaactttcctttaaaaatatgtgtaaactccggcccttgttacagaaatgggtggaagaagcagataataacgaaaacttgcaggaaatatgcaaagcggaaacactggttcaagcccgcaagagaaagcggacatcaattgagaatcgagtccggggtaatctggaaaacctttttctgcaatgcccaaagccgaccttacaacagatttcccatattgcgcagcagctgggtctcgaaaaagacgtcgttcgtgtgtggttttgcaatcgtcggcagaaaggaaaacgttcaagctctgactatgctcaacgtgaggattttgaagctgctggatcaccattctcaggtggtccggtgtcattccctttagcaccggggccgcattttggcacaccaggttacggttcaccgcattttaccgcactatatagctcggtaccgtttcctgaaggagaagcatttccgccggtttccgtgacaacgctggggtcacctatgcacagtaat

SEQ ID NO: 131001 - DNA, 1080 bp, Artificial Sequence
  derived and/or modified sequence
atggccggccaccttgcatccgatttcgccttctcccctcccccgggggggggcggagacggcccaggcggccctgagcccgggtgggttgacccgagaacttggctatcgttccaggggcccccaggcgggccaggaatcggccccggggtagggcccggttctgaggtttggggaatcccaccttgcccccctccttatgagttctgcggtggcatggcctactgtggtccccaggtcggcgtgggtctcgtccctcaaggtggcctcgagacctctcagccagagggggaggccggagttggagtggagagcaatagtgacggtgcctcccctgaaccgtgcacggtgacccctggagccgtgaaactggagaaggagaagctcgagcagaaccctgaggagtcccaagatatcaaagccctccagaaggaactcgagcagtttgcgaaactcctaaagcagaaacggattactctcggttatactcaagccgatgttgggctcactctaggcgtgcttttcggcaaagtcttcagtcagactacaatctgtcgtttcgaggctctgcaattgagctttaaaaatatgtgcaagttaagacccctcctacagaaatgggtagaggaggctgataacaatgaaaacctgcaggagatctgcaaggccgagaccctggtacaggcaaggaaacgcaagcgcaccagtatcgagaacagagttagaggaaaccttgagaatctgtttctgcagtgtcccaagcctacgctacagcagatctcccacattgcacaacagctaggcctggagaaagatgtagtaagggtgtggttctgcaaccgtcggcagaagggcaagcgctcctcctctgactacgctcagagggaggacttcgaagctgctgggtctccctttagtggcggtccagtgtcattccccctggcaccgggcccacatttcggaaccccgggctacggcagtcctcacttcacagcgctttattcaagcgtgccgtttccagagggcgaagcctttccgccagtcagtgtgaccactctcggatcgcctatgcattctaac

SEQ ID NO: 131002 - DNA, 1080 bp, Artificial Sequence
  derived and/or modified sequence
atggccggacacctggcctctgattttgcttttagcccacccccgggaggcggaggtgacggacccggcggccccgaaccaggttgggtggatcctcggacctggctgtctttccaaggaccacctgggggacctgggataggccccggtgtaggaccaggatccgaggtgtggggcattccaccatgtcctcctccttatgaattttgcgggggcatggcttactgcgggccacaggtcggcgtaggactcgtgccccaaggcgggcttgagaccagtcagcctgagggggaggcaggtgtgggggtggaatccaactcagacggggcttcgcctgagccatgcacagtaactcctggggctgtgaagctggaaaaggagaagttggaacagaaccctgaagaatcacaggatatcaaagccctgcagaaggagctggaacagttcgcaaagctgctgaaacagaagagaatcacactggggtacacgcaagccgacgtcggattgaccctgggcgtcttgttcggaaaggtgttctcccagaccaccatctgcaggttcgaggctctgcaattgagtttcaagaacatgtgcaaactgaggccgctgctgcagaaatgggttgaggaagcagataataacgaaaacctccaggagatttgcaaggctgagacccttgttcaggcccgcaagcgcaaaagaacaagtatcgaaaatagagtgagaggcaacctggagaacctgttcctgcaatgcccaaagccgacactgcagcaaatctcgcacatcgcacaacagctgggcttggaaaaggacgtggtaagagtgtggttttgcaaccgccgccaaaaaggcaagaggtcgagcagtgattacgcacagcgggaagatttcgaagcagctggcagtccattcagtggcggcccagtttcctttccactggcaccaggcccccactttggcaccccaggctatggttccccccacttcacagctctctactcttctgtgccatttccagaaggcgaggctttcccccccgtctcagtgacaacattaggctctccaatgcacagcaac

SEQ ID NO: 131003 - DNA, 1080 bp, Artificial Sequence
  derived and/or modified sequence
atggccgggcacctcgcctcagattttgcgtttagccctccaccggggggcggaggtgatggaccaggtgggcctgaacctggttgggttgatcctagaacctggctttcctttcaaggtcctcctggtggtccaggaattggaccaggcgtgggacctggctccgaagtgtggggcattccgccttgcccccctccctacgaattctgtggaggtatggcatactgtggacctcaagtgggcgtcggcctggtgcctcagggaggccttgaaaccagccagccagaaggagaagctggtgtgggtgtggaatcaaacagcgatggcgcatcccccgaaccttgtactgtgacccctggagcagtgaagctcgaaaaggaaaaacttgagcagaatccagaagaatcccaagatatcaaggccctgcagaaggaactggagcagtttgcgaagctgctgaaacaaaaacggattacccttggctacactcaagcggacgtgggacttacccttggtgtcctgtttgggaaggttttttcacaaaccaccatttgccgtttcgaagcacttcagctttccttcaagaatatgtgtaagctgaggcccctcctgcaaaagtgggtggaggaagcagataacaatgagaacctgcaagaaatctgcaaggcggaaacccttgtgcaggccagaaagcggaagagaacgtccatcgagaatagagtgcgcggcaacctggagaacctgttccttcagtgtcctaaaccgactctgcaacaaattagccacatcgctcaacaattgggactggagaaggacgtggtgagggtctggttttgtaataggaggcagaaggggaaaaggagttcttccgactacgcgcaacgagaggacttcgaggcagcgggttccccatttagcgggggcccagtgagcttccctctcgcaccaggacctcattttggtaccccagggtacggatcgccacattttactgcgctgtattctagcgttccctttcccgagggtgaggcctttccacccgtcagtgtaaccactctggggtcgccgatgcattccaac

SEQ ID NO: 131004 - DNA, 1080 bp, Artificial Sequence
  derived and/or modified sequence
atggcggggcacctcgctagcgattttgcatttagccctccccctggcgggggaggggatggccccggtgggcctgagccgggttgggtggatccaagaacctggctcagctttcaaggacctccaggaggccctggcatcggacctggagtcggccccggatcggaagtttggggtatccctccctgtcctccaccatacgaattctgcggaggaatggcctactgcgggcctcaagtgggcgtcggtctggtccctcagggtgggctggaaactagccagcccgagggtgaggctggagtgggcgtggagtctaactccgacggtgcatcgccggagccatgtaccgtgactcctggagcagtcaaactggagaaggagaagctcgagcaaaaccccgaggagtcccaagatatcaaagcactgcagaaggaacttgaacagttcgcaaaactcctgaagcagaagaggataacccttgggtacacccaagcagacgtggggcttacgttgggcgtcctcttcggaaaggtcttttcccaaactaccatctgccggtttgaagcacttcagctcagctttaagaatatgtgtaagctgcgtcctcttcttcaaaaatgggtggaggaggcagataacaatgagaatctccaagaaatttgtaaggcagaaactcttgtgcaggcgaggaagcgcaagcggacctccatcgaaaaccgggttagagggaaccttgagaacctttttctgcaatgtccaaagcctactttgcaacaaattagccacattgcccagcagctcggtcttgaaaaggacgtggtgcgagtgtggttttgcaatagacggcagaaagggaaaagatcatcctcggattacgcacaaagagaggacttcgaagcagccggctctcctttttccggtggtcccgtctcctttcctcttgccccggggcctcatttcggcactcccggctacgggtcgccgcactttactgctctctactcctcggtgccatttcctgaaggtgaagcatttccacctgtctcagtgactaccttgggatcgcctatgcatagcaat

SEQ ID NO: 131005 - DNA, 1080 bp, Artificial Sequence
  derived and/or modified sequence
atggccggacacttggcgtcggattttgcttttagcccaccgcctggaggagggggcgatggcccaggcgggcctgagcctggctgggtggatcccagaacttggctctccttccagggccccccaggagggcctgggataggcccgggagtcggaccaggaagtgaggtttggggcatccccccgtgccctcccccgtatgaattttgcgggggcatggcctattgcgggccgcaggtcggggttggcctggtgccacaaggtgggctggagacatcacagccggaaggcgaagcaggggtaggggtggagtccaattctgacggcgcgtctccagaaccctgcaccgtcacacccggtgctgtaaaactcgaaaaagagaagctggagcaaaatcccgaggagtctcaagatatcaaggcattacagaaggagcttgagcaatttgctaaattactgaagcagaagcggatcaccttggggtatactcaggctgacgtcggcctgactctgggagtactcttcggcaaagtgttctcacagaccaccatctgtcgtttcgaagcactacaattgtcgtttaagaatatgtgtaagctcagacccctgctccagaagtgggtcgaggaagctgataataatgagaatttacaggaaatctgcaaagcagagactctcgtacaagcccggaagcgaaaaaggacaagcatcgaaaatagggtccgaggcaacctagaaaacctttttttacaatgtcctaagcctactctgcagcagatcagtcacattgcacagcagcttggcctggaaaaagacgtcgtacgggtctggttttgcaatcgccggcagaaaggaaagaggtcttctagcgactatgcccagagggaggactttgaagctgctgggagcccattctccggaggtccggtttcattcccactcgccccgggcccccacttcgggacacctggatatggctctcctcacttcacagcactttactcctcagttcccttccccgagggtgaggcctttccccccgtgagcgtcactacactgggtagtccaatgcacagtaac

SEQ ID NO: 131006 - DNA, 1080 bp, Artificial Sequence
  derived and/or modified sequence
atggctgggcatctggcctcagactttgccttctcaccccctccaggagggggcggagatggacctggcggaccggagcccggctgggtcgacccgcggacttggctgtccttccaaggcccgccaggcggtccaggtatcgggccgggcgtgggtcccggctccgaagtctggggcatcccgccctgcccaccaccgtacgaattctgcggaggcatggcctactgcggaccacaggtcggggtggggttggtgccacaaggcggtctggaaacctcgcagccggagggagaggcaggtgtgggcgtggaatccaactcagacggagcgtcgccggaaccctgcactgtaaccccaggtgccgtgaaactggagaaggaaaagctcgaacaaaacccagaggaatcacaggacattaaagcgctgcaaaaggaacttgaacaattcgcgaagctgctgaaacagaagaggatcacgctcggatacacccaagcagacgtcggtctgactctcggagtgcttttcggaaaagtgttctcgcaaaccaccatttgtagattcgaagctctgcagctttcgtttaagaatatgtgtaagctgcgcccgctcctgcaaaaatgggtcgaagaggccgataacaatgagaacctgcaggagatctgcaaggctgaaactctcgtgcaagcgcgcaagcgcaaaagaacctcaatcgagaatcgggttcggggcaatctcgaaaatctgtttctgcaatgcccgaagccgaccctgcagcagattagtcatatcgcacaacaactcggactcgaaaaagatgtggtgagagtgtggttctgcaaccgccggcaaaagggtaaaagaagctcatccgactacgcacagcgggaggacttcgaggccgccggatcgccattttcgggtgggccggtgtcattcccgctcgcgccgggacctcacttcggcacccccggatatgggagcccacactttactgcactctacagctcagttccgttccccgaaggagaggcgtttccgccggtgtcagtgaccactctgggttcaccgatgcactctaac

SEQ ID NO: 131007 - DNA, 1080 bp, Artificial Sequence
  derived and/or modified sequence
atggcaggtcatctcgcatctgatttcgcgttttcccctcctccaggaggtggtggagatggaccaggagggcctgaacccggatgggtggaccctaggacttggctgtcgtttcaaggaccaccaggcgggcctggcattggccctggggtgggtcctggctccgaagtgtggggaattccaccatgtccaccaccatacgagttttgcggaggtatggcttactgtggaccccaagtgggagtcggtctggtgcctcaaggaggacttgaaaccagccagcctgagggagaagcaggagtcggagtggaatccaactcggatggagcatcgccagagccctgtaccgtgacgccgggggccgtgaaacttgagaaggaaaagttggaacagaaccccgaagaatcacaagatatcaaagcactgcaaaaggaactcgagcagttcgcaaagctgctcaagcagaagcgcatcaccctcggatacactcaagcagatgtgggtctgacgcttggtgtgctctttggaaaagtgttttcacaaactaccatttgccgcttcgaagcactgcaactgtcattcaaaaacatgtgtaagctccggccacttctccaaaagtgggtggaagaagcagacaataacgagaaccttcaggaaatttgtaaggcagaaactcttgtgcaggcaagaaagcgaaagcgcacctccatagaaaacagagtgaggggcaatctcgaaaatctcttcctgcagtgccctaagccgacccttcaacagatttcccatatagctcaacagcttgggctcgaaaaagacgttgtgcgggtgtggttttgtaaccggcgacaaaaagggaagcggagcagctcggactacgcacaacgtgaggactttgaagcagcaggatcgccttttagcggtggaccggtcagctttccacttgcacctggtccacactttggtactcccggatacggttcaccacacttcactgcattgtactcgagcgtgcccttccctgaaggtgaggcattcccgcctgtgtcggtcaccacccttggatcgcctatgcattccaat

SEQ ID NO: 131008 - DNA, 1080 bp, Artificial Sequence
  derived and/or modified sequence
atggccggacacctggcgtcagattttgctttctccccacctcccggtggaggcggcgatggcccaggagggccggaaccaggttgggttgaccctcgaacttggttgagcttccaggggccacccggtggccctggaataggccctggtgtcggccccggcagcgaagtgtggggcattcctccctgcccaccaccttacgaattctgcggaggcatggcctattgcgggcctcaggtaggtgtgggcttagtgcctcaaggaggattggaaacctcacaacctgagggagaggccggcgtgggagtggaaagcaattctgacggtgcatcaccggagccttgcactgttacgccaggtgccgtgaagctggagaaggaaaagctcgagcagaatcccgaagaaagccaggatattaaggcactgcagaaagaactggagcagttcgcaaagcttcttaagcagaagaggattaccctgggctatactcaggcagacgtgggactgacactgggggtgctcttcggtaaggtttttagccaaacaaccatctgtcgttttgaagcactccagctatcattcaagaacatgtgtaagctgaggcctcttttgcagaaatgggtagaggaagctgacaacaatgaaaacctgcaggagatttgcaaggcagagacattggtgcaggcgaggaagcggaagcgcacttcaattgagaatagagtcagaggaaacctcgagaatctgtttttgcaatgcccaaagccaacgctgcagcagatcagtcacattgcgcagcagttgggtttggaaaaagatgtcgtccgggtgtggttttgtaatagaagacagaaggggaagcgaagctcaagtgactatgcccagcgagaggatttcgaagctgccggaagcccattcagcggcggtccagtaagtttcccgctcgcaccagggccgcattttgggaccccagggtacggctcccctcacttcacagcgctttactcatcggtgccattccccgagggagaagccttccctcccgtgagcgtaaccacgctgggctccccaatgcattccaac

SEQ ID NO: 131009 - DNA, 1080 bp, Artificial Sequence
  derived and/or modified sequence
atggccggacacctcgcctcggattttgccttctcgcccccacctggcggaggtggggacggccccggaggtcccgagccaggatgggtggacccacgaacttggctcagctttcagggtccgccagggggacccggaattggtccaggggtgggaccggggtccgaagtgtggggaatcccaccgtgtccgccgccgtacgaattctgcggcggaatggcgtactgcggcccccaagtcggagtgggcctggttccgcaagggggattggaaacttcccagcctgaaggcgaggccggcgtcggagtggaatccaactcggatggggcctcgccagagccgtgcactgtgacgccgggagccgtgaagctggagaaggagaaacttgaacagaacccagaagagtcgcaggacatcaaggctctccaaaaagaactcgagcagttcgcgaagctcctgaagcaaaagcgcatcacgctggggtacactcaggccgatgtcggcttgactctgggagtcttgttcggcaaagtcttttcgcagaccaccatctgcaggttcgaggcacttcaactgtcgttcaagaatatgtgtaagctgcggccactgctgcaaaaatgggtagaagaagctgacaacaacgaaaacctgcaggagatctgcaaggctgaaaccctggtgcaggcacgcaagcgcaaacgtacctcgatagagaatagggtaaggggcaaccttgaaaatcttttcctgcaatgcccgaagcccactctgcagcaaatctcgcatattgcccaacagctcggcctcgaaaaggacgtggtgagagtctggttctgtaaccggcgccaaaagggcaagcgctcctcaagcgactacgcacagcgggaggattttgaagccgccggctcgccgttctcaggaggcccggtgtcgtttccgctcgcgccgggtccgcacttcggaacccctggatatggttccccgcatttcaccgccctctactcctcagttccgttcccggagggagaagcattcccaccagtttcagtgactaccctgggatcaccgatgcactccaac

SEQ ID NO: 131010 - DNA, 1080 bp, Artificial Sequence
  derived and/or modified sequence
atggcaggacacttggcgtccgacttcgctttctccccaccgccgggaggtggtggggatggaccaggaggaccggagccgggctgggtggaccctagaacctggctgtccttccaagggcctccgggagggccgggaatcgggcccggcgtcggcccaggttccgaggtgtgggggattcctccatgccctcctccctacgaattttgtggcggtatggcctattgcgggccacaggtcggtgtgggactggttcctcagggaggactggaaacctcacagcctgaaggcgaagcgggagtgggagtggagtccaatagcgatggagcttcgcctgaaccctgcactgtgactcctggggcggtgaagctggagaaggaaaagctcgagcagaatccggaagagtcccaggatatcaaggcccttcaaaaggaacttgagcagtttgctaagttgctgaagcagaaaaggatcacccttggctacacgcaggcagatgttggactcactctgggcgtgctctttggaaaggtattctcacagacgaccatctgtcgcttcgaagccttgcagctttcttttaagaacatgtgcaagctgcgcccgctgctgcagaagtgggtggaggaagcagacaacaacgagaacctgcaggaaatctgcaaggccgagactctggtccaagctcgcaagcggaagaggacctccattgagaaccgggtgcgcggcaacctggagaacctgttcctccagtgccctaaacctactctccagcagatatcgcatatcgcccagcaactcggcctggaaaaggacgttgtgcgggtgtggttctgcaacagacggcaaaaaggaaagagatccagctcagattacgctcaacgggaggacttcgaggcggccggctcaccgttcagcggaggaccggtgtccttcccgcttgcaccgggcccacacttcggcaccccaggatacgggtccccccattttaccgccctttactccagcgtgccctttccggaaggagaggcgttccctccagtgtcagtgaccactctgggatcaccaatgcactccaac

SEQ ID NO: 131011 - DNA, 1080 bp, Artificial Sequence
  derived and/or modified sequence
atggctggacacctggcaagtgacttcgctttcagtcctcccccaggcggcgggggggacggccccggcggtccagaacctggctgggtagatcctcggacatggctgagcttccagggaccacccggcggccctggaattgggccaggcgttgggcccggctctgaggtctggggtatccctccatgtcccccgccttacgagttttgtgggggaatggcttactgcgggcctcaagttggagtcggacttgtaccccagggtggcttggagacaagtcagcccgaaggcgaagccggtgtgggagttgagtctaatagcgatggcgctagtcccgaaccgtgcacagtgacgcccggcgctgtgaagctagaaaaagagaagctggagcagaacccagaggagtcgcaggatatcaaggccctgcaaaaggaattagaacagttcgctaaattattgaagcagaaacggatcactttaggatatacccaggctgacgttggtctcacgttgggcgtcttgtttggcaaggtgttctcacaaactaccatctgcaggttcgaggcacttcagctgtcctttaaaaacatgtgcaaactccgccccctgctgcagaagtgggtcgaggaagcggataataacgagaatctgcaggaaatttgtaaagccgagaccctcgtgcaggcaagaaaacggaagaggacgagtattgaaaacagagtgcgtgggaacttggagaacttgttcctccagtgcccaaaaccaactcttcagcagatctcgcatattgcccagcagttggggttagaaaaggacgttgtccgggtgtggttttgtaaccggcgccagaagggcaagcggtcatcgtccgattatgcacagcgagaggacttcgaagctgctggatcccctttcagtgggggaccggtgagcttccctcttgccccggggcctcattttgggactcctggctacggatccccccacttcactgctctgtactcttctgtaccattcccggagggggaggccttcccacccgtttctgtgacgacactcggttcccctatgcacagcaac

SEQ ID NO: 131012 - DNA, 1080 bp, Artificial Sequence
  derived and/or modified sequence
atggccgggcatcttgcttcggatttcgccttctcccctcctcctggaggaggaggagatggccccggcgggcccgagcccggatgggtggaccctaggacctggctctcctttcaggggccacctggtggtcccggtattggccccggagtcggccctggaagcgaagtctgggggatcccaccttgtccgccaccatatgagttctgcggcgggatggcctactgcggaccccaggtgggcgtgggactagtgccacaggggggactggagacatcccaacctgagggagaggcaggagtgggggtggaatctaactccgacggtgctagtcccgaaccttgcactgttactcctggggcagtcaagctcgagaaggagaagcttgaacagaatcccgaagagagccaggacatcaaggctctgcagaaggaactggagcagttcgccaaactgctgaagcagaagcgcattacactggggtacacacaggctgacgtgggtctgaccctgggtgtgctgtttggaaaggtctttagccagacaacgatctgtcgctttgaggctttgcaactctcgtttaagaatatgtgcaagctcaggccattattgcaaaaatgggtggaggaggcggataacaatgagaatctacaggagatctgcaaggcggagactctggtgcaggcccggaaacgcaaaagaacttccatcgaaaaccgcgtgcgtggtaatctagagaacctgtttcttcagtgtcctaagcccaccctgcagcagataagtcacattgcccagcagctggggctggagaaggatgtcgtgcgagtctggttttgcaaccggagacagaagggcaaacgttctagcagcgattatgctcaacgggaggactttgaagccgcaggcagccccttctccggtgggcccgtgtcttttccattggcgcctggtccccacttcggtactccaggatacggctcacctcacttcaccgcattgtattccagcgtaccgtttcccgagggcgaggcatttccaccagtcagtgtgaccactttagggtctcccatgcacagtaat

SEQ ID NO: 131013 - DNA, 1080 bp, Artificial Sequence
  derived and/or modified sequence
atggccggacacttagccagcgacttcgccttctctccgccccctggcggcgggggtgacggaccagggggacctgaacctggatgggttgatccacgtacttggctgagttttcaggggccaccaggcggcccagggatcggccccggggtggggcccggctctgaggtttggggaattcctccgtgcccacccccttacgaattctgcggaggtatggcctactgcggtccgcaggtgggcgtgggcctggtccctcaaggtgggttggagacctcacaacctgagggtgaagctggagtgggagtagagtccaatagtgacggcgcttcaccagaaccgtgtacggtgacccccggcgcagtgaagctagaaaaagagaagctggaacagaatcccgaggagagtcaggacatcaaagcccttcaaaaagagctggaacaattcgccaaactgctgaagcagaaacgcattactttgggttacacgcaggccgatgtcggcctcacgctcggcgtcctctttgggaaggtgttctcgcagactaccatctgtagattcgaagcgctgcaactgtcattcaagaatatgtgtaagctgagacccctgctccagaagtgggtggaggaggcagataacaacgagaacctccaagaaatatgcaaggctgagacccttgtgcaagcacgcaaacgcaagcgtacttctatcgagaatcgggtgcggggcaatctggaaaacctctttttacagtgtccaaagcccactttgcaacagatctctcacatagcccagcaacttggtctagaaaaagacgtggtgagagtctggttttgcaatagacgccagaaggggaagcgttcttcttcggactacgcccagagggaggattttgaggccgcgggctcaccattctctggcgggcccgtgtctttccctctcgcccccggcccgcactttgggaccccaggatacggtagcccacacttcaccgcgctttactcctcagtcccgttccccgaaggagaagccttcccacctgtgtcagttactactctgggctcccccatgcactctaat

SEQ ID NO: 131014 - DNA, 1080 bp, Artificial Sequence
  derived and/or modified sequence
atggccgggcacctggcgtccgattttgcattctcaccccctcctggaggagggggagatgggccaggggggcctgaacccgggtgggtagatcccaggacttggctctccttccaggggccccctggagggcctggaatagggcctggggtgggacctggatctgaagtctgggggatacctccatgcccacccccctatgagttctgcggggggatggcctattgtggaccccaggtcggggtcgggttggtaccacaagggggacttgagacttcccagcctgaaggggaagctggggtgggggtagaatcaaactccgatggggcctcccccgaaccatgcacagtgactcctggagcagttaaactcgaaaaagagaaactagaacagaatcccgaagaatcacaggatatcaaagccctccagaaggaactagaacagtttgcaaaattgctcaaacagaaaaggatcactcttgggtatactcaggccgacgtgggactcacattgggagtgctctttgggaaggtgttttcacaaacaactatctgtagattcgaagccctgcaactttcttttaaaaatatgtgcaaacttaggccccttctacaaaaatgggttgaagaagccgacaacaacgaaaacttacaggaaatatgcaaagcagaaacactagtccaggcaaggaaaaggaaacgaacttctattgagaatcgggtccgcggaaacctggaaaatttatttctacagtgccccaaacccacactgcaacagattagtcatatcgcacagcagcttgggttggaaaaagatgtagtgcgcgtttggttttgcaacagacgacagaaagggaagcgctcgtcttccgattatgcacagcgcgaggatttcgaagcagctgggagtcctttttcaggagggcccgtgtcatttcccctagctcccggaccacatttcgggactcctggatatggatcaccccacttcactgctctttattcttccgtcccattcccagagggggaagcctttcctccagtctctgtaactactctggggtctcctatgcacagtaat

SEQ ID NO: 131015 - DNA, 1080 bp, Artificial Sequence
  derived and/or modified sequence
atggctggccacctggcatccgacttcgcgtttagcccccctcctggaggaggaggagacggcccgggaggacctgagccaggttgggtggatccaaggacttggctgtcgtttcaaggaccccctggcgggcctggtatcggaccaggagtgggtcctggatcagaggtctggggaattccaccttgccctcctccatacgaattctgtggcggaatggcctactgtgggccgcaagtgggtgtgggacttgtgccgcaaggaggtcttgagacttcccagccagaaggtgaggcaggtgtgggtgtggaatcaaattccgacggcgcaagccccgaaccatgtactgtgacccctggagccgtgaaactcgaaaaggagaagctcgaacagaatccggaggagagccaggatatcaaggcactgcagaaagagcttgagcagtttgcgaagctcctgaagcagaagagaattacgctcggatacactcaagcagatgtcggacttaccctgggtgttctgttcggtaaagtattcagccaaactaccatctgtcgtttcgaagcgttgcaactcagctttaagaacatgtgtaaactgcggccactgctgcaaaagtgggtggaagaagcagacaataacgagaatctgcaagaaatttgcaaagccgaaactttggtgcaagcacggaaacgtaagcgtacttcgatagaaaacagggtgcgaggcaacctggaaaacctttttcttcaatgtcctaagcctaccctccagcaaatttcacatatcgctcagcagctcggtctggaaaaggatgtggtgcgggtgtggttctgtaatagacggcaaaagggtaagcgttcaagctcggactatgcccagcgtgaagattttgaagcagcgggatcgccattcagcggagggcctgtgtcgtttcctctcgcaccaggaccccattttgggacccctggttacggaagcccacattttaccgcactttactcctccgtcccattcccagaaggtgaagccttccctccagtgtccgtgaccaccctcggatcacctatgcactctaat

SEQ ID NO: 131016 - DNA, 1080 bp, Artificial Sequence
  derived and/or modified sequence
atggccggacatctggcatcagattttgcgttcagcccacctcccggtggaggcggtgacgggcctggcggcccagaaccaggatgggtggatccgaggacttggttgagctttcaaggaccaccaggagggcctggaattggtccaggtgtcggaccaggatcggaagtctggggaattcctccctgccccccaccttacgaattctgcggtggtatggcatactgtggaccccaggtgggagtgggactcgtgccacagggtggtctggaaacctcccaaccagaaggtgaggctggagtgggcgtggaatcgaattccgatggtgcgagccctgagccctgtaccgtcacccccggtgcggtgaagttggagaaggagaagctggagcaaaatcccgaagagtctcaagacataaaggcgctgcaaaaggagctcgaacaattcgcaaagctgctcaaacaaaagcggatcactctcggatacactcaggcagatgtaggactcaccctgggagtgttgttcggcaaagtctttagccagaccaccatttgtaggtttgaggcactgcagctgtcgtttaagaacatgtgtaagctcagaccactgcttcaaaagtgggtggaagaagcagacaacaatgaaaatcttcaagaaatttgtaaggcggaaactctggtgcaggcgcgcaagagaaagcgaacctcaatcgagaacagagtccggggaaacctggaaaatctgttccttcaatgtccaaaaccaactctgcaacagatttcacatattgcacaacaacttgggctcgaaaaggacgtggtccgggtgtggttttgtaataggagacaaaagggaaagaggtcctcaagcgattacgcacaacgggaagatttcgaggccgcaggatcaccgttttccggcggacctgtcagctttccgctcgcccctggcccacatttcggcacccccggctacggttcccctcactttactgcactttactcctccgtccctttcccggagggagaagcatttcctcctgtctccgtgaccactcttgggtcacctatgcactcaaac

SEQ ID NO: 131017 - DNA, 1080 bp, Artificial Sequence
  derived and/or modified sequence
atggccgggcacttggccagtgacttcgccttcagcccacctcctggaggggggggggacggccccggaggtcctgagccgggctgggtcgacccccgaacatggctgtctttccaagggccacccggtggcccagggatcggcccgggtgtgggacccggatctgaggtatggggcatacccccatgtcccccaccttatgagttttgtggaggcatggcctactgcggcccgcaggtgggcgttgggctggtgccacagggcggactggaaacttcccagccagagggagaagccggggttggtgttgaatctaacagtgatggtgcatcgcctgaaccttgcacggtcacccccggtgccgtcaaactagaaaaagaaaagctggagcagaatcctgaggagagccaggatatcaaggccctccagaaagaattggaacaatttgccaagttattgaagcagaagaggataactcttgggtacacacaggctgacgtgggtctgactctaggcgtgctttttggtaaggttttctcacagaccactatctgtaggttcgaggccctgcagctttcctttaaaaacatgtgcaaactgcggcccctgttacagaaatgggttgaggaggcggataataatgagaatctgcaggagatctgcaaggccgaaacactcgtccaggctaggaagaggaaacgcacatctattgaaaaccgggtcagaggcaatctggaaaatctgtttctccagtgccccaagccaacccttcagcagatcagtcacatcgcgcagcagcttggcttggagaaggacgttgtaagggtgtggttctgcaaccggagacagaagggaaaacgcagttctagcgattacgctcaacgagaggatttcgaggcggctggatcgcccttttctggtggtccagtgtcatttcctctcgcccctggccctcattttggcactccaggctacggtagtccccattttaccgctttgtattcttccgtgcctttcccagaaggagaggcatttcctcctgtctcggtgacaactctaggttcccctatgcacagtaat

SEQ ID NO: 131018 - DNA, 1080 bp, Artificial Sequence
  derived and/or modified sequence
atggccggtcaccttgctagcgattttgcgttctcccctccaccaggcgggggaggagacggacccggcgggcccgagccaggatgggtcgatcccaggacctggttaagcttccagggtccgccagggggacccggaatcggccccggcgtgggccctgggagcgaagtctggggaatccccccgtgccctcctccttacgagttctgtggtggaatggcgtattgcggcccccaggtgggggtcgggctcgtaccccaaggagggctggagacaagccagcccgaaggtgaagcaggggttggagtggagagcaactctgatggagcttctcctgaaccttgcacagttacccccggtgccgtgaagctggagaaagagaagctggagcagaaccccgaagaatcgcaggacattaaggcgctacagaaggaactggaacagttcgccaaacttctgaagcaaaaaagaattaccttggggtatacacaagctgacgtgggcctgactctgggagtgctgttcggtaaagttttttcacagacaaccatttgtaggttcgaagccctgcagttgagttttaagaacatgtgtaaactccgccctctcctacaaaagtgggtcgaagaggccgacaataacgaaaacctacaggagatctgtaaggccgaaacgctagtgcaggcacggaaacgcaaacgaacaagcattgaaaatcgcgtgcgcggtaacctggaaaacctgtttctccaatgccctaaacctacactccaacaaatcagccatatagctcagcagctggggctagaaaaagacgtagtgcgcgtctggttttgcaatcgccgacagaagggcaaaaggagtagttctgactacgcacagcgtgaagactttgaagcagcgggcagcccctttagtggtggtcccgtgtccttccctctcgctcccggcccacatttcggaacacccggctacgggagccctcactttaccgctctgtacagctccgtgccatttcccgagggcgaggcctttccccccgttagcgttactaccctcggtagccccatgcattccaat

SEQ ID NO: 131019 - DNA, 1080 bp, Artificial Sequence
  derived and/or modified sequence
atggcaggacacctggcatctgacttcgctttttccccccctcccggcggcggtggcgatggacctgggggaccggagccagggtgggtggaccctcgaacttggctgagttttcaaggacctcctggaggcccaggtatcggcccaggtgtggggccaggctcggaggtttgggggatccctccatgcccgcctccctatgaattctgtgggggcatggcctactgcggtccccaggttggagttgggcttgtgccacagggcgggctggagacgagccagccggagggcgaggctggagtgggagtggagtctaacagtgatggggcttcccccgagccgtgtaccgtgacacccggcgcagtgaaactcgagaaggagaaactggaacagaatcccgaggaatcccaggacataaaggccctgcagaaggagttggagcagttcgcaaagctgctgaaacagaaaaggataaccctcgggtacactcaggctgatgtcggcctgaccctgggcgtcctgtttgggaaggtattctcccagacaaccatctgcagattcgaagcactccagctgtcttttaagaacatgtgcaaactccgcccactgctccagaagtgggttgaagaagccgataacaacgaaaaccttcaggagatctgtaaagctgaaactctcgttcaagccaggaagagaaagcgtacatcgatcgaaaacagggtcagggggaatctggagaacctcttccttcagtgtcccaagcccacgctgcagcagattagtcatatcgcacaacagttaggtctcgagaaagatgtagtgagggtgtggttctgtaaccgtcgtcagaaaggcaagagatctagctccgattacgcgcagagagaagacttcgaggccgcgggatcacccttctccggaggtccagtgtctttccccttggcccccggtccccactttggaactcccgggtatggttccccccactttacggccctgtactcaagtgtcccgtttcccgagggcgaagcttttccaccggtgtcggtgaccaccctcggatcacctatgcattctaac

SEQ ID NO: 131020 - DNA, 1080 bp, Artificial Sequence
  derived and/or modified sequence
atggctgggcacctggcatctgatttcgcattctcaccaccacccgggggtgggggtgacggcccagggggccctgaaccaggctgggtggacccgaggacatggctgtcgttccagggcccgccaggaggacccgggattgggccaggcgtgggcccaggatctgaggtatggggcatcccaccttgcccccccccctacgagttctgcgggggaatggcctactgcggacctcaagtcggcgtaggtctcgtcccccaggggggcttggagacctctcagccggagggtgaagcgggcgtgggggtggaaagtaatagtgacggcgctagtcccgagccctgcacagttacacccggtgccgtgaagttggagaaagaaaagttagaacaaaatccggaggagagccaggacatcaaggctttacagaaagaactggaacagtttgcaaaacttttgaaacagaagcgcatcaccctggggtatacccaggcggacgtcggcctgaccctcggggtgctgtttggcaaggttttttctcagacaaccatctgcaggttcgaggccttgcagctctcctttaagaacatgtgcaaactgcggccactgctccagaagtgggtggaagaagcagataataatgagaatttgcaggaaatttgcaaagcagaaaccctggttcaggcgaggaagcggaagagaacctcaatcgaaaatcgagttagaggaaaccttgaaaacttatttctgcagtgcccgaagcccaccttacagcaaattagtcacatcgctcaacagcttggtctcgagaaagacgttgtgcgggtgtggttttgtaatcgccggcaaaaaggaaagcggagcagttctgactacgcccaaagggaagacttcgaggccgctggttcaccatttagcggaggaccagtgtcattcccgctcgcacccggccctcactttggcacccctggatatggaagtcctcactttaccgccctctacagctcggtgccttttcccgaaggagaggcgtttccccctgtttccgttacgacattaggttctcctatgcacagtaac

SEQ ID NO: 131021 - DNA, 1080 bp, Artificial Sequence
  derived and/or modified sequence
atggccggtcacctggcctccgactttgcattctctccgccaccgggtggaggaggcgatggccctggcgggcctgaaccgggatgggtggatccgcgcacgtggctgtcgtttcaagggccccccggtggcccaggtatcggtcccggagtggggccgggttccgaagtgtggggaatcccgccatgtccgccgccatatgaattctgcggggggatggcatactgcggcccacaagtgggagtgggcctggtcccccaaggaggtctggagacttcgcagccggagggtgaagcgggggtcggcgtggaatccaacagcgatggcgctagcccggagccatgcaccgtcacgccgggagcagtgaagttggagaaggagaagctcgaacagaacccggaagagtctcaagacattaaggctctccagaaggagctggaacagttcgctaaactgctgaagcagaaacgcattaccttgggatacacgcaggccgacgttggcttgacccttggagttctcttcggcaaggtcttttcccagaccactatttgccgcttcgaggctctgcagctctcgttcaagaacatgtgtaaactccggccgctgcttcagaaatgggtggaggaagctgacaataacgagaatctgcaagaaatctgcaaggccgaaaccttggtccaggcgagaaaacggaagaggactagcatcgaaaaccgagtgcgcggaaatcttgaaaatctgtttctgcaatgcccgaaaccaacgctccaacagatctcccacatcgctcaacaactgggacttgagaaggacgttgtgcgggtgtggttctgcaaccgccgtcaaaaaggaaagagatccagctccgactacgcgcagagagaagattttgaggccgcgggcagcccgttctccggaggcccagtgagcttcccactggccccaggaccgcattttggcactccgggttacggctcacctcacttcaccgccctttactcgtcagtgccattccccgagggcgaagcgttccctcctgtttcagtgaccactctcgggagcccaatgcattcgaac

SEQ ID NO: 131022 - DNA, 1080 bp, Artificial Sequence
  derived and/or modified sequence
atggccggccacctggcctcagattttgcattctcaccaccccccggcggggggggagacggtccaggtgggccagagcctgggtgggttgaccctagaacgtggctgtcctttcagggacctcccgggggaccgggtattggaccaggtgttggccccgggtccgaggtgtggggcataccaccctgcccacctccttacgaattttgcgggggcatggcatattgcggccctcaggtcggagtcggactcgtcccccaaggcggccttgaaacaagtcagccagagggtgaggctggcgtgggggtggagagtaacagcgacggcgcaagtccagaaccttgcactgtgaccccaggagcggtcaagctggaaaaggagaaactggaacagaatcctgaagagagtcaggacatcaaggctctccaaaaagaacttgagcagttcgccaaattgctgaagcaaaagaggataacccttggatacacacaggccgacgtaggactaactctgggcgtcctattcgggaaagtgttttcccagactacaatctgtaggttcgaggcactgcaactctcctttaagaacatgtgtaagttgagaccgttgctccagaagtgggtcgaagaagcagataacaatgaaaatctccaagagatctgcaaggcggagacactggtgcaggccagaaagcgcaaaaggacctctatcgaaaatagggtgagaggcaacctggaaaacttgttcctacagtgtcctaaaccaacactgcagcaaatttcccacatcgctcagcagttgggacttgaaaaggacgtggttcgtgtatggttctgcaaccgcaggcaaaaaggcaagcggtcctccagtgactacgctcagagagaggatttcgaggcggctggcagccccttctctggaggccctgtatcatttcccctggcacccgggcctcacttcggtacccctggatatgggagtcctcactttactgcactgtatagttctgttccctttccagaaggggaagcattccccccagtttctgtaacaaccctgggctcccctatgcacagtaat

SEQ ID NO: 131023 - DNA, 1080 bp, Artificial Sequence
  derived and/or modified sequence
atggctggtcatttagctagtgattttgcttttagtccaccaccaggaggaggaggagacggaccaggaggtccagaacctggatgggttgatccaagaacttggctttctttccaaggaccaccaggaggtcctggtattggaccaggtgttggtccaggatcagaagtttggggaattccaccatgccctccaccatatgaattttgtggtggaatggcatattgtggtccacaagtcggtgttggtttagttccacaaggagggttagaaacaagtcaaccagaaggtgaagcaggagtaggagttgaatctaatagtgatggagcatctccagaaccatgtactgtaactccaggagctgttaaattagaaaaagaaaaattagaacaaaatccagaagaatctcaagatattaaagctttacaaaaagaacttgaacaatttgcaaaattactaaaacaaaaaagaataactcttggatatactcaagcagatgttggattaacgctaggagttttatttggaaaggttttctctcaaactactatttgtagatttgaagctttacaacttagtttcaaaaatatgtgtaaacttagaccattgttacaaaaatgggtagaagaagcagataataacgaaaatttacaagaaatttgtaaagcagaaactttagttcaggcaagaaaaagaaagcgaacttccattgaaaatagggtaagaggaaatcttgaaaatttattcttacaatgtccaaaacctactttacaacaaatttctcatattgcacaacaattaggtcttgaaaaagacgtagttagggtatggttctgtaatagacgtcaaaaaggtaagagatcatcatcagattatgctcaaagagaagactttgaagctgcaggatctcctttttctggaggaccagttagtttcccattagcacctggaccacattttggaacacctggatatggttcaccacattttacagcattatattctagtgtaccattcccagaaggagaagcatttccaccagtttccgttactactttaggatcaccaatgcattcaaat

SEQ ID NO: 131024 - DNA, 1080 bp, Artificial Sequence
  derived and/or modified sequence
atggcgggacatctggcatctgacttcgcattctcgcctccgccaggaggaggtggagatggacctggagggccagaacctggatgggttgatccccgcacgtggctcagcttccaaggaccacctggaggaccgggcatcggaccgggtgtgggacccgggagcgaggtgtggggcattccgccttgtcctcccccgtacgagttttgtggcggcatggcctattgcggcccccaggtgggagtgggactggtgccgcaaggaggactcgaaacttcgcagccggagggtgaagctggcgtcggcgtggagtcgaactccgacggggcttccccggaaccgtgtaccgtgactccgggagccgtgaagctggaaaaagagaagctggaacagaaccctgaggagtctcaggatatcaaggccctccagaaagaactggaacaattcgcgaagctgctcaagcagaaacgcatcaccctcggatacacccaggccgatgtgggactcaccctgggagtgctgttcggaaaagttttctcgcagaccactatctgtagatttgaagcgctgcagcttagctttaagaatatgtgcaaactgcgccctctgctccaaaaatgggtggaagaggccgataacaatgaaaacctgcaagagatctgcaaggccgagactctggtgcaggcacggaagcggaaacggactagcattgagaatagggtcaggggaaatctggaaaatctcttcctgcagtgtccgaaacccacccttcagcaaatcagccacattgcgcaacagctcgggctggaaaaggacgtcgtgcgcgtctggttctgcaaccgcagacagaaagggaagcgctcctccagcgactacgctcagcgcgaggatttcgaagcggcgggatcgcctttctcaggcggacctgtcagcttccctctcgcgccaggccctcactttggtaccccgggatatggatcgccgcattttacggctctctactcatccgtgccgttcccggaaggggaggctttcccccctgtgtctgtcaccactttgggcagcccgatgcactcaaac

SEQ ID NO: 131025 - DNA, 1080 bp, Artificial Sequence
  derived and/or modified sequence
atggccggtcatctggcctctgatttcgcttttagccctccacctggtggtggtggggatgggccaggcggaccagagcccggttgggtcgatccgcgcacatggctctctttccaggggcctcccgggggacctgggattggtcctggcgttgggccggggagcgaagtttggggaatacccccttgcccgccaccatacgaattctgtggcggtatggcttattgcggaccacaagtcggtgttggattggtcccacaaggtggtttggaaacttcacagcctgagggcgaagccggagtgggcgtcgaatccaatagtgatggtgcctctccggagccatgtacagttacacctggtgcagtaaaactggaaaaggagaagctagagcaaaatccagaggaatctcaagacatcaaagctttgcagaaggagttggagcaatttgctaagttgcttaagcagaaacgaataacgttggggtacacccaggcggatgtgggactcacgctcggagtccttttcgggaaggttttttcacagaccactatctgtagattcgaagcactccagttatcatttaagaatatgtgcaagctgaggccactgcttcaaaagtgggtggaggaagcagacaacaatgagaatctacaggaaatctgcaaggctgagactttagttcaggcacgtaaacgaaagcgaacctctatcgagaacagagttagagggaatcttgagaatctcttccttcagtgccctaagcctactttacaacagataagtcatatcgctcaacaattaggacttgagaaggatgttgtgagggtgtggttctgtaatcgtagacaaaaaggtaaaagatcaagctcagattacgctcagagagaggatttcgaggctgccggtagtcctttctcaggtggcccagtttcattcccgctggcccctggccctcacttcggcaccccagggtatggtagtccacacttcacggctctctattcatctgtgcccttccccgaaggcgaggcgtttcctcctgtcagcgttaccacacttggatctcctatgcactctaac

SEQ ID NO: 131026 - DNA, 1080 bp, Artificial Sequence
  derived and/or modified sequence
atggccggacacctggcaagcgacttcgcattttccccaccaccgggtggcggaggcgacggaccaggaggaccggagccaggatgggtggaccctcggacctggctctcctttcaaggccctccaggcggacctggaattggaccaggtgtcggtccaggaagcgaagtctgggggatacctccctgccctccaccttatgaattctgcggcgggatggcctactgtggtccacaagtcggcgtgggccttgtcccccagggtggactggaaaccagccaaccagaaggtgaggcgggcgtgggagtggaatccaacagtgacggcgcgtcccccgaaccttgcacggtgactccaggagcggtcaaacttgagaaggagaagttggaacagaaccccgaagaaagccaagacattaaggccctgcagaaggaactggaacagtttgcaaagctgttgaagcaaaagcggattacgctgggttacacgcaagcagacgtcgggctgacgctcggtgttctgtttggtaaggtgtttagccaaaccaccatctgtagatttgaagcacttcaattgtcgttcaagaatatgtgcaagctccgaccacttctccagaagtgggtggaagaggccgacaataatgagaatctgcaagaaatttgtaaagcagaaaccctggtccaggcacggaagaggaaaagaactagcatcgaaaatcgggtgcgggggaacttggaaaacctgtttctgcagtgcccaaagccgaccctgcaacagatttcacatatcgcacaacagctcggactggaaaaagatgtggtgagagtgtggttttgcaacagacgccagaagggtaaaaggtcatcgagcgattacgcacagagagaggattttgaagcggcaggctccccgttctcaggaggcccagtttcatttcctcttgcacccggaccccatttcggtactcccggatacggatcgcctcatttcactgctctgtactcctcagtgcccttcccggaaggagaagcattccctcccgtgtccgtgaccacgcttggatcgcctatgcactcaaac

SEQ ID NO: 131027 - DNA, 1080 bp, Artificial Sequence
  derived and/or modified sequence
atggcaggccatttggcatccgactttgcctttagccccccacctggtggtggaggggacggacctgggggccctgaaccaggttgggtggacccacgaacctggctttcctttcagggtccaccgggtggaccggggattggaccaggtgtgggtcctggatccgaggtgtggggtattcccccctgtcctcctccatatgagttctgcggtggtatggcgtactgtggacctcaagtcggtgtcggcctcgtgccgcaaggcggactggagacttcgcaacctgaaggggaagccggagtgggtgtagaatccaactccgatggagcatcgcccgagccttgcactgtcactcctggggccgtcaaacttgaaaaggaaaagctggagcaaaaccccgaggagtcgcaagatatcaaggcattgcagaaggagcttgagcagtttgcaaagttgctgaagcaaaaaaggattacccttggatacacgcaagcagatgtgggtctgacccttggcgttcttttcgggaaagtcttttcgcaaaccacgatttgtcgttttgaagcgttgcaactttcctttaagaacatgtgtaagctgcgcccccttctgcaaaaatgggtggaggaagccgacaataacgaaaacctccaggaaatatgcaaggcagaaaccctggtccaggcccggaagcgtaaaagaacctcaatagagaatcgggtgcgcggcaatcttgagaatcttttccttcaatgtccaaagccgactctccagcagatctcgcatatcgctcagcagctgggactggaaaaagatgtcgtgagggtgtggttttgcaaccgcagacaaaagggcaaacgttccagctcagattatgcacaacgggaagatttcgaagcggcaggcagtcccttcagcggtggtccagtctcatttccactggcgccagggccacacttcggcaccccgggatacggctcacctcactttactgccctctactcgagtgtgcctttcccggagggagaggcctttcctcctgtctcggtgactactctgggttcacccatgcattccaat

SEQ ID NO: 131028 - DNA, 1080 bp, Artificial Sequence
  derived and/or modified sequence
atggctggtcaccttgccagcgacttcgcattttcgccgccgccaggaggcgggggcgacggacctggcggcccggagcccggctgggttgacccgcgaacatggttaagcttccagggcccccctggtggtcccgggattggtcctggtgtaggacctggatcagaagtttggggtatcccaccctgcccccccccatacgagttctgtggaggcatggcctactgcggcccacaagtaggcgttggcctggtgccacaaggcggtttggaaacatcccagccagaaggtgaggctggagtgggcgtcgagtcgaatagtgatggagccagtcccgagccctgcacagtcacgccaggggcagtcaagctggagaaagagaagctggagcagaaccctgaggagtcccaggacattaaagcgctgcaaaaggagttggagcagttcgctaagctgctgaagcagaagagaatcacccttgggtatacgcaggccgatgtgggactaacacttggcgtgctattcggcaaggtattcagccagacgacaatttgccgttttgaggctttgcagctctcattcaaaaacatgtgcaagcttcgccctttgctccagaagtgggttgaggaggccgacaacaacgagaacctgcaggaaatctgcaaggccgagactctggtgcaggcgcgaaaaaggaaacgcacctcgattgagaatcgcgtcaggggaaatctagagaacctgttcttgcaatgcccgaaaccaaccttgcagcagatctcgcacatagcacagcagttgggactggagaaggacgtggttcgagtgtggttttgcaaccgtcgccagaagggcaagcgatccagctcggactatgcccagcgagaggacttcgaggcagcaggatcgccattcagtggcggtcccgtgtcattccccttagcccccggtccacactttggaaccccgggctacggctcgccgcactttaccgccttgtactctagcgtccctttccccgaaggagaggccttcccaccggtgtcggttaccaccttgggatcgcccatgcactctaac

SEQ ID NO: 131029 - DNA, 1080 bp, Artificial Sequence
  derived and/or modified sequence
atggccgggcacctggcctcagattttgccttctctccaccgccagggggcggtggtgatggacctggagggccagagccaggttgggtggacccgagaacatggctttccttccaggggccgccagggggtccaggtatcggtcccggggtgggaccagggagtgaggtctggggcattccaccctgtccaccaccgtacgaattttgtggcggaatggcctattgcggtccccaggttggagttggcctggttccccagggagggcttgaaacttcacaaccagaaggagaggcgggggtaggcgttgagagtaattccgacggtgcaagtcccgagccatgcaccgtgacccctggggctgtaaaactcgaaaaagaaaaacttgagcagaaccccgaagagagccaggacattaaggccctgcaaaaggagttggagcaatttgccaaacttctgaaacaaaaacggattaccctgggctacactcaggcagacgtcggacttaccttgggtgttctgtttggtaaggtgttttcacagaccaccatttgccgattcgaagcactgcaacttagcttcaagaacatgtgcaagctccgcccactgctccagaagtgggttgaggaggctgataataatgaaaatctccaggagatctgcaaagccgagactctggtgcaagctcggaagaggaagaggacgtctattgaaaacagagttcgagggaatctggagaacctgtttcttcagtgcccaaagcctaccctccagcagatttctcatatcgcccagcagctggggttggaaaaagatgtggtgcgcgtctggttttgcaacaggcgacaaaaagggaaaagaagctcttccgactacgcgcaaagagaggactttgaggctgctgggagccctttcagcgggggccccgtttcctttcctttggcccctggacctcactttggtacacccggctatgggagccctcacttcacggcgctgtactctagtgtgccattccctgaaggagaggcattcccaccagtctctgtgacgacactcggctctcccatgcactccaac

SEQ ID NO: 131030 - DNA, 1080 bp, Artificial Sequence
  derived and/or modified sequence
atggccggtcacctggctagcgatttcgcgtttagcccgccacctgggggcggcggcgacggacctggcggcccggaacccggatgggttgacccaagaacttggttgtcctttcaaggaccgcccgggggtcctggtattggtccgggcgtgggacctggctcagaagtctggggaatccccccatgcccacccccgtatgaattctgtggaggcatggcatactgcgggccacaggtgggagtcggactggtgccacaggggggactcgagacttcgcagccagaaggagaagccggagtgggtgtcgagtccaatagcgatggcgcatcgcctgaaccgtgcaccgtgacgccaggcgcggtcaagctcgaaaaggaaaaactggaacaaaacccggaggaatcccaggatatcaaggcacttcagaaggagcttgagcagttcgcaaagctgctgaagcaaaaaaggatcaccctcggatacacccaagcggacgtgggcctgacgctgggggttctgttcgggaaggtgttcagccagaccactatttgccggtttgaggcccttcaactgtcgttcaaaaacatgtgtaaactcagaccgcttctccagaaatgggtagaagaagccgacaataatgagaacctccaggaaatttgcaaggcagagactctggtccaagctcgtaagcgcaagcggaccagcatcgagaaccgggtgcgcggaaatctcgagaacctctttctgcaatgcccgaagccaactctccaacagatctcgcatatcgcccaacagctgggactggagaaagacgttgtgagggtgtggttttgtaaccgcagacagaaagggaagcgctcttcgtcggactacgcccagcgggaagatttcgaggcggctggatccccgttctcggggggacctgtgtcattccccctcgcgcccggcccacatttcgggactccaggatacggttcccctcacttcacggcactgtactcttccgtacccttccccgagggcgaagccttcccgccagtctccgtgaccaccctgggtagtcctatgcactctaac

SEQ ID NO: 131031 - DNA, 1080 bp, Artificial Sequence
  derived and/or modified sequence
atggctggacatttggcttctgactttgccttctcaccccctccaggaggcggcggagatggccccgggggaccagaaccaggctgggtggacccccgaacatggctgtcctttcagggaccccccggaggcccgggcatcggtcccggggtgggccccggctctgaggtgtggggaatccccccatgcccgcccccatacgaattctgtggcggaatggcctattgtgggccccaagtgggagtaggactggttcctcagggtggcctcgaaacctcccagccagagggggaggctggcgtcggagttgagtcaaattcagatggcgcatctccagaaccctgtacagtgactccgggggcagtgaagctggaaaaggagaagcttgaacaaaatcctgaggaaagccaagatatcaaggcccttcagaaagaactcgaacagtttgcgaagcttctgaagcagaaaaggattacattgggatacacccaggcagacgttggtctaaccctgggtgtactgttcgggaaagtcttttctcaaactacaatatgccgcttcgaggccctccagctgtccttcaagaacatgtgcaaacttagacccctgttgcagaagtgggtagaggaggccgacaacaatgagaatctgcaggaaatctgcaaggccgagacacttgtccaggctcggaaaaggaaaagaacatctatcgagaacagggttagaggcaacctggagaacctgtttctgcagtgtcccaagcctaccttacagcagatctctcatatcgcccagcaattaggtctggagaaggatgtggttagggtctggttctgtaataggaggcagaagggaaaaagatctagtagtgactacgctcagcgggaggactttgaggctgcaggttcacccttctctggtgggccggtatccttcccgttggctccaggccctcacttcggaactcccgggtacggctctccacatttcacagcactatattcttccgtgccgtttcccgaaggtgaggcgttccctcccgtctccgttactactctagggagccctatgcactcgaac

SEQ ID NO: 131032 - DNA, 1080 bp, Artificial Sequence
  derived and/or modified sequence
atggccggacaccttgccagcgactttgcctttagcccgccaccgggtggcggcggggacggaccaggtgggccagagcccggttgggtggacccccgtacatggctgagtttccagggaccccccggcggccctggcattggtccgggtgtcggccccgggtcggaggtatgggggatccctccttgtccgccgccctatgagttctgtggggggatggcttattgcggaccccaagtgggcgtcggcctggtccctcaaggtggcctcgaaacctcccaacctgagggcgaagccggcgtcggcgtcgaatctaatagtgatggtgcatctccagagccttgcactgtgacccccggggccgttaaactggagaaagaaaaattggaacagaacccggaagaaagccaggatataaaagcactccagaaagagctggaacagttcgctaagctacttaagcaaaagcgcattacactgggatacacacaagcggacgttgggctgactcttggtgtccttttcggtaaagtattctcccaaacaacaatttgtaggtttgaagctcttcaactgtctttcaagaatatgtgtaagttgaggccacttttgcagaagtgggtggaagaagctgacaacaacgagaatcttcaggaaatctgtaaggctgagacactcgtgcaagctaggaagcgtaaacgtacatccatcgagaatcgggtccggggcaacctggagaacctatttctccaatgtcctaagcctacccttcagcagatctctcacatcgctcaacagctcggtcttgaaaaggatgttgtacgggtttggttttgcaaccgacggcagaagggcaagcgaagcagctctgactacgcccagagggaagatttcgaggcggccggttctcctttctcggggggccctgtttcgttccctttggcccccggaccccatttcggcactcccggctacggtagcccccattttacggctctgtattcttctgtcccctttccagaaggcgaggcattcccacccgtttcagttactacacttggctctccaatgcattctaat

SEQ ID NO: 131033 - DNA, 1080 bp, Artificial Sequence
  derived and/or modified sequence
atggcgggtcatcttgcatcggactttgcgttctcgccgccaccggggggcggtggcgacggtcctggtggcccggaacctggctgggtggatcctcggacctggctgagctttcaagggccacccggggggcccggcattggacccggagtgggtccaggctccgaagtgtggggaatccctccgtgcccgcccccatacgagttttgcggcggtatggcttactgtgggccacaggtgggagtgggactcgtccctcaagggggtttggaaacgtcgcaaccggaaggagaagcgggcgtgggggtcgagtcaaatagcgacggcgcgtcccctgaaccttgtactgtcacgccaggggcagtgaagctggagaaggaaaaacttgaacagaaccccgaggaatcccaggatatcaaagcactgcagaaggagcttgaacaatttgcaaagttgcttaaacaaaaaaggataactctcggttatacccaggccgacgtgggattgaccctcggagtcctttttggtaaagtgttttcccagacgacgatttgtcgcttcgaagcacttcagctgtcgttcaagaacatgtgtaagctgcgtccccttctgcaaaaatgggtggaggaggccgataacaacgagaacttgcaagagatttgtaaggccgaaacccttgtgcaggctcggaaaaggaagcgaacttccattgaaaaccgcgtccgaggaaatctcgaaaacctttttctgcagtgccccaagccgactctgcaacaaatcagccatattgcacaacaacttggccttgaaaaggatgtcgtgcgcgtgtggttttgtaatagacgtcaaaagggaaagagaagcagcagcgattacgcacaaagagaagatttcgaggcagcagggtccccgttttccggaggaccggtttccttccctcttgcaccaggcccacattttggaacgcccggatacggatcgccacactttactgctctttactcatcagtgccttttccagaaggagaagcattccctccagtgtcggttaccaccctgggttccccaatgcacagcaac

SEQ ID NO: 131034 - DNA, 1080 bp, Artificial Sequence
  derived and/or modified sequence
atggcaggacaccttgcctctgatttcgctttttcaccacccccagggggaggaggggatggcccagggggccctgaacccggctgggtggacccacgcacgtggttgtcgttccaggggcccccgggggggcccggcattggcccgggggttggcccaggctcagaagtgtggggcatacccccctgcccacccccctatgagttctgtgggggaatggcatactgtggtcctcaggttggcgtgggcctcgtgcctcagggcggtttagagacctctcaacccgagggggaggccggagtgggtgtagagagcaactctgacggggcatcccctgaaccctgcaccgtgaccccgggtgccgtaaaactcgaaaaggagaagctggagcagaacccagaagaatcccaggacataaaggccctgcagaaagaactggaacagttcgccaaattgttgaaacagaagagaatcactctgggctatacccaggccgatgtgggcttgacactaggggtcttatttgggaaggtattttctcagactactatctgtaggttcgaagcacttcaactgtcgtttaagaacatgtgtaagctccggcccttgctccaaaagtgggtcgaagaagcagacaataatgaaaacctgcaagaaatttgtaaggcagagaccttggtgcaggctcgcaagcggaaaaggacttctatagagaatagagtccgcgggaatctggaaaatctgtttctgcaatgcccgaaacccaccctgcagcaaatttctcatattgcccagcagctcggcctcgaaaaagacgtggtcagagtgtggttctgtaaccgaaggcaaaaaggcaagcgatcttcgagcgactatgcccagagggaggatttcgaagctgcggggtcacctttttccggcggccccgtgagctttcctctggcccccggccctcacttcggcacccccggctatggctccccccattttacagccctttattcgtcagttccattccctgaaggggaggcatttccacctgtgtccgttaccacattggggagcccaatgcactcaaat

SEQ ID NO: 131035 - DNA, 1080 bp, Artificial Sequence
  derived and/or modified sequence
atggccggccacctggcatctgactttgctttcagcccccctcctggcggcggaggcgacggcccaggggggcccgagccaggctgggtggatccaaggacctggctgtcctttcagggccctccgggaggaccaggtatcggccctggggtgggccctggctcagaggtgtggggcattcctccctgccctcccccatacgaattttgtggcggcatggcctattgtggcccccaggtgggagtggggctggtgccgcagggtggactggagacatcacaacctgaaggcgaggctggggtgggagtggagtccaattcagacggcgcaagtcccgagccttgcaccgtgacgccgggggcagttaagctggagaaggaaaagctcgagcagaacccagaagaatcccaggacattaaagccctgcaaaaagaattggaacaattcgcaaagctgctaaagcagaagcgtattactctcggatatacccaggcggacgtaggcctaacactcggggtgctcttcgggaaggtattctctcaaacaacgatctgtaggtttgaagccctccagttgtcctttaagaatatgtgtaagctgaggccacttctgcagaagtgggtggaggaagccgacaataacgagaaccttcaggaaatatgcaaagccgaaactttagtgcaggcccgcaagagaaagagaacctccatagaaaatagggtcagaggaaacttggaaaatctctttctgcaatgcccaaagcccacgttgcagcagatttctcacattgctcagcagctgggtttagagaaggatgttgtgagggtttggttttgtaaccgccgccaaaaaggcaaacgcagctcctccgactacgctcagcgggaggactttgaggccgccggcagtcccttttctggtggaccagtgtcatttcctctggcccctggtccccactttggaacccctggatatggtagcccccatttcacggccctgtacagttccgtgccgttcccagagggtgaggccttcccacccgtgtctgttactactctgggctcgccgatgcactccaat

SEQ ID NO: 131036 - DNA, 1080 bp, Artificial Sequence
  derived and/or modified sequence
atggcgggacacttggcgtccgattttgcatttagcccccctccaggagggggcggtgacggtcctggtggtcctgaaccaggctgggttgaccctcgcacctggctgagctttcaaggtcctccaggcggaccgggcattggacccggagtcggaccaggatcggaggtctggggaatccctccctgtccccctccatatgagttttgcggcggtatggcatactgtggtccccaagtcggagtgggactggtgcctcagggtggccttgaaacttcgcaacctgaaggcgaagcgggcgtgggagtggagtccaactcggatggggcatcgccggagccgtgcaccgtgactcctggtgccgtgaagctcgaaaaggaaaaacttgagcaaaacccagaagaatcccaagacataaaggcactgcagaaagaactggagcaatttgcaaaactgctgaagcagaagcgtatcactcttggttacacccaggcagatgtgggcctgaccctgggggtgctctttggcaaggtgttttcacaaactacgatttgccgttttgaggcacttcagctttccttcaagaacatgtgtaaactccggccgcttctccaaaaatgggtggaagaagcagacaacaatgagaatctgcaggaaatttgtaaggcagaaaccctcgtgcaggcgagaaagagaaagcggacttccattgaaaacagagtgcgtggaaatctggaaaacctgttcctccaatgtcctaagcccactctccagcagatttcacatatcgcccaacaactgggactggagaaggatgtcgtgcgcgtctggttctgtaatagacgccaaaagggcaagagatccagctccgactacgcacagagagaggatttcgaagctgcaggttcccctttttccggcggtccagtttcatttcctttggcacctggcccacattttggaacgccaggttacggatcgcctcattttaccgcactgtatagctcggtcccttttcctgagggcgaggccttcccacccgtcagtgtgaccaccctgggatctcctatgcactcgaat

SEQ ID NO: 131037 - DNA, 1080 bp, Artificial Sequence
  derived and/or modified sequence
atggcaggacatctggcttcagactttgcattttcacctcctccaggaggcggaggtgacggacctggaggcccggaaccaggatgggtggacccgcgcacttggctctcgtttcaaggtcctccgggtggcccaggtattggtccgggagtgggtccaggaagcgaagtgtggggaataccaccatgtcccccgccctacgagttttgcggagggatggcatactgcggtcctcaagttggtgtcgggctcgttccgcaaggaggactcgaaaccagccaacctgagggcgaggctggtgtgggtgtggaatcgaactcagacggggcttcacccgaaccctgtacggtcaccccaggggcagtcaagctggagaaggaaaagctggagcagaacccagaggaatcacaggacatcaaagcacttcagaaggaactggagcagttcgccaagctgcttaagcaaaagcggattaccctggggtacacccaagcagatgtcggattgactctgggagtgctgttcggaaaggtgttttctcagaccaccatttgtaggtttgaagcattgcaactgagctttaagaacatgtgtaagctccgcccactgcttcaaaaatgggtggaagaggcggacaataatgagaacctgcaagagatttgtaaggcagagactcttgtccaggcacgaaagagaaaaagaacctcgattgaaaaccgtgtgcgcggaaacctggaaaacctgtttcttcaatgtcctaagccaaccctgcaacaaatctcccatattgcacaacaactgggacttgagaaggatgtggtgcgggtctggttctgcaataggcgtcaaaaaggcaagcgctcttcgtcggattacgcgcagcgagaagattttgaggcagcaggatcaccattcagcggtggtcctgtgtccttccctctggcaccgggaccacactttggcacccctggatacggctcccctcattttactgcactctattcaagcgtgccgtttcccgaaggtgaagccttccccccagtgtccgtgactactctgggctctccgatgcattccaac

SEQ ID NO: 131038 - DNA, 1080 bp, Artificial Sequence
  derived and/or modified sequence
atggcgggtcatttagcgtcggattttgcgttttcgccgccgccgggtggtggtggtgatggtccgggtggtccggaaccgggttgggttgatccgcgtacgtggctatcgtttcaaggtccgccgggtggtccgggtataggtccgggtgtaggtccgggttcggaagtatggggtataccgccgtgtccgccgccgtatgaattttgtggtggtatggcgtattgtggtccgcaagttggtgttggtctagttccgcaaggtggtctagaaacgtcgcaaccggaaggtgaagcgggtgtaggtgttgaatcgaattcggatggtgcgtcgccggaaccgtgtacggtaacgccgggtgcggttaaattagaaaaagaaaaactagaacaaaatccggaagaatcgcaagatataaaagcgttacaaaaagaactagaacaatttgcgaaattattaaaacaaaaacgtataacgctaggttatacgcaagcggatgtaggtttaacgctaggtgtactatttggtaaagttttttcgcaaacgacgatatgtcgatttgaagcgctacaactatcgtttaaaaatatgtgtaaactacgtccgttactacaaaaatgggtagaagaagcggataataatgaaaatctacaagaaatatgtaaagcggaaacgttagttcaagcgcgaaaacgaaaacgtacgtcgatagaaaatcgagtacgaggtaatctagaaaatttatttttacaatgtccgaaaccgacgctacaacaaatatcgcatatagcgcaacaattaggtctagaaaaagatgttgtacgtgtttggttttgtaatcgtcgtcaaaaaggtaaacgttcgtcgtcggattatgcgcaacgagaagattttgaagcggcgggttcgccgttttcgggtggtccggtttcgtttccgctagcgccgggtccgcattttggtacgccgggttatggttcgccgcattttacggcgctatattcgtcggtaccgtttccggaaggtgaagcgtttccgccggtatcggttacgacgttaggttcgccgatgcattcgaat

SEQ ID NO: 131039 - DNA, 1080 bp, Artificial Sequence
  derived and/or modified sequence
atggccggacacctcgcctctgatttcgcctttagcccaccacctggcggaggaggcgatggaccaggtggacccgagccggggtgggttgacccccgaacctggctgagctttcaggggccgcctggtggccccgggattggcccgggagtggggccagggagtgaggtttgggggatccccccttgtcctccaccatacgaattctgcggtgggatggcctactgcggaccgcaggtcggggtcggccttgtgccacagggtggcctggagacgtcccagcccgaaggagaagcgggagtgggagtagagagcaattctgacggggctagccccgagccctgcaccgtgacgcctggcgcagttaagctggagaaagaaaagctggaacagaatccggaggagagtcaggatatcaaggccctgcaaaaagagcttgagcagttcgccaaattactgaaacagaagcggattacactggggtatactcaggctgacgtgggactgacactaggcgtgttattcgggaaggtgttctcccagaccacaatctgccgttttgaagctctgcagctttcatttaaaaatatgtgcaagctgaggcctcttttgcagaagtgggtggaagaggccgataacaacgaaaaccttcaggaaatttgtaaggccgagacattggtgcaagcacgaaagcggaaacgtacctccatcgagaatagagtaaggggcaatctggaaaatctttttctgcagtgccccaaaccaaccttacagcagatctctcacatagcacagcagctaggcctggagaaggatgtggtccgcgtctggttctgcaatagacggcagaaaggtaagaggtccagctccgactacgctcagcgagaggattttgaggccgctgggtctcccttttccggaggcccagtttcttttccattagcccctggaccacattttggcactcctgggtacgggtctccgcacttcacggcactctacagttccgtgccatttcctgaaggggaagctttccctcccgttagtgtgaccacactgggaagtccgatgcactctaat

SEQ ID NO: 131040 - DNA, 1080 bp, Artificial Sequence
  derived and/or modified sequence
atggccggacacctggcgtccgactttgccttctccccgcctcctggaggcggcggagacggaccggggggacctgaaccgggatgggtggatccgcgcacctggctctcattccagggaccgccgggaggaccagggatcggaccaggagtgggaccggggtccgaggtctggggaatccccccttgcccgccgccatatgagttctgcggaggaatggcatactgcggaccgcaggtgggagtgggactggtgccgcagggaggcctcgaaacgtcgcaaccggagggagaagcaggtgtgggagtggaatcaaactcggatggagcatcacccgagccctgcaccgtgaccccgggagcagtcaaactggaaaaggaaaagctggaacaaaacccggaggagtcgcaggacattaaggcactgcaaaaagaactggaacagttcgcgaaactgctcaagcaaaagagaatcaccctgggctacactcaggcagatgtgggactcaccctcggggtgctgttcggaaaggtgttcagccaaacgactatatgccggtttgaagcgctgcaactgtcatttaagaatatgtgtaaacttagaccactgcttcagaagtgggtggaagaagccgacaataacgaaaatctgcaggaaatctgcaaggccgagactctggtgcaagcacgcaaacgcaagagaacttccattgaaaaccgggtgaggggcaacctcgagaacctgtttctgcaatgcccaaagccaactttgcaacagatctcccatatcgcacagcagcttgggctggagaaagacgtggttcgggtgtggttttgcaaccgcaggcagaaaggaaagcgctccagcagcgactacgcccaaagagaagattttgaggccgcgggctccccgttctccggaggaccggtgtcgttcccgctcgctccgggtccacactttggcactcctgggtacgggtcaccacattttactgccctctactcatctgtgcctttccctgaaggggaagcgttcccacctgtgagcgtgacgaccctggggtcgcctatgcactcgaac

SEQ ID NO: 131041 - DNA, 1080 bp, Artificial Sequence
  derived and/or modified sequence
atggccggccatcttgcttcggactttgccttctcccctcctcccggcgggggcggcgatggtcctggaggtccagagcccggctgggtggatcctcggacatggctgagcttccagggaccccccggcgggccaggaattgggcctggagtgggacctggtagcgaagtgtgggggatacctccatgtcctcctccatacgagttctgtggaggaatggcctattgcgggccgcaagtgggagttggcttggtgccacagggcggactcgagaccagtcaaccagagggggaggccggagtcggcgtggaaagtaattccgatggcgccagcccagagccttgtacggtgaccccgggcgccgtgaagctggaaaaagaaaagttggagcaaaatcccgaggaatctcaggatataaaggctctgcagaaggaacttgaacagtttgccaaactgcttaagcagaaaaggataaccctgggctatacacaggccgatgtagggttgacgctaggcgtgctgtttggcaaagtcttctctcagacaacaatctgtcgtttcgaggccttacaattgtcttttaagaacatgtgcaaactccgaccgctattgcagaagtgggtagaggaagctgataataacgagaacctccaagagatctgcaaggcagagaccctggtgcaggctcgaaaacgaaaacggacatctatcgaaaacagggtgcggggtaacctggaaaatctgttcctccaatgtcccaagcccacattgcagcagatttctcatatcgcacagcagctgggtctggaaaaagatgtagtgcgggtgtggttttgtaatagacggcagaagggcaaacggagttcgtctgactacgctcagcgggaagattttgaggcagcggggagccccttctcaggtggtcctgtgtccttcccactcgccccaggcccccactttggtacacctgggtatgggtcaccccacttcacagcactgtacagctcagttccttttcctgagggtgaagcttttccacctgtctcagtcaccacacttggatcccctatgcattctaac

SEQ ID NO: 131042 - DNA, 1080 bp, Artificial Sequence
  derived and/or modified sequence
atggcagggcatttggcaagcgacttcgcattttcacctcctcctgggggaggaggtgacggtcccggtggaccggagccgggatgggtcgatccacggacctggcttagcttccagggtccacctggtggaccaggtatcggtccaggggtggggcctggctccgaagtctggggaattccgccatgtcctcctccttacgagttttgtggtggtatggcatactgcggaccccaggtgggtgtgggtctggtgccccagggaggtctggagactagccaacctgagggggaagctggtgttggagtggagagcaacagcgatggggctagcccagagccctgtaccgtgacgccaggagcagtgaaactcgagaaagaaaagttggaacagaatcctgaggaatcccaagatatcaaggccttgcaaaaggagctcgaacaatttgcaaagctccttaaacagaaaaggattactctgggatacacccaggcggacgtggggcttacccttggagtgcttttcggcaaggtgttctcgcagaccacgatctgccgctttgaagccctccagctgagcttcaagaacatgtgcaaactgcggcctcttctgcaaaagtgggtggaagaagctgacaataacgaaaaccttcaagagatctgcaaggcagaaacccttgtccaggcgcgcaagcgaaagagaacctcgatagaaaacagagtgagaggaaatttggagaacctttttctgcaatgtccaaagccaaccctgcagcaaatctcgcatatcgcccagcaattgggacttgaaaaggatgtagtcagagtgtggttctgtaacaggcggcaaaaaggtaagcgaagctcgagtgattacgcgcagagagaggattttgaagcagcaggatctcccttttccggaggaccagtgtctttccccctggcacctggccctcatttcggcacgcccggatatggttcgccccattttacggccctttactcctcggtgccgtttcctgagggagaagcatttcctccagtgtcggttaccactctcggatcccctatgcactctaac

SEQ ID NO: 131043 - DNA, 1080 bp, Artificial Sequence
  derived and/or modified sequence
atggctggccacctggcttcagatttcgctttctcgccaccccctggcgggggaggcgacgggcctgggggaccagagccagggtgggtcgacccccggacctggctgagttttcagggacctccaggcgggccagggatcgggccgggggtgggccccgggagcgaagtgtggggaatccccccctgccctccaccgtatgagttctgcgggggaatggcctattgcggtccccaagtgggcgtcggcctggttcctcaaggcggtctcgaaactagtcagcccgaaggagaagccggggtaggcgtagaatccaattccgacggggcttccccggagccatgcaccgtgactcccggagcagtcaaattagagaaggagaaactcgaacagaaccccgaggagtcgcaagacattaaggctctgcagaaggagcttgagcagtttgcgaagttgttgaaacagaagagaatcaccctaggatatacccaagcggatgtaggcctcactctcggcgtgctttttggaaaggtgttttctcagactactatatgcaggtttgaggcacttcaactgagcttcaaaaacatgtgtaaattaaggcccctgctgcaaaaatgggtagaggaggcagacaacaatgaaaatctgcaggaaatttgcaaagcagaaactctggtccaagctaggaaaagaaaacggacctctatcgagaacagagtacgaggcaatctggagaatctgtttctacagtgcccaaagcccactctgcagcagatctcacacatagcccaacagttggggttggagaaggatgtagtcagagtgtggttttgcaaccgacgacagaagggaaagaggtcatccagtgattacgcccaacgcgaggacttcgaagcagccggaagtccgttctctgggggtccagttagctttcccctggccccaggaccgcattttggcacgcccggctacgggtccccgcactttacagccctgtattccagcgtacctttccccgaaggcgaggcatttcccccagtgtccgtgaccaccctggggagccccatgcattctaat

SEQ ID NO: 131044 - DNA, 1080 bp, Artificial Sequence
  derived and/or modified sequence
atggcaggccatcttgcctctgacttcgccttttccccacccccgggtggcggcggggacggacccggtggaccagagcccggatgggtggatcctaggacatggctgagctttcagggccctcccggtggacctggaattgggcctggagtcggaccgggatctgaagtgtggggaatccccccctgcccaccaccgtatgagttttgtgggggtatggcatattgtggtccccaagtgggcgtggggctggtcccccagggaggtcttgagactagtcaacctgagggggaggccggtgttggggtggagtcaaactccgacggcgcctcccctgaaccctgtaccgtgactcctggagctgtaaagctggaaaaggagaagctggagcagaaccccgaggaatctcaggatatcaaggcccttcagaaagagctggaacagttcgctaagctgctgaagcaaaagagaatcacacttggctacacccaggcggatgttggacttaccctgggcgtgttgttcgggaaagtgttttcacagacgacgatctgcagatttgaggcactgcagctgagcttcaaaaacatgtgtaagctgcggcccctgctccagaaatgggttgaggaagcagacaacaacgagaatctgcaggaaatctgcaaagctgagacccttgtgcaggcaaggaagaggaaacggacatcaatcgaaaatagagtacgcggcaatctcgaaaacttgtttcttcagtgtcccaagcccaccctgcagcagataagccacattgcccaacagctcggactcgaaaaggacgttgtgagagtttggttctgcaacaggcgccagaagggaaagagatcaagttcagattatgcacagcgcgaggattttgaagctgccgggtcccccttttcaggcggtcccgtctcattcccactggctcctggaccccactttggcactccgggctatggttcccctcactttaccgcactttattctagcgtgcctttccccgaaggtgaggcgttcccaccagtatctgtgaccacccttggatctcccatgcactcaaat

SEQ ID NO: 131045 - DNA, 1080 bp, Artificial Sequence
  derived and/or modified sequence
atggcgggacacctggcatcagatttcgccttctcgccgccaccaggcggaggcggcgacggtcccgggggtcctgagcccgggtgggtggacccgaggacctggcttagcttccaggggccgccaggcggccccggaatcggtcccggagtggggccaggaagcgaggtgtgggggattccgccgtgcccgccaccgtacgaattttgtgggggaatggcatactgcggacctcaggtgggagtgggactggttccgcaaggcggcctcgaaactagccagccggagggagaggccggggtgggagtcgagtcgaactccgatggagccagtcccgagccatgcactgtcactcccggcgccgtgaagctggagaaagaaaagctcgaacagaatccggaagaatcgcaagacatcaaagccctgcagaaggagctggagcagtttgcaaaacttctcaaacaaaagcggatcacccttggatatacccaagccgacgtgggattgacgctgggcgtcctgttcgggaaggtattctcccagacgaccatctgcagattcgaagcgctccagctgagcttcaagaacatgtgcaagctccgaccgttgcttcagaagtgggtggaagaagccgataacaatgaaaacctgcaggaaatttgcaaggcggaaaccctggtgcaagcgcggaaaagaaaacggacttcgatcgaaaaccgcgtcaggggaaacctggagaatctcttcctgcagtgcccaaagccaaccctgcagcagatttctcatatcgcccagcaattgggattggagaaggacgtggtgcgcgtgtggttttgtaaccggagacaaaagggaaagcgttcctcctcagattatgcacagcgcgaggactttgaagcagccggaagccctttctccggagggccggtgtcgtttcccctcgcgccaggaccgcacttcggaactcctggctacgggagccctcattttaccgcattgtactcctcagttccctttccagaaggagaagccttccctccggtgtcggtgactaccctggggagcccaatgcattcgaat

SEQ ID NO: 131046 - DNA, 1080 bp, Artificial Sequence
  derived and/or modified sequence
atggctggacacctggcttcagatttcgcatttagcccccctccaggtggtggcggtgacggccccggaggtcctgagcctggctgggtggaccctcgcacctggttgtcctttcagggtccaccaggtggcccgggtattggacccggtgtcggcccaggttccgaagtttggggaattccaccatgtccacctccatacgaattctgtggaggtatggcttattgcggccctcaggtgggagttggtctcgtcccacagggtggcctcgagacatcacaaccagaaggtgaggctggtgttggtgttgagtctaacagcgatggagcatccccggaaccttgcaccgtgaccccaggtgccgtcaagctggaaaaggaaaagctcgaacaaaaccctgaagaatctcaggacattaaggccctgcagaaggaacttgagcaatttgctaaactgttgaagcagaagaggattacgttgggatatacccaggccgacgtaggtcttacccttggcgttttgttcggaaaagtgttctcacaaacaaccatttgcaggtttgaggccctgcagcttagtttcaaaaatatgtgcaagcttaggcctttgctgcaaaaatgggtcgaagaagcggacaataacgaaaatttgcaggagatctgcaaagctgagactctcgtgcaggcccgcaagcgcaagaggacctctatcgagaacagggtaagaggaaatttggagaacctctttctccagtgtccgaagccaaccctgcaacaaatctctcacatagctcagcaattgggactcgaaaaagacgtggtaagggtatggttttgcaaccgccgccaaaagggaaaacgcagctcctcagattacgctcaaagggaagattttgaggctgccggctctcccttctcaggcggcccagtgagttttcctctcgcccccggaccccattttggaacccccggttacggctctcctcactttacagccctgtacagtagtgttccgtttccggaaggcgaggcatttccaccagttagcgtaaccacgctgggctcacccatgcactccaat

SEQ ID NO: 131047 - DNA, 1080 bp, Artificial Sequence
  derived and/or modified sequence
atggctggacatcttgcatccgactttgcattctcccccccacctggaggaggtggtgacggtccaggtggtcctgagcccggctgggtcgatcctcgcacctggctgtcctttcagggtccacctggcggacccggtattggacctggagtcggcccaggaagcgaggtttggggcattcccccttgcccccctccctacgaattttgcggtggaatggcttattgcggtcctcaggtcggagttggcctggtgccccagggaggcttggagacctcccaaccagaaggagaagccggcgtaggtgtggagagcaattccgatggagcatcccctgaaccctgcaccgtgacacccggagcagtgaaactggaaaaagagaagttggagcaaaatccagaggaatcccaagacataaaggctctgcagaaagaactggagcagttcgctaagctcctcaaacaaaaaagaattaccctgggatacacccaggccgacgtgggacttacccttggcgtgttgttcggcaaggttttttcccagactactatctgcaggttcgaggctctccagctgtctttcaagaacatgtgtaagctccgccccctcctgcagaaatgggttgaagaagctgacaacaacgagaaccttcaggagatctgcaaagccgagaccctcgttcaagcacgcaagagaaagcgcaccagcatagaaaacagggtgcgtggaaacctcgagaacctgtttctccagtgcccaaagccaaccttgcagcaaatcagtcacattgcacagcagctgggcctggagaaggatgtggtccgcgtgtggttctgcaatagacgccagaagggaaaaaggtcatcatccgactacgctcagagagaggatttcgaggctgccggctctccctttagcggcggcccagtgagtttccctctcgcacccggaccacactttggtacccccggttacggatcacctcatttcacagctctgtactcctccgttccttttcccgaaggagaagctttccctcctgtgtctgtgaccactctcggttcccccatgcacagcaac

SEQ ID NO: 131048 - DNA, 1080 bp, Artificial Sequence
  derived and/or modified sequence
atggcaggacatctggcatcagatttcgcattttcccctccacctggtggaggcggggacggaccgggtggtccagaacccggatgggtggacccgcggacttggctctcgttccaggggccacccggcgggccgggaattggaccgggagtgggcccgggatcggaggtctggggaatcccgccctgtccgccaccatatgagttctgcggtggaatggcctactgtggtccgcaggtcggggtgggccttgtaccacaggggggattggaaacttcgcaaccggaaggagaagctggggtgggcgtcgagagcaactctgacggagcgagcccagagccttgcaccgtgactccaggagcagtgaagctcgaaaaagagaaactggagcagaatccggaagagtcacaagatatcaaggcccttcagaaggaacttgagcagtttgctaagctgttgaagcagaagcgtataacgctcggatacactcaagccgatgtcggcctgaccttgggagtgctgtttggaaaggtgttctcgcaaactactatctgtcgattcgaagcgctgcagctgtcctttaagaacatgtgtaaactccggcccctcttgcaaaaatgggtcgaggaggctgacaacaacgaaaatctgcaagaaatctgcaaagcggaaactctggtgcaggcccggaagcgcaagcggacttcaatcgaaaaccgcgtgcggggaaacctggaaaatctcttcctgcagtgcccaaagccaaccctgcagcaaatctcccatatcgcgcagcagctgggcctggagaaagacgtggtgcgggtgtggttttgtaacagaaggcagaagggaaaaaggtcatccagcgattacgcccagagagaggactttgaagccgccggctcgcctttctcaggaggaccggtatcattcccgctcgcgccgggcccacacttcggtaccccgggatacggttccccacacttcaccgccttgtacagctcggtgccttttcccgagggagaggccttcccgccggtgtccgtgactaccctgggctcacctatgcactcgaac

SEQ ID NO: 131049 - DNA, 1080 bp, Artificial Sequence
  derived and/or modified sequence
atggctggacatttggcctcggattttgcgttctccccacccccgggcggtgggggcgatggccctggaggtcctgaaccaggttgggtggatcctagaacctggctgtcatttcaaggtccaccgggaggacctggtatcggaccaggagtgggtcctggaagcgaagtttggggtattcccccgtgcccacccccttacgagttttgcggcggtatggcttactgcgggccccaagtcggggtgggacttgtgcctcagggcgggctcgaaacgtcgcaacctgaaggagaagcaggtgtgggtgtggaatcgaattcggatggtgcatcgcccgaaccttgcaccgtgactcccggtgcagtgaagctggagaaagagaagctcgaacagaatccagaagaaagccaggacattaaggctctgcagaaagaacttgagcaattcgcaaaattgttgaagcaaaaacgtatcactctgggctacacccaggctgacgtcggccttacccttggggttttgtttggtaaggtcttttcacagaccactatttgtcgcttcgaggcactgcaactgtccttcaagaacatgtgtaagctgcggcctcttcttcaaaagtgggtcgaagaggccgacaacaacgaaaaccttcaagaaatttgtaaggcagaaaccctggtgcaggcaaggaagcgaaaacgtacctccatcgaaaaccgagtgagaggaaacctggaaaacctgtttctgcagtgtccaaagccaacgcttcagcagatatcccatattgcacagcaacttggactggagaaggatgtggtgagggtgtggttttgtaacagacgccaaaaagggaagcggtcctcgtccgattacgcacaacgcgaggacttcgaggcagccggatctccgttttcgggcgggccggtgtcgtttcctcttgcaccaggacctcattttggaaccccgggctatggctcacctcactttaccgcactctacagctccgtgccctttccagaaggtgaagcgttccctccagtgtcggtgaccacgcttggatcgcctatgcactccaac

SEQ ID NO: 131050 - DNA, 1080 bp, Artificial Sequence
  derived and/or modified sequence
atggccggacatctcgcatctgacttcgctttctcaccccctcctggaggaggtggtgatgggcctggcggacctgaacccggttgggtggaccctaggacctggctgagcttccagggaccacctggtggacctggcataggtccgggagtgggccctggttccgaggtgtggggaatccctccttgcccaccaccatacgagttttgcggaggtatggcctactgtggtccacaagtcggggtgggactcgtcccgcaggggggtcttgaaacctcgcaacccgagggagaggccggggtgggcgtcgagagcaacagcgatggagcatccccagaaccttgtaccgtgactcctggagcagtgaagctggaaaaggaaaaacttgagcaaaacccagaagaatcccaggatatcaaggcactgcagaaggaactggaacaatttgcgaagttgctgaagcagaagcggatcaccctggggtacactcaggccgatgtgggactgaccctcggagttctttttggtaaagtgtttagccaaaccaccatatgtcggtttgaggcactgcaactctcgttcaagaacatgtgcaagttgaggccactgcttcaaaagtgggtggaggaagcagataacaatgaaaacctgcaggaaatttgtaaagcagagactctggtccaggcgaggaagcgtaagagaacctccattgagaaccgcgtccggggaaatctggagaacctgtttctgcaatgtccaaagccaactcttcagcagatttcccatatcgcccagcagctgggactcgaaaaggatgtggtgcgagtgtggttttgtaataggcgacagaagggaaaaagatcctcaagcgactacgcacagcgggaagattttgaagccgccgggtcgccattttccggaggccctgtgtcgtttcctctggcaccaggcccccacttcgggacgcctggttacggatccccgcattttacggcactgtactcgagcgtgccttttccagaaggcgaagcatttcctcctgtgtccgtcaccacgctggggtcgcctatgcacagcaac

SEQ ID NO: 131051 - DNA, 1080 bp, Artificial Sequence
  derived and/or modified sequence
atggccgggcacctggcatccgattttgccttttcacctcccccaggcgggggaggcgacggccccggcggccccgagcccgggtgggtggacccacggacgtggctgtcattccaggggcctccgggcgggcccgggattggtccaggggtgggcccaggatcagaggtgtgggggatcccaccttgccctcccccgtacgagttctgtggaggaatggcctactgtggcccacaggtcggcgtggggctggtaccacagggggggctcgagacatcacagcctgaaggggaggccggtgtgggcgtcgagagcaatagtgacggcgccagtccagagccgtgcaccgttactcctggcgccgtgaagttagagaaggaaaagctcgagcaaaaccccgaagagtcacaagacatcaaggcgctgcagaaggaactggaacagtttgccaagctcctgaagcagaagagaatcacgctggggtacacgcaggcagatgtgggcctcactctgggcgtactgtttgggaaagttttctcccagacaaccatttgccgattcgaggcactgcagcttagctttaagaacatgtgcaagttgcgtccgttactgcagaagtgggtggaggaggccgataataatgagaatcttcaggaaatctgcaaggctgaaacactggtacaggccagaaagcgcaagaggacatcgatcgaaaatagagtgagggggaatctggaaaatctcttcctgcagtgtccaaaacccactctgcagcagatctcacacattgcgcagcaattaggactagaaaaggacgtcgttcgcgtatggttttgtaaccgccgccagaaggggaagagaagtagcagtgactatgcacagagggaggatttcgaggccgcggggtctcccttttctgggggccctgtctcattccctctggcccctgggccgcatttcgggaccccaggatacggctctcctcactttaccgcgttgtacagctcagtgcccttcccggaaggagaggctttcccaccagtgtctgtcactaccctagggagtcccatgcactcaaat

SEQ ID NO: 131052 - DNA, 1080 bp, Artificial Sequence
  derived and/or modified sequence
atggccggccatctggcttctgatttcgcctttagcccaccaccaggaggaggtggcgatggccctggaggcccagaacccgggtgggtggaccctagaacatggctcagcttccagggaccacctggtggccctgggataggacctggcgttgggcccgggagtgaagtctggggtatccctccctgcccacctccgtatgagttttgcggcggaatggcatattgcggaccccaggtcggggtgggtcttgtaccgcagggaggtctcgaaacctctcagccagagggcgaggccggtgtcggagtggaaagcaactccgacggagcttcccctgagccgtgtacagtgactcctggtgccgtaaagctggaaaaggaaaaattggagcagaaccccgaagaatctcaggatatcaaggcattgcagaaagagctcgagcaatttgcgaagctgctgaagcagaagaggatcacattgggctacacacaggcagatgtggggctgactcttggcgttctttttggcaaagtatttagtcaaacaacgatttgtaggttcgaggcattgcagctgagttttaagaacatgtgcaagctgcggcccctgctccaaaaatgggtcgaagaggccgataataatgagaacctgcaagaaatttgtaaggccgaaacccttgtgcaggccagaaaacgaaagcgcacaagtatcgagaatagagtccgagggaaccttgaaaacttgtttctccagtgtcctaagcccaccctccagcagataagccatattgcgcagcaactcggactggaaaaggacgtcgtacgggtttggttctgtaaccgtcgccagaagggcaagcggagctcatcagactacgctcagagagaagactttgaagccgcgggaagtccatttagcggtggtcccgtatcgttccctctggccccaggacctcacttcgggactcccggatacgggtcccctcacttcactgcactgtacagttcagttcccttccccgaaggtgaggcattccctccagtcagcgtgactacacttggcagtccaatgcattcgaat

SEQ ID NO: 131053 - DNA, 1083 bp, Artificial Sequence
  derived and/or modified sequence
atggccggccacctggccagcgacttcgccttcagccccccccccggcggcggcggcgacggccccggcggccccgagcccggctgggtggaccccagaacctggctgagcttccagggcccccccggcggccccggcatcggccccggcgtgggccccggcagcgaggtgtggggcatccccccctgcccccccccctacgagttctgcggcggcatggcctactgcggcccccaggtgggcgtgggcctggtgccccagggcggcctggagaccagccagcccgagggcgaggccggcgtgggcgtggagagcaacagcgacggcgccagccccgagccctgcaccgtgacccccggcgccgtgaagctggagaaggagaagctggagcagaaccccgaggagagccaggacatcaaggccctgcagaaggagctggagcagttcgccaagctgctgaagcagaagagaatcaccctgggctacacccaggccgacgtgggcctgaccctgggcgtgctgttcggcaaggtgttcagccagaccaccatctgcagattcgaggccctgcagctgagcttcaagaacatgtgcaagctgagacccctgctgcagaagtgggtggaggaggccgacaacaacgagaacctgcaggagatctgcaaggccgagaccctggtgcaggccagaaagagaaagagaaccagcatcgagaacagagtgagaggcaacctggagaacctgttcctgcagtgccccaagcccaccctgcagcagatcagccacatcgcccagcagctgggcctggagaaggacgtggtgagagtgtggttctgcaacagaagacagaagggcaagagaagcagcagcgactacgcccagagagaggacttcgaggccgccggcagccccttcagcggcggccccgtgagcttccccctggcccccggcccccacttcggcacccccggctacggcagcccccacttcaccgccctgtacagcagcgtgcccttccccgagggcgaggccttcccccccgtgagcgtgaccaccctgggcagccccatgcacagcaactag

SEQ ID NO: 131054 - DNA, 369 bp, Artificial Sequence
  derived and/or modified sequence
atggccggccacctggccagcgacttcgccttcagccccccccccggcggcggcggcgacggccccggcggccccgagcccggctgggtggaccccagaacctggctgagcttccagggcccccccggcggccccggcatcggccccggcgtgggccccggcagcgaggtgtggggcatccccccctgcccccccccctacgagttctgcggcggcatggcctactgcggcccccaggtgggcgtgggcctggtgccccagggcggcctggagaccagccagcccgagggcgaggccggcggcggcgagcagctgagatggggcctgcccggcgccctgcacagacacccctggtgcagagaggcctag

SEQ ID NO: 131055 - DNA, 372 bp, Artificial Sequence
  derived and/or modified sequence
atggccggccacctggccagcgacttcgccttcagccccccccccggcggcggcggcgacggccccggcggccccgagcccggctgggtggaccccagaacctggctgagcttccagggcccccccggcggccccggcatcggccccggcgtgggccccggcagcgaggtgtggggcatccccccctgcccccccccctacgagttctgcggcggcatggcctactgcggcccccaggtgggcgtgggcctggtgccccagggcggcctggagaccagccagcccgagggcgaggccggcgtgggcgtggagacccccatgggcccccccagaagccccgccccccaccccttccccttccccctgctgtag

SEQ ID NO: 131056 - DNA, 558 bp, Artificial Sequence
  derived and/or modified sequence
atggccggccacctggccagcgacttcgccttcagccccccccccggcggcggcggcgacggccccggcggccccgagcccggctgggtggaccccagaacctggctgagcttccagggcccccccggcggccccggcatcggccccggcgtgggccccggcagcgaggtgtggggcatccccccctgcccccccccctacgagttctgcggcggcatggcctactgcggcccccaggtgggcgtgggcctggtgccccagggcggcctggagaccagccagcccgagggcgaggccggcgtgggcgtggagagcaacagcgacggcgccagccccgagccctgcaccgtgacccccggcgccgtgaagctggagaaggagaagctggagcagaaccccgaggagagccaggacatcaaggccctgcagaaggagctggagcagttcgccaagctgctgaagcagaagagaatcaccctgggctacacccaggccgacgtgcaccccggcggcagcatctgggagggcatccagcccaacgaccacctgcccctgtag

SEQ ID NO: 131057 - DNA, 1083 bp, Artificial Sequence
  derived and/or modified sequence
atggctggacatttagcttctgacttcgcatttagcccaccaccaggcggcgggggcgatgggcctggtggccctgagcctggctgggtggatcctcgaacgtggctgtcattccaggggccacccgggggcccaggaatcggccccggggttggcccaggatcagaagtctggggaattccaccatgtccacctccctatgaattctgcggcggcatggcatactgtggccctcaggttggcgtaggactggtaccacaggggggactcgagaccagtcagccagagggtgaggcgggtgtaggggtggagtcaaactccgacggcgcttcacccgagccatgcaccgtgacccccggtgcagtaaagctagagaaagagaagctggaacaaaatccagaggagtcccaggacatcaaagctctccagaaggaactggagcagttcgctaagcttctcaaacagaaacggataacccttggatacacccaggccgacgtcgggctcacattaggcgtcctatttggaaaagtcttcagccagacgacaatatgccggtttgaggcgctacaattatcttttaagaacatgtgtaagcttcgacccctgctacagaaatgggtagaagaagccgataataacgaaaacctgcaagaaatttgcaaggcggaaaccctggtgcaagccagaaaacggaagcgaacctcaattgagaacagagtgcgaggtaatttagagaatctgtttctacaatgtccaaaaccgaccctgcagcaaatttcccacatcgcccagcagctcggactggagaaagatgtcgtgagagtttggttttgcaatagacgccaaaaagggaagcggagcagttccgattatgcccagagggaagacttcgaagcagccggctctcccttttcaggggggccagtatcatttcctctggcaccaggaccacacttcggcaccccaggttacggctcccctcatttcacggcactttactcaagtgttccatttcctgagggggaagcattcccaccagtgtctgttacaactctggggagtccgatgcactccaattag

SEQ ID NO: 131058 - DNA, 1083 bp, Artificial Sequence
  derived and/or modified sequence
atggctggccacttagccagtgacttcgcattttctccccccccgggagggggaggtgatggacctgggggtcccgaacctggctgggttgaccctcgcacatggctgagttttcaaggcccccctggcggcccaggaattggcccgggtgtggggcctggtagcgaagtatggggtattccgccctgtccacctccttatgagttttgcgggggaatggcatattgtggaccacaagtcggtgtgggcttggtccctcagggggggctggagacttcccagcctgaaggagaagctggcgtgggcgtggagtctaattcagacggcgcctctcctgagccctgtacggtgacgccaggcgccgtgaaactcgagaaagaaaagcttgaacagaatccagaagaatcccaagacattaaagctctccagaaggagctcgagcagttcgcgaaacttctcaagcagaaacgtataactcttggctatacccaggcagatgtaggcttaactctcggagtgctgttcgggaaggtcttcagccagactaccatctgtcgatttgaagcactgcaactctcattcaagaacatgtgtaagctgcgacctctcttgcagaaatgggtagaagaagctgacaataacgagaatctacaagagatttgtaaggctgaaaccttagtgcaggctaggaagaggaaacgcaccagtatcgagaaccgcgtcaggggaaacctcgaaaacctcttcctccaatgccccaagcctacccttcagcagatatcacatatagcccagcagctcgggcttgagaaggacgttgtgcgtgtatggttttgcaaccgccgccagaaaggaaagcgcagcagcagcgattacgcacagcgtgaggactttgaagccgcggggtctccattcagcggtgggccggtgagctttccattggcacccggacctcactttggcaccccaggatacggttcaccgcatttcactgctctgtattcatcagtgccctttcctgaaggcgaggccttccctcccgtgtcagtcacgacactgggttctcctatgcattctaactag

SEQ ID NO: 131059 - DNA, 1083 bp, Artificial Sequence
  derived and/or modified sequence
atggcagggcaccttgcgagcgattttgctttcagtccgcctcctggcggcggaggcgatggccccgggggacccgagcctggatgggtagatccgcgaacctggctctctttccagggtccccctgggggcccagggatcgggccgggagtgggtccaggttcagaggtctggggtatacccccttgcccacccccgtatgaattttgtggcggtatggcatattgtggcccgcaggtcggcgtggggctggttccccaaggtggcctggaaacttcacagcccgaaggtgaagccggcgtgggcgtcgagagcaatagtgacggcgcaagccccgagccgtgcaccgtcacacctggagcggtcaagttagagaaagagaagctcgagcagaatccggaggagagtcaagacattaaggcactgcagaaggaactggaacagtttgctaagctgttgaaacagaagcgtatcaccctgggctatacgcaagcggatgtggggctcactttgggtgtgctcttcggcaaggtgttttcacagacgactatctgtagatttgaggccctacagctctcgtttaaaaacatgtgcaaactcagacccttgctccagaagtgggtggaagaggctgataacaatgagaacctgcaggagatttgcaaggcagaaactctggtgcaggcgagaaagagaaagcgaaccagtattgaaaaccgggttcgcggaaacttagaaaacttatttctgcagtgccccaaacctactctccagcagatcagtcatattgcccagcagctcggcctcgaaaaagacgtggttagggtgtggttctgtaatcggaggcagaagggtaagcgtagctccagcgactacgcgcagcgcgaggatttcgaggcagcaggatcccccttttcaggcggtcccgtaagctttcctctcgcacccggcccacactttggcactcctgggtacgggtctccacatttcactgctctgtattcgtctgttcccttccctgagggtgaggcgtttcctccggtctctgtgacaacattgggtagtccaatgcactctaattag

SEQ ID NO: 131060 - DNA, 1083 bp, Artificial Sequence
  derived and/or modified sequence
atggccggtcacctcgcctccgacttcgctttcagtcccccaccagggggtggaggagacggacccggtggacccgaaccgggatgggtcgatcccagaacttggttgtctttccaaggccccccaggaggccctggaatcgggccaggggtcggaccaggttccgaggtctggggaattcccccatgcccacctccgtacgaattctgtggcggtatggcttattgcgggccacaagttggcgttggactggtgccccaaggggggctggagacatcccaaccagagggcgaagcaggagtaggcgtggaatccaatagtgatggagccagccccgagccatgcactgtgaccccaggcgccgtcaagctggaaaaagagaagctggagcagaacccggaagagtcccaagatatcaaggccttgcagaaagagctggagcaatttgccaagcttctcaagcagaaaagaatcaccctcgggtatactcaggccgacgtaggattgaccctgggagtgctgttcggcaaagttttttctcagactactatttgtcggttcgaggctctgcagctgtcttttaaaaatatgtgtaaactcaggcccctcctccagaagtgggttgaagaggcagacaataacgagaatctgcaggaaatctgcaaggccgagactctcgtccaggctcggaagcgaaaaaggactagcatagagaaccgggtgaggggtaatctggaaaatctttttctgcagtgccccaagcccacactgcagcagatttcacacatcgcacaacagctcggcctagaaaaagacgtcgtcagggtttggttttgtaatcggagacagaaaggtaaacgaagcagcagtgattatgcgcagcgcgaggatttcgaggcagccggctcaccattttcgggggggcctgtgtcattcccactggctcccggcccccacttcggcacccctgggtacgggtcgcctcacttcacagccctttacagttccgtgccattccccgagggggaggccttcccaccagtgtcggtcaccactctgggaagccctatgcactctaactag

SEQ ID NO: 131061 - DNA, 1083 bp, Artificial Sequence
  derived and/or modified sequence
atggccggccatctcgcgtccgattttgcctttagccccccgcctggcggtggcggggatggcccaggaggccctgaaccggggtgggtggacccacgtacctggctgagctttcagggacccccagggggaccagggattggtcctggtgtaggtcctggatccgaggtctggggcattcccccttgcccccctccatacgaattttgtggtggtatggcgtactgtggacctcaggtaggagttggtctcgtcccacagggtggactggagacctcccagcctgagggagaagccggcgtgggggttgaatcaaatagcgacggagctagtcctgagccttgtactgtcacacctggcgctgtcaaactggagaaagagaaactggaacagaacccagaagaatcacaggacatcaaagcgctgcaaaaggaattggagcagttcgcaaaattgctcaaacagaaaaggatcacacttggctatacgcaggccgatgtgggcctcacccttggtgtgttgtttggtaaggtatttagccaaaccactatctgtaggtttgaggcactgcagttgtccttcaagaatatgtgcaagctacggcctctgttacagaagtgggtggaagaggcggacaataacgagaatttgcaagagatctgtaaggctgagacactggttcaggcccgcaagaggaaaagaacatcaatcgagaatagggtccggggaaatctggagaacctgtttctgcagtgtcctaaaccaaccctccagcagattagccatatcgcccagcagctcggtctggaaaaggacgtggtgcgtgtctggttttgtaacagaagacagaagggaaaacggagctcatcagactatgcccagagggaagacttcgaggctgccgggtcccctttctcaggcgggcctgtatccttcccactcgctcccggacctcactttggaacccccggctatgggagccctcactttaccgccctgtacagcagcgtcccgttcccagagggcgaggcctttccccctgtttccgtcacaacactagggagccccatgcattctaattag

SEQ ID NO: 131062 - DNA, 369 bp, Artificial Sequence
  derived and/or modified sequence
atggcaggccacctggccagtgatttcgcatttagccctcctcctgggggcgggggcgacggcccaggtgggcccgagccaggttgggttgacccccgcacctggctgtcattccaggggccacccgggggacctgggatcggccctggggtgggacccggctccgaggtatggggtattcccccttgcccacctccgtacgagttttgcggggggatggcatactgcggaccccaagttggagttggcctggtaccacagggcgggctggagacgtcacagccagaaggggaagccggcgggggcgagcagctacggtggggtttgccaggcgctctgcaccggcatccctggtgccgggaagcctag

SEQ ID NO: 131063 - DNA, 1083 bp, Artificial Sequence
  derived and/or modified sequence
atggcgggccacctagcctcagattttgccttttctcccccaccaggcggcgggggagatgggccgggaggaccggagccgggctgggtcgatccgagaacttggttgagcttccagggccctccagggggtcccggcattggacctggtgtgggccccgggtccgaggtatggggcatccccccttgtccccccccctacgagttctgtgggggcatggcatactgtggcccccaggtgggagtgggcttggtccctcagggcggcctggagacctcccaacccgaaggggaggctggggtgggggtagagtccaacagcgacggagcctccccagaaccatgcacagtgaccccaggcgccgtgaaactggagaaggaaaagctcgagcagaatcccgaagagtcacaggatattaaggccttgcagaaggaattggagcagtttgcaaaactcctgaaacagaagcgtataactctcggctacacacaggccgatgttgggctgactttgggcgtgctgtttggcaaggtcttctcccagactacgatctgcagatttgaggctttgcagctgtctttcaagaatatgtgtaaactgcgccctttgttgcaaaaatgggttgaggaggcagacaataatgaaaacctgcaggaaatctgtaaagcagagacccttgtgcaagcaaggaagaggaagcgcacatcaatcgaaaatagagtcaggggtaatttggaaaacctgtttctgcagtgccccaaaccgaccttacagcagatcagccacatagcccagcagctgggcctggagaaagatgtggtgcgggtttggttctgtaacagacgtcaaaaaggaaaacgttcatcttccgattacgcccagagggaggatttcgaggctgctggaagtccattttctggaggcccagtctccttcccattggctcctggcccccatttcggcacaccagggtacggcagcccccactttacggcactttatagcagtgttccatttccagaaggcgaagcctttccaccggtctctgtgactaccctgggctcacccatgcactccaattag

SEQ ID NO: 131064 - DNA, 372 bp, Artificial Sequence
  derived and/or modified sequence
atggcgggtcatctggcctccgatttcgccttctccccgcctcctggcggaggcggagacggccccgggggaccagagcctggctgggttgaccctaggacttggttaagtttccaggggccccctggaggccccggtattggacccggggtcggtccgggctccgaggtctgggggatcccaccctgcccccctccttacgagttttgtggaggaatggcatactgtggacctcaggtgggagtgggcttggttccacaaggcgggcttgagacgtcccagccagagggtgaagcaggagtgggagtagagactcctatggggcccccgaggtctcccgccccccaccccttcccttttcctctgctttag

SEQ ID NO: 131065 - DNA, 558 bp, Artificial Sequence
  derived and/or modified sequence
atggctggccatctggctagcgatttcgctttcagccctccccccgggggaggtggggacggaccaggcgggcccgaacccggctgggtggaccctcggacgtggttgtcattccagggacctcccggcggaccggggatcggacccggggtaggacccggaagcgaagtctgggggattcctccttgccctccaccctatgagttttgcggtggcatggcctactgtggcccacaggtgggcgtggggctcgttcctcagggagggttggaaacttcgcagccagagggggaagcaggggttggggtcgaaagcaattccgatggcgcttcccctgagccctgcaccgtcacgccgggggccgtgaaactggaaaaggaaaaattggagcaaaatcccgaagaaagccaagacattaaggccctacagaaggaacttgagcagtttgccaagctgctgaaacagaagcgcatcacccttggctatacccaggccgatgtccatcctggaggttctatatgggagggcatacagccaaacgaccacctccctctgtag

SEQ ID NO: 131066 - DNA, 372 bp, Artificial Sequence
  derived and/or modified sequence
atggccggtcatttggctagtgatttcgcattcagtccaccccccggaggaggaggtgatgggcccggtggaccagaacccggctgggtggatccaagaacttggttgtcattccaggggccaccaggcgggccaggcattgggcctggagtgggccccgggagcgaggtgtgggggattccaccctgtccccccccttacgagttttgtgggggaatggcatactgtggtccacaggtaggagtcgggctcgtgcctcagggaggcctggaaacaagccaacccgaaggggaggcaggggttggagtggaaacaccaatgggaccaccgagatctccagcaccccacccatttcccttcccattgttgtag

SEQ ID NO: 131067 - DNA, 558 bp, Artificial Sequence
  derived and/or modified sequence
atggccggccacctggcttcggacttcgcttttagtcctccgcccggcggcggcggagatggacccggcggacctgagcctggctgggtggaccctagaacctggttgagctttcagggtccaccaggaggtcctggcataggaccaggagttggacctggctctgaggtttgggggattccaccctgtcccccaccctacgaattttgcggagggatggcctattgcggaccccaggtgggcgttgggctagtgccccagggcggcctggagaccagccagcccgagggtgaggctggcgtgggcgttgaatccaacagtgatggtgcgtcccctgagccttgcacggtcacacccggagcggtgaaactcgagaaggaaaagctagagcagaatcccgaagagtcacaagatatcaaggccctgcagaaggagcttgaacaatttgccaaactcctgaagcagaaaagaataaccctcggatatacacaggccgatgtccatcctggaggttctatatgggaaggcatccagccgaatgaccatctcccattgtag

SEQ ID NO: 131068 - DNA, 372 bp, Artificial Sequence
  derived and/or modified sequence
atggccggtcatctcgcatctgactttgccttttcacctcctcctggcgggggcggagatggaccaggcggccctgaacccggttgggtggaccctagaacatggctctcctttcagggccctcccggcggacccgggataggacctggtgtagggccagggagtgaggtatgggggattcccccttgcccacccccttacgaattttgtgggggaatggcctactgcggcccacaggtcggcgtgggactggtcccacaggggggcctggaaacaagtcagccggagggtgaagcaggcgtgggagtggagactcccatggggccccctcgcagcccagctccacacccattcccttttccactcctctag

SEQ ID NO: 131069 - DNA, 558 bp, Artificial Sequence
  derived and/or modified sequence
atggctggacacctagcctcagattttgcattcagccctccacccggcgggggaggggacgggccagggggcccagaacccggttgggtagatccacgcacttggctgagctttcagggcccaccagggggacccgggataggtcccggagttggacccggaagtgaggtgtggggtattcctccctgtccaccgccgtatgaattttgcgggggcatggcttactgcgggccgcaagtcggggtcgggctggtgccccagggaggccttgagacatctcaaccggagggcgaggctggagtcggggttgagtctaatagcgacggagcgtccccagagccttgtacagttacgcctggcgctgtgaagcttgaaaaagaaaagcttgaacagaacccagaagagagccaggatattaaagctttacagaaggaattggaacaattcgcgaaactgctcaagcagaagaggataaccctgggctacacccaggcagacgttcatcctggcggcagcatctgggaggggattcaaccaaatgaccacttgcctctatag

SEQ ID NO: 131070 - DNA, 558 bp, Artificial Sequence
  derived and/or modified sequence
atggctggacaccttgcatcagacttcgcgtttagcccacctccagggggagggggagacggccctggaggcccagagccgggctgggtggacccccgcacttggttatcatttcagggaccccctggggggccaggaatagggcccggcgtgggacccggcagcgaagtatggggcatccccccatgcccgcctccctatgagttctgtggaggaatggcgtactgtggccctcaggtcggcgtcgggctggtaccccaaggtggcttggagacgagtcagccggagggggaggccggagtgggcgtagaatctaatagcgacggcgcatcacccgaaccctgtaccgttactccgggggccgtaaagttggagaaggaaaagttggagcagaatcccgaagaatcccaagatattaaggctctccagaaggagctcgagcaattcgccaaactgttgaagcagaaacgtatcacactcggctacacgcaggcggatgttcatccaggtggcagtatatgggaaggaattcagcctaacgaccatctgcctctgtag

SEQ ID NO: 131071 - DNA, 372 bp, Artificial Sequence
  derived and/or modified sequence
atggctgggcatctggcttctgactttgccttctcaccgcctcctggaggaggtggtgacggtccgggcggtcctgagcccgggtgggtcgatccaaggacctggctcagcttccagggaccgccaggtggcccaggtattggaccaggggtcggaccgggatccgaagtttgggggatccccccatgccccccaccctatgaattctgtgggggcatggcttactgtgggccccaggtgggagtgggactcgtgccccaaggtggtctcgaaaccagtcagccagagggtgaggcaggagttggggtggaaactccaatgggtccaccccgctctcctgcaccgcatcccttccccttccctctgctttag

SEQ ID NO: 131072 - DNA, 372 bp, Artificial Sequence
  derived and/or modified sequence
atggctggacatctcgcgagcgatttcgcattttcgccgccacccggcggcgggggagatgggcctggaggccctgagccaggctgggtcgacccacgcacatggttgtcttttcagggaccgccaggcggcccaggcattggtcctggggtcggacctggcagtgaagtctggggaatacctccctgtcctcctccttatgagttctgtggaggcatggcatattgtgggccacaggtcggagtgggactcgtcccacaagggggcttagaaaccagtcagcccgagggcgaagccggagtcggcgtagagaccccgatgggcccacctcgctcccccgcaccccacccattcccatttcctctcctttag

SEQ ID NO: 131073 - DNA, 1083 bp, Artificial Sequence
  derived and/or modified sequence
atggccggccacctggccagtgactttgccttcagccccccacctgggggcggcggagatggccctgggggccctgagcccggctgggtggaccccaggacctggctgtccttccagggccccccaggcggccctggcatcggccctggggtgggccctggcagcgaggtgtggggcatccccccctgccccccaccctatgagttctgtggcggcatggcctactgcggcccccaggtgggcgtgggcctggtgccccagggcggcctggagaccagccagcctgagggggaggccggcgtgggcgtggagagcaacagtgatggagccagccctgagccctgcaccgtgaccccaggagctgtgaagctggagaaggagaagctggagcagaaccctgaggagagccaggacatcaaggccctgcagaaggagctggagcagtttgccaagctgctgaagcagaagaggatcaccctgggctacacccaggctgatgtgggcctgaccctgggcgtgctgtttgggaaggtgttcagccagaccaccatctgccgctttgaggccctgcagctgtccttcaagaacatgtgcaagctgcggcccctgctgcagaagtgggtggaggaggccgacaacaatgaaaacctgcaggagatctgcaaggccgagaccctggtgcaggccaggaagaggaagaggaccagcattgagaacagagtgcggggcaacctggagaacctcttcctgcagtgccccaagcccaccctgcagcagatcagccacatcgcccagcagctgggcctggagaaggatgtggtgcgggtgtggttctgcaacagacggcagaagggcaagaggagcagcagtgactatgcccagcgggaggactttgaggccgccggcagccccttcagcggcggccctgtgtccttccccctggcccctggcccccacttcggcaccccaggctacggcagcccccacttcaccgccctgtacagctctgtgcccttccctgagggggaggccttcccccctgtgtctgtgaccaccctgggcagccccatgcacagcaactag

SEQ ID NO: 131074 - DNA, 369 bp, Artificial Sequence
  derived and/or modified sequence
atggccggccacctggccagtgactttgccttcagccccccacctgggggcggcggagatggccctgggggccctgagcccggctgggtggaccccaggacctggctgtccttccagggccccccaggcggccctggcatcggccctggggtgggccctggcagcgaggtgtggggcatccccccctgccccccaccctatgagttctgtggcggcatggcctactgcggcccccaggtgggcgtgggcctggtgccccagggcggcctggagaccagccagcctgagggggaggccggcggcggggagcagctgcgctggggcctgcccggggccctgcaccgccacccctggtgccgggaggcctag

SEQ ID NO: 131075 - DNA, 372 bp, Artificial Sequence
  derived and/or modified sequence
atggccggccacctggccagtgactttgccttcagccccccacctgggggcggcggagatggccctgggggccctgagcccggctgggtggaccccaggacctggctgtccttccagggccccccaggcggccctggcatcggccctggggtgggccctggcagcgaggtgtggggcatccccccctgccccccaccctatgagttctgtggcggcatggcctactgcggcccccaggtgggcgtgggcctggtgccccagggcggcctggagaccagccagcctgagggggaggccggcgtgggcgtggagacccccatgggccccccaagaagccctgccccccaccccttccccttccccctgctgtag

SEQ ID NO: 131076 - DNA, 558 bp, Artificial Sequence
  derived and/or modified sequence
atggccggccacctggccagtgactttgccttcagccccccacctgggggcggcggagatggccctgggggccctgagcccggctgggtggaccccaggacctggctgtccttccagggccccccaggcggccctggcatcggccctggggtgggccctggcagcgaggtgtggggcatccccccctgccccccaccctatgagttctgtggcggcatggcctactgcggcccccaggtgggcgtgggcctggtgccccagggcggcctggagaccagccagcctgagggggaggccggcgtgggcgtggagagcaacagtgatggagccagccctgagccctgcaccgtgaccccaggagctgtgaagctggagaaggagaagctggagcagaaccctgaggagagccaggacatcaaggccctgcagaaggagctggagcagtttgccaagctgctgaagcagaagaggatcaccctgggctacacccaggctgatgtgcaccctgggggcagcatctgggagggcatccagcccaatgaccacctgcccctgtag

SEQ ID NO: 131077 - DNA, 1083 bp, Artificial Sequence
  derived and/or modified sequence
atggccggccacctggccagcgacttcgccttcagccccccccccggtgggggaggtgatggcccgggcggacctgagcccgggtgggtggatcctagaacctggctaagcttccagggaccgccaggggggccgggcataggccccggggttggaccaggcagcgaagtgtgggggatcccaccatgccctcccccttatgaattttgcggcggcatggcctactgcgggccacaggtcggagtggggctcgtgcctcaagggggtctggagacgtcccaacccgagggggaagccggcgtaggcgttgagagcaactccgatggtgcctcccccgagccctgtaccgtcaccccaggcgccgtcaagctggagaaggagaagctggaacagaaccccgaggagtcacaggacataaaagccctgcaaaaggaactcgagcagttcgccaaattgttgaaacaaaagaggataactctcggttacacccaggccgatgttggactcaccctgggagttctgttcgggaaagttttttcacagacaaccatttgcagatttgaggctctccagctgagtttcaagaatatgtgcaagttgcgtcctctcctgcagaaatgggtggaggaggcagacaataacgaaaacctgcaagagatttgcaaagccgagacactggtacaggctcggaaaaggaagcgcacatccattgagaatcgggtgcgcggtaacctggagaatctgtttctccagtgtccaaagcccacactacagcagatatcgcacatcgctcagcagctcggtctcgaaaaggatgtggtccgcgtttggttctgcaacagacgacaaaagggaaagaggtcgtccagtgactacgctcagcgcgaagatttcgaagctgccggctcacccttcagcggcggcccagtatcttttccattagccccagggccacattttgggacacccggctacggcagtccgcatttcaccgctctttacagctccgtgcccttcccagagggagaagcgttccccccggtgtctgtgaccacccttgggtcccctatgcatagtaattag

SEQ ID NO: 131078 - DNA, 1083 bp, Artificial Sequence
  derived and/or modified sequence
atggccggccacctggccagcgacttcgccttcagccccccccccggcggagggggagatggcccgggtggacccgagcccggctgggtggaccccagaacatggctctcatttcaaggaccccctggaggacctggtatagggcctggggtaggacccgggagtgaggtgtggggtatcccaccctgtccgcccccttatgaattttgtgggggcatggcctattgtggcccacaggtaggtgtaggtctggtcccccaaggggggttggaaacctcccagcccgaaggagaggctggagtgggagtcgaatctaactctgatggcgcctctcctgaaccgtgtaccgtgactcccggtgcagtgaagctggagaaggagaagctcgagcaaaacccagaggagtcacaggatattaaagctcttcagaaagagttagaacagttcgctaagctccttaagcaaaaacgcatcactttgggttatacacaggcggacgtgggtctgacccttggagtgctgtttggaaaggtgttctcccagacaacaatttgtcgctttgaggcccttcagctgagtttcaagaatatgtgcaagctaagacctttgctacagaagtgggtggaggaagcagacaataatgaaaacctgcaagaaatctgcaaagccgagacgctggttcaggctcgcaaacgcaagcgaacaagcattgagaatagagtgagagggaacttggagaatctgttcctgcagtgccccaagccaaccctccagcaaatctcacacattgcccagcagctaggtctggaaaaagacgtagttagggtgtggttctgcaaccgccggcagaaaggcaagcgcagcagctctgattatgctcagcgggaggacttcgaggccgctggtagcccattttcgggaggtccagtgtcatttcctctggcgccagggccacacttcggtacacccggttatgggagcccccatttcaccgccctgtacagctcagtcccattccccgagggtgaggccttccctcccgtgtccgtaactactctggggagcccaatgcacagcaactag

SEQ ID NO: 131079 - DNA, 1083 bp, Artificial Sequence
  derived and/or modified sequence
atggccggccacctggccagcgacttcgccttcagccccccccccggcggtggcggtgatggccctgggggtcctgaacccggatgggtcgacccacggacttggctaagcttccagggacccccaggaggaccaggaatcggccccggcgtcggtcccgggagtgaggtctggggaatccctccgtgcccgcctccttatgaattttgcgggggcatggcctactgtggtccccaggtgggggtgggactggtcccccagggcgggctggagacgtcacaacctgaaggagaagcgggtgtcggagttgaatctaactccgatggcgcgtcaccagaaccctgcaccgtgacccctggggctgtgaagttagaaaaagagaagcttgaacagaatccagaggaaagccaggatataaaagctttgcagaaggaacttgagcagtttgccaaacttctgaagcagaagaggataacactcggttatacacaggcagacgttggacttaccctcggtgttctcttcggtaaggtcttttctcagactacaatctgtcgatttgaggccctgcagttgtctttcaagaacatgtgtaaactgaggcctctcttacagaaatgggtagaagaggccgacaacaatgagaatctgcaggagatttgcaaggcggagacgctcgttcaggcacggaagcggaaacgaacatcaattgagaaccgggtccgaggtaatttggagaacctgttcctgcaatgccccaaacctacactccagcaaatttctcacattgctcagcagctcggcctggaaaaagatgtagtgcgggtttggttctgtaatcgcagacaaaagggcaagcgttccagctcagattatgcccagcgagaagattttgaagcagcggggtctcccttttctggagggcccgtatcattccctctagcccctgggccacattttggcaccccaggctatggcagcccacacttcaccgccctgtatagtagcgtcccatttccagaaggggaggccttcccccctgtgtctgtgactaccctgggtagccccatgcatagtaactag

SEQ ID NO: 131080 - DNA, 1083 bp, Artificial Sequence
  derived and/or modified sequence
atggccggccacctggccagcgacttcgccttcagccccccccccggaggggggggggacggcccagggggtccggaaccggggtgggttgacccacgtacctggctttcatttcaagggcctccgggagggcccgggatcgggccgggtgtgggcccgggctcggaagtgtgggggatacccccatgccctccaccctacgaattctgcggcgggatggcctattgcgggcctcaagtgggcgtgggcctggtgcctcagggagggcttgagacttcccagccagagggtgaagccggcgtgggggtggaatctaatagcgatggagcttccccagaaccatgcacagtgacccccggcgcagtgaagttggaaaaggaaaagttggagcagaaccccgaggagagccaggacataaaagcactgcaaaaagagttggagcaatttgccaagctcctgaagcagaagcgcataaccttgggttacacccaggccgatgttggactgactctgggcgtcctgtttgggaaggtgttcagccaaactactatctgtagatttgaggccctgcagctctccttcaagaacatgtgtaagttgaggcccctgctgcagaagtgggtggaagaagcagataataatgagaatctgcaagagatctgcaaggcagagactttagtgcaagcacgaaagagaaaacgcacctcgattgaaaacagggtgagaggtaatttagaaaacctcttcttgcagtgccctaaacccaccctgcagcagattagccacattgcacaacagctggggctggaaaaggatgttgtgagagtgtggttctgtaaccggcgtcagaagggtaaaaggagctcatctgactacgcacaaagagaagattttgaggccgctgggagtcccttcagtggagggcctgttagctttccactcgcccccggaccccactttggcaccccggggtacggctctccacacttcaccgcattatattcaagcgtgcccttccctgaaggcgaggcgttccctccagtgtccgtgacaactcttggcagcccgatgcattcaaattag

SEQ ID NO: 131081 - DNA, 1083 bp, Artificial Sequence
  derived and/or modified sequence
atggccggccacctggccagcgacttcgccttcagccccccccccggaggtgggggggacggtcccggtgggccggagcctgggtgggttgacccgcggacttggctgtcttttcagggcccaccaggtggacctggcatcggacctggtgtgggacccggctctgaggtgtggggaattcccccttgcccccctccctatgagttttgcggcggaatggcttactgcggcccccaggtcggcgtggggttggttccacagggcggactggaaacctcccaaccagaaggggaggctggagtgggtgtggaatctaatagcgatggggcttctcccgagccttgcacagtaaccccaggtgcagttaagctcgagaaagaaaaattggaacagaatcctgaggaatcacaggatataaaagctctgcaaaaggagctggaacaattcgcaaaactcctcaagcagaagcggataactctcgggtacactcaggctgacgtcggcctcacgctcggggtgctgtttggtaaagtgttcagtcagactaccatctgtcgcttcgaggctcttcaactgtctttcaagaacatgtgtaagctacggcccctactgcagaagtgggtggaagaagcagataacaatgagaacttacaggagatatgcaaggctgagacgctagtgcaggctaggaagagaaaacggacctctattgagaacagggtccgggggaacctggaaaatctgttcttgcagtgccctaagccaacattacagcagatctcacatattgcccaacagctgggcctggaaaaagacgtagtgcgggtgtggttctgcaatcgacggcagaaaggtaagcgaagcagttctgactatgctcagagggaggatttcgaagccgccggtagcccgtttagtggaggccctgtatccttcccacttgcacccggcccccatttcggaaccccaggctatggttctccacacttcacagctctttactcctccgtgcctttccccgaaggggaggcattcccacccgttagcgtgactactctagggtctcctatgcactctaattag

SEQ ID NO: 131082 - DNA, 369 bp, Artificial Sequence
  derived and/or modified sequence
atggccggccacctggccagcgacttcgccttcagccccccccccggtggcggcggagatggtccgggcgggccagagcctggctgggtggatcctcgcacctggctttccttccaaggccctcccggtggaccaggcattggtccaggggtaggacccggctccgaagtatggggtatccctccttgccctccaccttatgaattctgtggcgggatggcatactgtggcccccaggtcggggtgggactggtgccacagggtgggttggagacttctcagcccgagggcgaagccggcggaggcgaacagctgaggtggggcctgccaggtgctcttcatagacacccctggtgccgagaagcttag

SEQ ID NO: 131083 - DNA, 1083 bp, Artificial Sequence
  derived and/or modified sequence
atggccggccacctggccagcgacttcgccttcagccccccccccggagggggtggagatggtccaggggggccggaaccaggctgggtggatccgcgtacctggcttagcttccagggccctcccgggggtcccgggatcggtcccggagttggccctggctctgaagtatggggaattcccccttgccctcctccttatgagttctgtggcggcatggcctactgtgggcctcaagtcggcgtggggctggttccacaggggggattagagacaagccagcccgaaggcgaagctggcgttggcgtggagtccaacagcgacggggcctccccagagccttgcacagttacaccaggcgccgtcaagctggagaaagaaaagctggaacagaacccagaggagtctcaggatattaaggccctgcagaaagaacttgagcagtttgcaaaactgctgaagcagaagcggatcacccttggctacactcaggccgacgtcggactgacactcggtgttttgttcgggaaggtgttttctcagacaacgatttgtaggtttgaagctctgcagttgagttttaagaacatgtgtaaacttaggcctttgctgcagaagtgggtagaggaagcagataataacgaaaatctgcaggaaatatgtaaagctgagaccctagtacaggcccggaaaaggaagcgaacaagtatcgaaaacagagtacgcgggaatttggagaatctgtttttgcagtgcccaaagcctactttacaacaaattagtcatattgctcaacagctgggactggaaaaggatgttgtacgggtgtggttctgcaatagaaggcagaaaggcaagagaagctcctccgactacgcccagcgggaagactttgaggcagccggatctccatttagcggtggacccgtgagctttcctttggcgcccgggccccatttcggcactcctggatacggctcgccacatttcacagcactctactcctctgtgccattccctgagggggaggcctttcctcccgtatccgtgacaacattgggtagcccaatgcactccaactag

SEQ ID NO: 131084 - DNA, 372 bp, Artificial Sequence
  derived and/or modified sequence
atggccggccacctggccagcgacttcgccttcagccccccccccggtggtgggggagacggaccgggtgggccggagcctggatgggtagacccccgtacctggctgtcatttcagggaccacctggcggccctgggatcgggccaggagtcggacccggctcagaggtctgggggatccccccctgcccccccccgtatgagttttgtggcgggatggcctactgtggcccccaggtgggtgtggggctggtgccacaaggcggactggagacgtcccaacccgaaggagaggccggagtgggagtcgagacacctatgggacccccccggtcccccgccccccaccccttcccttttccacttttgtag

SEQ ID NO: 131085 - DNA, 558 bp, Artificial Sequence
  derived and/or modified sequence
atggccggccacctggccagcgacttcgccttcagccccccccccggcggtggaggtgatggccccgggggaccagaacctggatgggtagatcctcgcacatggctgagttttcaaggcccccccgggggccctggcatcggacccggcgttggtcccgggtccgaagtttggggcatccccccatgtccccccccatacgaattttgtgggggaatggcatactgcggccctcaggtcggggtcggacttgtgcctcagggtggcctggaaacgagccagcccgagggtgaagccggtgtaggggttgagtctaattccgatggcgctagcccagagccctgcaccgttacaccaggagctgtgaaactggagaaggagaagctggaacagaaccccgaggaatctcaggacataaaagccctgcagaaagaattggaacaattcgccaaactgctgaagcaaaagaggatcaccctggggtacactcaggcagacgtccatcccggcggctccatctgggagggcattcaacctaatgaccacttgcccctgtag

SEQ ID NO: 131086 - DNA, 372 bp, Artificial Sequence
  derived and/or modified sequence
atggccggccacctggccagcgacttcgccttcagccccccccccggaggagggggggacgggcctggggggcccgaaccgggctgggtggaccccaggacttggctctcttttcaggggccgcctggagggcctggaatcggacccggagtcggtcctgggagcgaagtgtggggcatccctccttgccctccgccctacgagttctgtggtggcatggcctactgtggcccccaggtgggggtggggctggttccccagggcggccttgagacaagccagccagaaggtgaagcaggagtcggagtggagaccccaatgggccccccacgaagcccagcgccacatccttttccctttccactgttgtag

SEQ ID NO: 131087 - DNA, 558 bp, Artificial Sequence
  derived and/or modified sequence
atggccggccacctggccagcgacttcgccttcagccccccccccggggggggcggcgatggtcccggaggtcccgaacccggctgggtcgatccccgcacctggctgagcttccagggtccacctggcggtcccgggattgggcctggcgtggggcccgggtcagaagtgtggggcattcccccctgcccccctccatacgaattttgcggagggatggcctattgcggcccgcaggtgggcgtcggtcttgtcccccagggcgggctggaaacaagtcaacctgaaggggaagccggcgtcggagttgaatctaactcagacggtgcatctcctgagccatgtactgtgactccgggcgccgtcaaattagaaaaggagaagttggagcagaatcccgaggagtcgcaggatatcaaagctctgcagaaggaactcgaacaattcgccaagcttctgaagcaaaagcgtattacacttggctacacccaagcagacgtacaccctggaggctcaatttgggaggggattcaaccgaatgaccacctgccattgtag

SEQ ID NO: 131088 - DNA, 372 bp, Artificial Sequence
  derived and/or modified sequence
atggccggccacctggccagcgacttcgccttcagccccccccccggcggcgggggcgacggaccgggaggacctgagccagggtgggttgatcctcggacctggctgagtttccaggggcccccaggcggcccaggaatcgggcctggggtgggtccgggatctgaggtctggggaataccgccctgcccaccgccttatgagttttgtggaggcatggcatattgtggaccacaggtgggggtaggcctggtaccacagggcgggttggagacgtcacaaccagaaggagaagctggcgtgggagtggaaacaccgatgggtccaccacgctcacccgccccacatccgttcccttttcccctgctgtag

SEQ ID NO: 131089 - DNA, 558 bp, Artificial Sequence
  derived and/or modified sequence
atggccggccacctggccagcgacttcgccttcagccccccccccggcggggggggggatggccccgggggacctgaacccggatgggtcgatcctaggacctggctaagttttcagggacctcccggagggcccggtatcggacccggagtcggtcctgggagcgaagtgtggggaatacctccttgtccaccaccttacgagttctgtggcggcatggcctattgcggtccacaggtgggcgttgggctggtgcctcagggtggtctcgagacatctcagcccgaaggcgaggccggagtcggagtggagtcgaatagcgacggcgcttctcccgagccttgcaccgttacacccggggcggtgaagcttgaaaaagagaagctggagcagaacccagaagaatctcaggatattaaggccctgcagaaagaattagaacaattcgcaaaattactgaagcagaaacggatcacgctggggtacacccaggccgatgtgcacccaggtggcagcatttgggaggggatacagcccaacgatcatctccctttgtag

SEQ ID NO: 131090 - DNA, 558 bp, Artificial Sequence
  derived and/or modified sequence
atggccggccacctggccagcgacttcgccttcagccccccccccggcggaggaggggacgggcccggaggcccggagcccgggtgggtggaccctagaacgtggctctccttccaagggcctcctggtggaccgggaatcggtcctggagtcggacccggtagcgaggtttggggcatccctccctgcccaccaccctacgaattctgtggaggcatggcgtactgtgggccacaggtaggcgtaggactagtgccccaggggggtctggagactagtcagccagagggagaggctggggtaggcgtggaatcaaactccgacggggctagcccagagccttgcactgtaactcccggagcggtcaagctggaaaaggagaaactggaacagaatccagaggaatcccaggacattaaagcgctgcagaaagaactcgagcaatttgccaagctgcttaagcagaagaggatcaccctggggtatacccaagctgacgtgcacccgggcgggagtatttgggagggaattcagcccaacgaccatctgcccttgtag

SEQ ID NO: 131091 - DNA, 372 bp, Artificial Sequence
  derived and/or modified sequence
atggccggccacctggccagcgacttcgccttcagccccccccccggtggaggaggtgacggcccgggcggccccgagcctggatgggttgacccccggacttggctgagctttcaagggcccccaggtggccccggaatcgggcctggggttgggccgggatctgaggtgtggggcatccccccgtgtcctccaccatatgagttctgtggaggtatggcgtactgcggcccccaggtcggcgtgggtctggtgcctcagggcggattggaaacaagccagcccgaaggcgaagcaggcgtgggcgtagagacccccatgggcccacctaggagccccgctccccacccttttcctttccctctcctctag

SEQ ID NO: 131092 - DNA, 372 bp, Artificial Sequence
  derived and/or modified sequence
atggccggccacctggccagcgacttcgccttcagccccccccccgggggggggggcgacgggcccggaggccccgagccaggttgggtagatccccgtacctggctgagctttcagggcccaccaggaggcccaggcattggcccaggggtggggcctggttctgaggtctggggaatacccccctgccccccaccatatgagttttgcggcggaatggcttactgcggacctcaggtgggcgtgggcctggtgccgcaaggaggcctcgaaacatcccaaccagaaggagaagccggagtgggggtcgaaacccctatgggcccccctagaagtcccgcaccgcacccatttccttttcccctgttgtag

SEQ ID NO: 131093 - DNA, 1083 bp, Artificial Sequence
  derived and/or modified sequence
atggccggtcacctcgcatccgatttcgccttctctccccctcccggaggaggtggggatggaccaggcggtcctgaaccaggatgggtggaccctcggacatggctctcgttccaagggcctcctggaggacccggtatcggtccaggcgtcggacccggatctgaggtctggggaattcccccttgtccacctccctacgagttttgcggcggtatggcgtactgtgggcctcaggtaggggtgggcttagtgcctcaagggggactggaaacctcccagccagagggcgaagctggggtgggagtggaatcgaacagcgacggcgcttctcctgagccatgtaccgtgaccccgggagctgtgaagctggagaaggagaagctggaacagaatcccgaggagagccaggacatcaaagcccttcagaaagagctggagcaattcgcaaagctgctgaagcagaaacggatcacactgggttatactcaagccgatgtaggcctgacactcggagtcctgttcggcaaagtgttcagtcagacgacgatctgtcgctttgaagccctgcagttgtcgtttaaaaacatgtgtaagctacgccctttgctgcagaaatgggttgaggaggccgataataatgaaaatctgcaggagatttgcaaggctgagaccctggtccaggctaggaaacggaaaaggacaagtatcgagaaccgggtgcggggaaatctggaaaatctctttctgcagtgtccaaagcctacactccagcagatttcgcacatcgcacagcagctgggcctggaaaaagatgtcgttagagtctggttttgcaacaggaggcaaaagggcaaacgtagttccagtgactacgcccaaagagaggactttgaggctgctggcagtcccttttctgggggtccagtgagctttccactcgcgcctggccctcacttcggtacacccggatatggtagtccccattttactgcgttgtattcctcagtgccattcccagaaggcgaggccttcccacctgtttctgtaaccactttaggcagcccaatgcattctaactag

SEQ ID NO: 131094 - DNA, 1083 bp, Artificial Sequence
  derived and/or modified sequence
atggccggtcatttggctagcgacttcgcttttagtcccccaccaggcggtggaggagacggaccagggggacctgaaccgggttgggttgaccccagaacatggctgtccttccagggacctcctgggggtccaggcattggccctggagtcggcccaggctctgaggtatggggaatccccccttgtcccccaccgtatgagttttgcggcggaatggcctattgtggaccccaggtgggtgtcggtcttgtgcctcagggtggtctcgaaacatcccagcccgagggggaagccggtgtgggtgttgaatcgaactcggacggagcatctcccgagccttgtacagttactccaggcgcagttaaattagagaaagaaaagcttgagcagaatcctgaagaaagtcaagacattaaggctctgcaaaaagaactggagcagtttgctaagttgctgaaacagaagcgcatcacgctcgggtacacgcaggccgacgtcggattaacgctgggggtgctttttggaaaagtgttctctcagactactatttgccgtttcgaggcgctacagctgtcatttaaaaatatgtgcaagcttagacccctgctacagaagtgggtggaggaagccgataacaatgaaaatctacaggagatttgcaaggccgagactctcgtgcaggccagaaagagaaaacggacctcaattgagaaccgggtgagaggtaacctggaaaatctttttctgcagtgccctaagcctaccctgcagcagatcagccacatcgctcagcagctgggtctggaaaaggatgtggtacgagtctggttctgcaaccgcagacagaagggtaaacgctctagttcagactatgcccagagggaggatttcgaagccgcaggaagcccattctctggtggccctgtcagttttccgctggctccaggcccacactttggcacaccgggatacggttctccacatttcacagctctttatagcagtgtgccatttcctgagggggaagcatttccaccggtgagcgttactacgcttgggagtcctatgcactccaattag

SEQ ID NO: 131095 - DNA, 1083 bp, Artificial Sequence
  derived and/or modified sequence
atggccggacatcttgccagtgacttcgctttttctcctcccccaggtggaggtggcgacgggccaggcggacctgagcctggatgggttgatccaagaacgtggctcagttttcagggtcctcccggaggacctggtataggcccaggagttggccctggtagtgaggtgtgggggatcccaccctgccctccaccgtacgaattctgtggtggcatggcatattgtgggcctcaggtgggagtggggcttgtaccccaagggggacttgaaacttcccagccggagggagaagccggtgttggtgtggaatctaattccgatggcgcaagcccggaaccctgtacagtgactcccggtgctgttaaacttgaaaaggagaagcttgagcaaaatccagaggaaagccaggatatcaaagccctacagaaagagctggagcagttcgcgaaactacttaagcagaagcgcattactctgggctatacacaggctgatgtgggtctgacattgggcgtcctgttcgggaaggtcttttcacaaactacgatttgtaggttcgaggcgctgcagctgagttttaagaatatgtgcaagctccgtccattgttacagaagtgggttgaagaggccgataataatgaaaatcttcaagagatatgcaaagctgaaacactggtgcaggcacggaaacggaagaggacctctatagagaatagggtgcgcggaaatttggagaacctgtttctccagtgccctaagcctacactgcagcagatcagccacattgcgcaacagctgggcctggaaaaagacgttgttagggtgtggttctgcaatcggaggcaaaagggcaaaaggtcctcctccgactacgcccagcgagaggactttgaggctgccggatctcctttttctggcggacccgtgtcttttcctcttgcacctgggccacactttggtacccccggttacggttctccgcacttcactgcactatatagctcagtgcctttcccagaaggcgaagcatttccacccgtatcggtgacaacgctagggtcaccgatgcattccaactag

SEQ ID NO: 131096 - DNA, 1083 bp, Artificial Sequence
  derived and/or modified sequence
atggccggacaccttgccagcgacttcgcttttagcccacctcctgggggagggggagacgggcctgggggaccagagcctgggtgggttgaccccaggacctggcttagttttcaagggcctcctggaggacctgggataggtcccggtgtaggccctgggtctgaagtttggggaattcctccatgcccacccccttacgaattctgcgggggaatggcgtattgcgggcctcaagtcggggttgggttggtgccccaggggggactggagacgagccagccagaaggagaggccggtgtgggagtggagtcaaactctgacggggcttccccagaaccttgtaccgttacccccggagcagtgaaattggagaaggaaaagctcgagcagaatcccgaagaaagccaggacataaaagccctgcagaaagaattagaacaatttgcaaaactacttaagcagaaaagaatcactcttggctacacgcaggccgacgtggggctcactctgggggtgctgttcggtaaagttttctcccagaccacgatctgcagattcgaagcgttgcaactgtcgtttaagaatatgtgcaaactgcgacctttgctgcagaaatgggttgaagaagccgataacaatgagaacctacaggagatctgcaaggcagaaactctggttcaggcccgtaagagaaagcggacaagtatcgagaatagagtccgcggtaatctcgagaaccttttcctgcaatgtccgaaaccgaccctgcagcaaatttcccatatcgcacaacagctggggttggaaaaagatgtcgttcgcgtgtggttctgcaaccgcaggcagaagggcaaacggtcaagttccgactatgcacaacgcgaggactttgaggcagccggtagcccgttctcaggcggtccagtttccttcccgcttgctcctgggccacatttcgggactccgggttatggttcccctcattttaccgctctctactcaagcgttcctttccccgaaggcgaggcgttccctcccgtgagcgtgaccactctaggctcacccatgcattccaattag

SEQ ID NO: 131097 - DNA, 1083 bp, Artificial Sequence
  derived and/or modified sequence
atggcaggacacctggccagtgattttgcattcagccctccaccaggtggaggtggagatgggccaggtgggcctgaaccaggatgggtggatccacgcacgtggctgagctttcaggggccacccggaggcccaggcattggtcccggtgtggggcctggaagtgaagtgtgggggatccccccatgtcctccgccttacgaattttgtggagggatggcctattgtggtccacaggttggggtgggtttggtgccccagggcggtctcgaaacaagccagcctgaaggcgaagcaggcgtcggtgtggagtccaactccgacggcgcttctccagagccctgcacagtcacccctggcgctgtgaagctagagaaagagaaattggagcaaaatcctgaggagtcccaggacatcaaggctctccagaaggagctagagcagttcgcaaaattgctcaagcaaaaacgcatcaccctggggtacactcaagctgacgtcgggctgaccctcggggtgctcttcggcaaagtgttcagtcaaaccacaatttgcagattcgaagcactgcaattgagctttaagaacatgtgcaaactacgacccctgctgcagaagtgggtcgaagaggcagataataatgagaaccttcaggagatctgtaaggccgaaactctcgttcaggcgcgaaagaggaagagaacatctattgagaaccgggtgcggggaaatcttgaaaatttatttctgcagtgcccaaaaccaaccctccaacagatttcacacatcgcgcagcagctcgggttggaaaaagacgtggtgcgagtctggttttgtaaccgtagacagaaaggcaagaggtcttcatctgactacgcacagcgcgaggacttcgaggcagccggatcccccttcagcgggggacccgtgtctttccccctagccccaggtccccactttggtacccccggttatggcagccctcattttaccgctctctactcctcagtgccattccctgaaggagaggccttcccccctgtttcggtgacgaccttgggatctcccatgcacagtaactag

SEQ ID NO: 131098 - DNA, 369 bp, Artificial Sequence
  derived and/or modified sequence
atggctggacatctggcatccgacttcgcgttttcccctcctccaggcggaggcggagatggacctggcggaccggaaccaggctgggtggatcctcgaacctggttgagttttcagggccctcctgggggaccagggattgggccaggtgtggggccagggtcagaagtgtggggcatcccaccctgtccccctccctacgaattctgtgggggtatggcttactgcgggccacaagtcggcgttggtttagttcctcaggggggactggagacctcccagcccgaaggggaggcaggcggaggcgagcagcttcgatggggtttgcccggtgcgctccacaggcatccctggtgccgtgaagcctag

SEQ ID NO: 131099 - DNA, 1083 bp, Artificial Sequence
  derived and/or modified sequence
atggccggacatttggccagcgattttgccttcagtcccccaccaggcggaggaggagatgggcctggtggccctgagccgggatgggtggacccacgtacatggctcagcttccaggggccacccggtggtcctgggatcggacctggagttggccctggtagcgaggtctggggcattccgccttgcccacccccttatgaattttgtgggggtatggcctactgtggccctcaggttggtgtcggattggtgcctcagggcggtttagaaacatctcagccagagggcgaagccggtgttggtgtcgagtcaaatagtgacggagcctcacctgaaccctgtactgttacccctggcgctgtcaagctggaaaaagaaaaactggagcagaacccggaggaatcccaggatatcaaggcattacagaaagagctggagcaatttgccaaactcctgaagcaaaaacgcatcactctgggatatacacaagctgacgtaggcttgactctgggggtgctgtttgggaaggtgtttagtcagaccacaatctgccgctttgaggcactgcaattatccttcaagaacatgtgtaagcttcggccactgctacagaagtgggtcgaagaggccgataataacgagaaccttcaagaaatatgtaaggctgagaccctggtacaggcgcgtaaacgcaagcgaacatcaattgagaaccgcgtacgcggaaacctcgaaaacctgttcctccaatgcccaaaaccaacgctgcaacagattagccatattgctcaacaactgggcttagaaaaagatgttgtgcgtgtttggttttgcaaccggagacagaagggtaaacgctccagttctgactacgcccagcgtgaagattttgaagctgcgggatcacccttttccggtggtcctgttagttttccactagctcctggacctcatttcggtacacccggttacggtagcccacattttacagcattatacagctctgtgccttttccagaaggcgaggcattccctccagtttccgtgactaccctgggctctccgatgcattccaactag

SEQ ID NO: 131100 - DNA, 372 bp, Artificial Sequence
  derived and/or modified sequence
atggccggacatctggcaagtgatttcgccttctctccaccgcctggcggaggcggagatgggcctggcggacccgagccagggtgggtggacccacggacatggttgagcttccagggccctccgggtggcccaggcataggtcccggagtgggccctgggtccgaggtatggggaatccccccttgtcctccaccatatgaattttgtggtggcatggcctactgtgggccacaagtaggggtagggctggtgccacagggcggtctggagaccagccagcccgaaggagaagccggagtgggcgttgagacaccaatgggaccacctaggtccccagcaccccatccgttccctttccccctgctgtag

SEQ ID NO: 131101 - DNA, 558 bp, Artificial Sequence
  derived and/or modified sequence
atggccggacaccttgccagcgactttgccttctcacctcctcccggaggaggaggtgacggacctggtgggccagagcccggatgggtcgacccaagaacctggctttcattccaagggcctccgggaggccctggaatcggaccgggagttgggcctggttctgaggtctggggtattcccccatgcccacccccatacgagttttgcggcggtatggcctactgtggacctcaggtaggtgttggcctggtgccgcaaggagggctagagacttctcaaccagagggcgaagccggtgtcggcgtagagagtaattccgatggcgcaagtcccgagccctgtaccgtaactcctggagcagtgaagttagagaaagagaagctggagcagaatcccgaggaaagccaggatataaaggcccttcagaaggaattagaacagttcgccaaactgcttaaacaaaagcgaattacactcggatacactcaggccgacgttcatccaggaggctcaatctgggaaggtatacagcctaacgatcacctgcccttatag

SEQ ID NO: 131102 - DNA, 372 bp, Artificial Sequence
  derived and/or modified sequence
atggcaggccatctagcttctgactttgccttttctcctccacccggagggggtggggatggtccgggaggaccagagcccggatgggtggacccgagaacttggctgtcattccagggtcctcctgggggacccggtatagggcctggggtcggaccaggctcggaggtctggggaatacctccatgtcctccgccatacgaattctgtgggggaatggcctattgcgggcctcaagtgggcgtgggcttggtcccacaaggaggtctggagactagccagcccgaaggcgaagccggtgttggagtggagactcccatgggccctccacgttcccctgcaccgcatccgttcccatttccattactgtag

SEQ ID NO: 131103 - DNA, 558 bp, Artificial Sequence
  derived and/or modified sequence
atggccggtcatctcgcttctgatttcgcattttcacctcccccaggcggaggcggtgatggcccaggtggtccagagcccggttgggtcgaccccaggacctggttgtcattccaggggcctccaggtggacccggtataggacccggtgttggccctggttcagaagtttggggcattcctccttgtccccctccatatgagttttgcggtggcatggcctactgtggccctcaagtcggcgttggactcgtacctcagggcggtcttgagacttcgcagccagagggcgaggcaggcgtgggggttgagagtaattcagacggggctagccccgagccttgtactgtgacccctggggcagttaagctcgagaaagaaaaacttgaacagaaccccgaggagagtcaagacattaaggccctccagaaggagcttgaacagttcgccaagttgcttaagcaaaaacggattacactgggatatactcaggcagacgttcatcccggtggctccatctgggaaggtatccagcctaacgaccacctgcccctgtag

SEQ ID NO: 131104 - DNA, 372 bp, Artificial Sequence
  derived and/or modified sequence
atggccggacatctggccagcgacttcgccttctcaccaccccctggtggaggtggcgacggacctggaggcccagagcctggatgggtcgaccccaggacctggctctcatttcagggcccacccggtgggcctggcatcgggccaggggtgggcccaggttccgaggtgtggggtattcccccatgtcctcccccatatgagttttgtggcggtatggcgtattgtgggccacaagtgggagtcggtctggtgccccagggcggactggagacaagccagccggagggtgaggccggagtgggagtagagaccccaatgggccctccaagatctcccgctcctcacccttttcccttcccgcttctctag

SEQ ID NO: 131105 - DNA, 558 bp, Artificial Sequence
  derived and/or modified sequence
atggccggacatctggcatccgattttgccttcagcccccctccaggaggagggggagatggccctgggggacccgagcctggttgggttgatccgcgtacttggctgtcttttcagggacccccaggaggtcccggaatcggacccggtgtcggtcctggaagtgaggtatggggaattcctccatgcccacctccttatgagttctgtgggggtatggcctactgcgggcctcaggtcggagttggtttggttccccagggcggacttgagacctcacagcccgagggtgaggctggggtgggcgttgagtcaaactcggacggggctagtcccgagccttgtacagtgacgcccggtgctgtgaagttggagaaagagaagttggagcaaaaccctgaggaaagccaagatattaaggctctacaaaaggagctggagcaattcgccaaactcctgaagcagaaacgtatcacgctaggctacacacaagcagacgtacatcccggtggcagtatatgggaaggaatccaacctaacgaccacctaccattgtag

SEQ ID NO: 131106 - DNA, 558 bp, Artificial Sequence
  derived and/or modified sequence
atggctgggcacctggcaagtgacttcgcctttagcccaccccctggtggtggcggagatgggcctggcggtcctgaacctggctgggtagaccctcgcacgtggctctctttccaagggccaccaggtgggccaggcataggaccgggtgttggcccaggcagcgaggtgtggggcataccaccatgcccgcctccttatgagttctgtgggggtatggcatattgcgggcctcaggtcggcgtgggtctggtgccacagggcggtctggaaacctctcaacccgagggagaagcaggcgtgggggttgaaagtaattcagacggggcatcaccggaaccatgcaccgtgactcccggtgcagtgaaactggaaaaggagaaattggaacagaatcccgaagagtcgcaggacatcaaggcattgcagaaagagcttgagcaattcgccaagctgttgaagcagaagcgtattactttaggatacacacaggccgacgtgcaccctggaggatccatttgggagggtatccaacccaatgaccacctccctctatag

SEQ ID NO: 131107 - DNA, 372 bp, Artificial Sequence
  derived and/or modified sequence
atggcgggacatttggcgtccgattttgctttttcaccccctccaggtggcggaggggatgggcctgggggtcctgaacccggttgggttgatccccgtacttggctgagttttcagggcccacccggaggtcctgggatcggccctggtgtggggccagggtcggaagtatgggggatccccccttgccccccaccttatgagttttgcggtggaatggcctattgcggtccccaggttggggtgggcctggtgccccagggcggactcgagacaagccagcccgagggggaagcgggtgtaggagtcgaaacccccatgggacctccacgctctcccgcaccacacccgttccccttccctctactgtag

SEQ ID NO: 131108 - DNA, 372 bp, Artificial Sequence
  derived and/or modified sequence
atggccggtcacctggctagcgatttcgcgttctctcctccacccggaggtggaggagatggacccggtggtccagagcccggatgggtggacccccgtacctggttgagcttccagggtcctccagggggtcccggaattggacctggagtgggaccagggtcggaagtttggggaatacccccttgccctcctccgtacgagttttgtggaggaatggcctactgcggacctcaagtgggcgtgggtttggtgccccagggtggccttgagactagtcagccggagggagaggcaggcgtgggggtagagaccccgatggggcctccccgatcacctgcgcctcatccttttcccttcccactcctgtag

SEQ ID NO: 131109 - DNA, 3262 bp, Artificial Sequence
  derived and/or modified sequence
ccttcgcaagccctcatttcaccaggcccccggcttggggcgccttccttccccatggcgggacacctggcttcggatttcgccttctcgccccctccaggtggtggaggtgatgggccaggggggccggagccgggctgggttgatcctcggacctggctaagcttccaaggccctcctggagggccaggaatcgggccgggggttgggccaggctctgaggtgtgggggattcccccatgccccccgccgtatgagttctgtggggggatggcgtactgtgggccccaggttggagtggggctagtgccccaaggcggcttggagacctctcagcctgagggcgaagcaggagtcggggtggagagcaactccgatggggcctccccggagccctgcaccgtcacccctggtgccgtgaagctggagaaggagaagctggagcaaaacccggaggagtcccaggacatcaaagctctgcagaaagaactcgagcaatttgccaagctcctgaagcagaagaggatcaccctgggatatacacaggccgatgtggggctcaccctgggggttctatttgggaaggtattcagccaaacgaccatctgccgctttgaggctctgcagcttagcttcaagaacatgtgtaagctgcggcccttgctgcagaagtgggtggaggaagctgacaacaatgaaaatcttcaggagatatgcaaagcagaaaccctcgtgcaggcccgaaagagaaagcgaaccagtatcgagaaccgagtgagaggcaacctggagaatttgttcctgcagtgcccgaaacccacactgcagcagatcagccacatcgcccagcagcttgggctcgagaaggatgtggtccgagtgtggttctgtaaccggcgccagaagggcaagcgatcaagcagcgactatgcacaacgagaggattttgaggctgctgggtctcctttctcagggggaccagtgtcctttcctctggccccagggccccattttggtaccccaggctatgggagccctcacttcactgcactgtactcctcggtccctttccctgagggggaagcctttccccctgtctccgtcaccactctgggctctcccatgcattcaaactgaggtgcctgcccttctaggaatgggggacagggggaggggaggagctagggaaagaaaacctggagtttgtgccagggtttttgggattaagttcttcattcactaaggaaggaattgggaacacaaagggtgggggcaggggagtttggggcaactggttggagggaaggtgaagttcaatgatgctcttgattttaatcccacatcatgtatcacttttttcttaaataaagaagcctgggacacagtagatagacacacttatcttggtttgtccttcagttactgaggtagggatgggaatatccaatgctcatacccaagtgaccctgaaactaaggtgccatttacactccttaaggtcacacaacatcagagggagagctgggattgcagccaagtttatttgtacagggccctgtgataggctagttcccaaaagcctgtgatgcaagaacttttgcccatagactcagtcaccatgtagctgttacctgttcagagctggctttttgctttcccaccctactctggaattcttaaatggctttatacttagaaatcatcttatttctgttgaacctagatcaccccaaccagaaacttctattaatactttgtgctttcttgataccagggtctatttggtttccacttaaggtttttgcatactctgcccataagtgactcattagttactcaagttttattcctggctctgccactagttcattaggggtctttgccccagagtcatttcttccattttaaaaacttgggctcattaaatctaggtaggaaagggcgggtgtggcaggttttaatagaacaggtcaagataaggctttatttctatagaaatgatgctttgacaatagtttggcttggtgtaaggctcacaaaagaaaatcacatgtaccatgtgtgggttaagcggtttgattcacactgaaccaggccagcccagttgccctctgctgtgtccacccgtggagtggagctgtgtcacagccatcacactggtaaactgctgtagctggtttaccaggctttctcttgccctgacagtacaggtgaagcctgtaaataaatcttctgctatctttgtgaacttaaccaaatcccagttaccttatttaaatggcaatagatctgttttcccttaaactagaaaccttaattacctgtattcctacctccagctcaacccatatatttgcacctttccagtaagcaggtttgtatttccatctctccccttcccctaagattctgaattagttctccagaccttgccaagcacattctccctggaaagcaaggaatatcacagacccacaagaagagtaaatgcccaggagtgaatgaagcggcttgtccttgacttggaaataaaagcaaagctgtgaaaagccaggtcgctacgattttgttggcagcaggactagccacagagtagggaagttttggggccaggccctaggttttcccagaatgccttgggtgatgccaccaagaaccttaagaactccctcttacattttccatcggttgcaggcatggcttttgcaactgataggtgctctgactacagatattctggtgtccatggcaacatggccttatggcttgtaatagtgggaacttccagctcactggcaatttcctggaggtggcaatatctttggcaggaaaccatctcttctgtcttggccaccagggtctgctccaggccctgaatgagtccacatcaatccatccttcttccctgtagtcattccctcctggggagggaagggaaggggggtatttatcagacctatttgctcgctgctgtgtctactcatgggcaggtgtgtccgatggtgccttggcagtggaccttaggtctgaatgccagcccggcaccctgggcatcggaagtcggcctccctggcagcctggatgctgcagccaacacaggccacatggaaccagacgtcacagccatcacactgaacccaggccactgtctcttcctggggcaggcagcaacaaggagctgcacagggctccccgcccccaactgcagggggagccatgggagcgctcactgggtacttccgaggacggccacgtcgatttc

SEQ ID NO: 131110 - DNA, 1420 bp, Artificial Sequence
  derived and/or modified sequence
agagaggggttgagtagtcccttcgcaagccctcatttcaccaggcccccggcttggggcgccttccttccccatggcgggacacctggcttcggatttcgccttctcgccccctccaggtggtggaggtgatgggccaggggggccggagccgggctgggttgatcctcggacctggctaagcttccaaggccctcctggagggccaggaatcgggccgggggttgggccaggctctgaggtgtgggggattcccccatgccccccgccgtatgagttctgtggggggatggcgtactgtgggccccaggttggagtggggctagtgccccaaggcggcttggagacctctcagcctgagggcgaagcaggagtcggggtggagagcaactccgatggggcctccccggagccctgcaccgtcacccctggtgccgtgaagctggagaaggagaagctggagcaaaacccggaggagtcccaggacatcaaagctctgcagaaagaactcgagcaatttgccaagctcctgaagcagaagaggatcaccctgggatatacacaggccgatgtggggctcaccctgggggttctatttgggaaggtattcagccaaacgaccatctgccgctttgaggctctgcagcttagcttcaagaacatgtgtaagctgcggcccttgctgcagaagtgggtggaggaagctgacaacaatgaaaatcttcaggagatatgcaaagcagaaaccctcgtgcaggcccgaaagagaaagcgaaccagtatcgagaaccgagtgagaggcaacctggagaatttgttcctgcagtgcccgaaacccacactgcagcagatcagccacatcgcccagcagcttgggctcgagaaggatgtggtccgagtgtggttctgtaaccggcgccagaagggcaagcgatcaagcagcgactatgcacaacgagaggattttgaggctgctgggtctcctttctcagggggaccagtgtcctttcctctggccccagggccccattttggtaccccaggctatgggagccctcacttcactgcactgtactcctcggtccctttccctgagggggaagcctttccccctgtctctgtcaccactctgggctctcccatgcattcaaactgaggtgcctgcccttctaggaatgggggacagggggaggggaggagctagggaaagaaaacctggagtttgtgccagggtttttgggattaagttcttcattcactaaggaaggaattgggaacacaaagggtgggggcaggggagtttggggcaactggttggagggaaggtgaagttcaatgatgctcttgattttaatcccacatcatgtatcacttttttcttaaataaagaagcctgggacacagtagatagacacactta

SEQ ID NO: 131111 - DNA, 1420 bp, Artificial Sequence
  derived and/or modified sequence
agagaggggttgagtagtcccttcgcaagccctcatttcaccaggcccccggcttggggcgccttccttccccatggcgggacacctggcttcagatttcgccttctcgccccctccaggtggtggaggtgatgggccaggggggccggagccgggctgggttgatcctcggacctggctaagcttccaaggccctcctggagggccaggaatcgggccgggggttgggccaggctctgaggtgtgggggattcccccatgccccccgccgtatgagttctgtggggggatggcgtactgtgggccccaggttggagtggggctagtgccccaaggcggcttggagacctctcagcctgagggtgaagcaggagtcggggtggagagcaactccgatggggcctccccggagccctgcaccgtcacccctggtgccgtgaagctggagaaggagaagctggagcaaaacccggaggagtcccaggacatcaaagctctgcagaaagaactcgagcaatttgccaagctcctgaagcagaagaggatcaccctgggatatacacaggccgatgtggggctcaccctgggggttctatttgggaaggtattcagccaaacgaccatctgccgctttgaggctctgcagcttagcttcaagaacatgtgtaagctgcggcccttgctgcagaagtgggtggaggaagctgacaacaatgaaaatcttcaggagatatgcaaagcagaaaccctcgtgcaggcccgaaagagaaagcgaaccagtatcgagaaccgagtgagaggcaacctggagaatttgttcctgcagtgcccgaaacccacactgcagcagatcagccacatcgcccagcagcttgggctcgagaaggatgtggtccgagtgtggttctgtaaccggcgccagaagggcaagcgatcaagcagcgactatgcacaacgagaggattttgaggctgctgggtctcctttctcagggggaccagtgtcctttcctctggccccagggccccattttggtaccccaggctatgggagccctcacttcactgcactgtactcctcggtccctttccctgagggggaagcctttccccctgtctctgtcaccactctgggctctcccatgcattcaaactgaggtgcctgcccttctaggaatgggggacagggggaggggaggagctagggaaagaaaacctggagtttgtgccagggtttttgggattaagttcttcattcactaaggaaggaattgggaacacaaagggtgggggcaggggagtttggggcaactggttggagggaaggtgaagttcaatgatgctcttgattttaatcccacatcatgtatcacttttttcttaaataaagaagcttgggacacagtagatagacacactta

SEQ ID NO: 131112 - DNA, 1420 bp, Artificial Sequence
  derived and/or modified sequence
agagaggggttgagtagtcccttcgcaagccctcatttcaccaggcccccggcttggggcgccttccttccccatggcgggacacctggcttcagattttgccttctcgccccctccaggtggtggaggtgatgggccaggggggccggagccgggctgggttgatcctcggacctggctaagcttccaaggccctcctggagggccaggaatcgggccgggggttgggccaggctctgaggtgtgggggattcccccatgccccccgccgtatgagttctgtggggggatggcgtactgtgggccccaggttggagtggggctagtgccccaaggcggcttggagacctctcagcctgagggcgaagcaggagtcggggtggagagcaactccgatggggcctccccggagccctgcaccgtcacccctggtgccgtgaagctggagaaggagaagctggagcaaaacccggaggagtcccaggacatcaaagctctgcagaaagaactcgagcaatttgccaagctcctgaagcagaagaggatcaccctgggatatacacaggccgatgtggggctcaccctgggggttctatttgggaaggtattcagccaaacgaccatctgccgctttgaggctctgcagcttagcttcaagaacatgtgtaagctgcggcccttgctgcagaagtgggtggaggaagctgacaacaatgaaaatcttcaggagatatgcaaagcagaaaccctcgtgcaggcccgaaagagaaagcgaaccagtatcgagaaccgagtgagaggcaacctggagaatttgttcctgcagtgcccgaaacccacactgcagcagatcagccacatcgcccagcagcttgggctcgagaaggatgtggtccgagtgtggttctgtaaccggcgccagaagggcaagcgatcaagcagcgactatgcacaacgagaggattttgaggctgctgggtctcctttctcagggggaccagtgtcctttcctctggccccagggccccattttggtaccccaggctatgggagccctcacttcactgcactgtactcctcggtccctttccctgagggggaagcctttccccctgtctctgtcaccactctgggctctcccatgcattcaaactgaggtgcctgcccttctaggaatgggggacagggggaggggaggagctagggaaagaaaacctggagtttgtgccagggtttttgggattaagttcttcattcactaaggaaggaattgggaacacaaagggtgggggcaggggagtttggggcaactggttggagggaaggtgaagttcaatgatgctcttgattttaatcccacatcatgtatcacttttttcttaaataaagaagcttgggacacagtagatagacacactta

SEQ ID NO: 131113 - DNA, 911 bp, Artificial Sequence
  derived and/or modified sequence
atggcgggacacctggcttcggatttcgccttctcgccccctccaggtggtggaggtgatgggccaggggggccggagccgggctgggttgatcctcggacctggctaagcttccaaggccctcctggagggccaggaatcgggccgggggttgggccaggctctgaggtgtgggggattcccccatgccccccgccgtatgagttctgtggggggatggcgtactgtgggccccaggttggagtggggctagtgccccaaggcggcttggagacctctcagcctgagggcgaagcaggaggtggagagcaactccgatggggcctccccggagccctgcaccgtcacccctggtgccgtgaagctggagaaggagaagctggagcaaaacccggaggagtcccaggacatcaaagctctgcagaaagaactcgagcaatttgccaagctcctgaagcagaagaggatcaccctgggatatacacaggccgatgtggggctcaccctgggggttctatttgggaaggtattcagccaaacgaccatctgccgctttgaggctctgcagcttagcttcaagaacatgtgtaagctgcggcccttgctgcagaagtgggtggaggaagctgacaacaatgaaaatcttcaggagatatgcaaagcagaaaccctcgtgcaggcccgaaagagaaagcgaaccagtatcgagaaccgagtgagaggcaacctggagaatttgttcctgcagtgcccgaaacccacactgcagcagatcagccacatcgcccagcagcttgggctcgagaaggatgtggtccgagtgtggttctgtaaccggcgccagaagggcaagcgatcaagcagcgactatgcacaacgagaggattttgaggctgctgggtctcctttct

SEQ ID NO: 131114 - DNA, 369 bp, Artificial Sequence
  derived and/or modified sequence
atggcgggacacctggcttcagattttgccttctcgccccctccaggtggtggaggtgatgggccaggggggccggagccgggctgggttgatcctcggacctggctaagcttccaaggccctcctggagggccaggaatcgggccgggggttgggccaggctctgaggtgtgggggattcccccatgccccccgccgtatgagttctgtggggggatggcgtactgtgggccccaggttggagtggggctagtgccccaaggcggcttggagacctctcagcctgagggcgaagcaggagtcggggtggagactccgatggggcctccccggagccctgcaccgcatccatttcctttcccactcctg

SEQ ID NO: 131115 - DNA, 1395 bp, Artificial Sequence
  derived and/or modified sequence
ccttcgcaagccctcatttcaccaggcccccggcttggggcgccttccttccccatggcgggacacctggcttcagatttcgccttctcgccccctccaggtggtggaggtgatgggccaggggggccggagccgggctgggttgatcctcggacctggctaagcttccaaggccctcctggagggccaggaatcgggccgggggttgggccaggctctgaggtgtgggggattcccccatgccccccgccgtatgagttctgtggggggatggcgtactgtgggccccaggttggagtggggctagtgccccaaggcggcttggagacctctcagcctgagggtgaagcaggagtcggggtggagagcaactccgatggggcctccccggagccctgcaccgtcacccctggtgccgtgaagctggagaaggagaagctggagcaaaacccggaggagtcccaggacatcaaagctctgcagaaagaactcgagcaatttgccaagctcctgaagcagaagaggatcaccctgggatatacacaggccgatgtgcaccctgggggttctatttgggaaggtattcagccaaacgaccatctgccgctttgaggctctgcagcttagcttcaagaacatgtgtaagctgcggcccttgctgcagaagtgggtggaggaagctgacaacaatgaaaatcttcaggagatatgcaaagcagaaaccctcgtgcaggcccgaaagagaaagcgaaccagtatcgagaaccgagtgagaggcaacctggagaatttgttcctgcagtgcccgaaacccacactgcagcagatcagccacatcgcccagcagcttgggctcgagaaggatgtggtccgagtgtggttctgtaaccggcgccagaagggcaagcgatcaagcagcgactatgcacaacgagaggattttgaggctgctgggtctcctttctcagggggaccagtgtcctttcctctggccccagggccccattttggtaccccaggctatgggagccctcacttcactgcactgtactcctcggtccctttccctgagggggaagcctttccccctgtctctgtcaccactctgggctctcccatgcattcaaactgaggtgcctgcccttctaggaatgggggacagggggaggggaggagctagggaaagaaaacctggagtttgtgccagggtttttgggattaagttcttcattcactaaggaaggaattgggaacacaaagggtgggggcaggggagtttggggcaactggttggagggaaggtgaagttcaatgatgctcttgattttaatcccacatcatgtatcacttttttcttaaataaagaagcttgggacacagtagatagacacactt

SEQ ID NO: 131116 - DNA, 369 bp, Artificial Sequence
  derived and/or modified sequence
atggcgggacacctggcttcagatttcgccttctcgccccctccaggtggtggaggtgatgggccaggggggccggagccgggctgggttgatcctcggacctggctaagcttccaaggccctcctggagggccaggaatcgggccgggggttgggccaggctctgaggtgtgggggattcccccatgccccccgccgtatgagttctgtggggggatggcgtactgtgggccccaggttggagtggggctagtgccccaaggcggcttggagacctctcagcctgagggtgaagcaggagtcggggtggagactccgatggggcctccccggagccctgcaccgcatccatttcctttcccactcctg

SEQ ID NO: 131117 - DNA, 1395 bp, Artificial Sequence
  derived and/or modified sequence
ccttcgcaagccctcatttcaccaggcccccggcttggggcgccttccttccccatggcgggacacctggcttcagattttgccttctcgccccctccaggtggtggaggtgatgggccaggggggccggagccgggctgggttgatcctcggacctggctaagcttccaaggccctcctggagggccaggaatcgggccgggggttgggccaggctctgaggtgtgggggattcccccatgccccccgccgtatgagttctgtggggggatggcgtactgtgggccccaggttggagtggggctagtgccccaaggcggcttggagacctctcagcctgagggcgaagcaggagtcggggtggagagcaactccgatggggcctccccggagccctgcaccgtcacccctggtgccgtgaagctggagaaggagaagctggagcaaaacccggaggagtcccaggacatcaaagctctgcagaaagaactcgagcaatttgccaagctcctgaagcagaagaggatcaccctgggatatacacaggccgatgtgcaccctgggggttctatttgggaaggtattcagccaaacgaccatctgccgctttgaggctctgcagcttagcttcaagaacatgtgtaagctgcggcccttgctgcagaagtgggtggaggaagctgacaacaatgaaaatcttcaggagatatgcaaagcagaaaccctcgtgcaggcccgaaagagaaagcgaaccagtatcgagaaccgagtgagaggcaacctggagaatttgttcctgcagtgcccgaaacccacactgcagcagatcagccacatcgcccagcagcttgggctcgagaaggatgtggtccgagtgtggttctgtaaccggcgccagaagggcaagcgatcaagcagcgactatgcacaacgagaggattttgaggctgctgggtctcctttctcagggggaccagtgtcctttcctctggccccagggccccattttggtaccccaggctatgggagccctcacttcactgcactgtactcctcggtccctttccctgagggggaagcctttccccctgtctctgtcaccactctgggctctcccatgcattcaaactgaggtgcctgcccttctaggaatgggggacagggggaggggaggagctagggaaagaaaacctggagtttgtgccagggtttttgggattaagttcttcattcactaaggaaggaattgggaacacaaagggtgggggcaggggagtttggggcaactggttggagggaaggtgaagttcaatgatgctcttgattttaatcccacatcatgtatcacttttttcttaaataaagaagcttgggacacagtagatagacacactt

SEQ ID NO: 131118 - DNA, 1395 bp, Artificial Sequence
  derived and/or modified sequence
ccttcgcaagccctcatttcaccaggcccccggcttggggcgccttccttccccatggcgggacacctggcttcggatttcgccttctcgccccctccaggtggtggaggtgatgggccaggggggccggagccgggctgggttgatcctcggacctggctaagcttccaaggccctcctggagggccaggaatcgggccgggggttgggccaggctctgaggtgtgggggattcccccatgccccccgccgtatgagttctgtggggggatggcgtactgtgggccccaggttggagtggggctagtgccccaaggcggcttggagacctctcagcctgagggcgaagcaggagtcggggtggagagcaactccgatggggcctccccggagccctgcaccgtcacccctggtgccgtgaagctggagaaggagaagctggagcaaaacccggaggagtcccaggacatcaaagctctgcagaaagaactcgagcaatttgccaagctcctgaagcagaagaggatcaccctgggatatacacaggccgatgtgcaccctgggggttctatttgggaaggtattcagccaaacgaccatctgccgctttgaggctctgcagcttagcttcaagaacatgtgtaagctgcggcccttgctgcagaagtgggtggaggaagctgacaacaatgaaaatcttcaggagatatgcaaagcagaaaccctcgtgcaggcccgaaagagaaagcgaaccagtatcgagaaccgagtgagaggcaacctggagaatttgttcctgcagtgcccgaaacccacactgcagcagatcagccacatcgcccagcagcttgggctcgagaaggatgtggtccgagtgtggttctgtaaccggcgccagaagggcaagcgatcaagcagcgactatgcacaacgagaggattttgaggctgctgggtctcctttctcagggggaccagtgtcctttcctctggccccagggccccattttggtaccccaggctatgggagccctcacttcactgcactgtactcctcggtccctttccctgagggggaagcctttccccctgtctctgtcaccactctgggctctcccatgcattcaaactgaggtgcctgcccttctaggaatgggggacagggggaggggaggagctagggaaagaaaacctggagtttgtgccagggtttttgggattaagttcttcattcactaaggaaggaattgggaacacaaagggtgggggcaggggagtttggggcaactggttggagggaaggtgaagttcaatgatgctcttgattttaatcccacatcatgtatcacttttttcttaaataaagaagcctgggacacagtagatagacacactt

SEQ ID NO: 131119 - DNA, 369 bp, Artificial Sequence
  derived and/or modified sequence
atggcgggacacctggcttcggatttcgccttctcgccccctccaggtggtggaggtgatgggccaggggggccggagccgggctgggttgatcctcggacctggctaagcttccaaggccctcctggagggccaggaatcgggccgggggttgggccaggctctgaggtgtgggggattcccccatgccccccgccgtatgagttctgtggggggatggcgtactgtgggccccaggttggagtggggctagtgccccaaggcggcttggagacctctcagcctgagggcgaagcaggagtcggggtggagactccgatggggcctccccggagccctgcaccgcatccatttcctttcccactcctg

SEQ ID NO: 131120 - DNA, 123 bp, Artificial Sequence
  derived and/or modified sequence
agcccccccccccccggcggcggcgagaagcccctggcccccccccccggctgggtggagccccccaagtggctgggcctgcagggccccagcggcggccccggcgccggccccggcctgtag

SEQ ID NO: 131121 - DNA, 123 bp, Artificial Sequence
  derived and/or modified sequence
agtccaccccctcctgggggaggagagaaacctctggcccctcctcctgggtgggtggagccacctaaatggctgggactgcaaggaccatctggtggtccgggtgcaggcccgggattgtag

SEQ ID NO: 131122 - DNA, 123 bp, Artificial Sequence
  derived and/or modified sequence
agccctccccccccgggaggaggcgaaaaaccacttgcaccccccccagggtgggtggaaccccccaagtggctggggctgcagggtccgagcggggggcctggcgccggtccaggactttag

SEQ ID NO: 131123 - DNA, 123 bp, Artificial Sequence
  derived and/or modified sequence
agccccccacctcctgggggcggggagaagcccctggcccctcctcctggctgggtggagccccccaagtggctgggcctgcagggccccagcggcggccctggggccggccctggcctgtag

SEQ ID NO: 131124 - DNA, 123 bp, Artificial Sequence
  derived and/or modified sequence
agcccccccccccccggcggcggcgagaagcccctggccccccccccgggctgggtggagcctcccaagtggctgggactgcagggcccttctgggggtcccggggctggtcctggactttag

SEQ ID NO: 131125 - DNA, 123 bp, Artificial Sequence
  derived and/or modified sequence
agcccccccccccccggcggcggcgagaagcccctggccccccccccagggtgggttgaaccaccaaaatggctcggactgcagggcccaagcggcgggcctggggcaggtccggggctgtag

SEQ ID NO: 131126 - DNA, 123 bp, Artificial Sequence
  derived and/or modified sequence
tctcctccacccccaggagggggagaaaaacctctagccccacccccaggctgggttgaaccccctaaatggttgggtctgcagggccctagcggcggacctggggcagggccaggcctttag

SEQ ID NO: 131127 - DNA, 123 bp, Artificial Sequence
  derived and/or modified sequence
tctccacctcccccaggtggtggcgagaagcctctcgcccctcctccaggatgggtagaaccgccaaagtggctggggctgcaagggccttcgggcggacccggtgccggacctggtctgtag

SEQ ID NO: 131128 - DNA, 120 bp, Artificial Sequence
  derived and/or modified sequence
tcacctccaccacctggagggggcgagaagcctctggccccgccccctggatgggtggagcctcctaagtggctgggactacagggacctagtggagggcctggggcaggcccaggcctg

SEQ ID NO: 131129 - DNA, 1083 bp, Artificial Sequence
  derived and/or modified sequence
atggctggacatctagcatctgattttgccttctctccccctcctgggggcgggggagatggacctgggggcccggaacctggctgggtggacccgcgcacttggctcagcttccaggggccacctggcgggccaggtattggcccaggggtcgggcccggaagcgaggtctggggaattccaccttgcccgcccccctacgagttctgcgggggaatggcatactgtgggccacaggtgggagtggggttagtgccacaaggaggtcttgaaacaagccaacctgaaggggaggcgggcgtaggcgtggaatcaaactccgacggcgctagcccagaaccttgtactgtaacacccggcgccgtgaagttggagaaggaaaaactagaacagaatccggaagagtcccaggacattaaagctctgcaaaaggaactcgaacagttcgccaagctgcttaagcagaagaggatcacgctgggctatacccaggcagatgtgggcctaacacttggagtcctgttcgggaaagtttttagccagacgaccatttgccgatttgaggccctgcagctgtcgtttaaaaatatgtgcaaattgcgcccccttctgcaaaagtgggtcgaagaggccgacaataacgaaaatctgcaggaaatctgtaaagcggaaacgcttgtgcaggcccgtaaacggaaaaggacctcaatagaaaatagggtccggggcaacctagagaatctgtttctgcaatgtcctaaacctaccttgcaacagatttcacacatagcccagcagttgggcctcgagaaggatgtggtccgggtgtggttttgtaatcggcggcaaaaaggaaagcggagcagtagtgactatgcacagcgtgaggactttgaggcagcgggatcacccttctctggaggaccagtgagctttccactagctccaggccctcatttcgggactcctggctacggttctccccattttaccgcactgtactcatccgtgccattccccgagggagaggcctttccacccgtctctgtaaccacattaggctcccctatgcatagcaattag

SEQ ID NO: 131130 - DNA, 372 bp, Artificial Sequence
  derived and/or modified sequence
atggcgggccacctggcgtccgatttcgcattcagtcctcctcccgggggcggtggcgacgggcccggcggccccgaacccggctgggtagacccaagaacatggctgtctttccaggggcccccgggcggtccaggcataggaccaggagtaggcccaggatccgaggtgtggggcatacctccctgtccacccccatatgaattttgcgggggaatggcgtattgcggaccacaggtaggggtgggattagttccacaaggcggactcgaaacttcacagccagagggcgaagccggggtaggagtcgagaccccaatgggtccaccacgaagtcctgccccacatccgttccccttcccattactgtag

SEQ ID NO: 131131 - DNA, 558 bp, Artificial Sequence
  derived and/or modified sequence
atggccggacacctggcgagtgacttcgcgttcagtcctccaccaggaggcgggggggacgggcctggtggcccggaacccggctgggtcgacccacgcacatggttatcctttcagggaccacccggcggaccagggataggccctggcgtgggaccaggaagtgaggtttggggtatcccgccttgcccccctccatacgagttttgtggaggcatggcatattgtgggccgcaagtgggagtggggctggtgcctcagggcggacttgagacctctcagccagaaggcgaggcgggtgtgggggtggagagtaactcagatggagctagccccgagccatgcacagtgacccctggagccgtgaaattggagaaggagaaacttgaacagaacccagaggaaagccaagatataaaggccctccagaaggagctggaacagtttgctaagcttctaaaacagaagcggatcaccctcggatatactcaggccgatgtccatccaggcgggagtatttgggagggcattcagcccaatgaccacctcccgttgtag

SEQ ID NO: 131132 - DNA, 558 bp, Artificial Sequence
  derived and/or modified sequence
atggcggggcatttggcaagcgatttcgccttctccccaccccccggtggtggcggtgatggcccgggcggacccgaaccgggctgggtagaccctaggacctggctgtccttccagggcccacccggggggccagggattggacctggtgtgggaccaggcagcgaagtttgggggatccctccttgtcctcccccatatgagttttgcggaggaatggcatactgtgggccacaggtgggtgtcggcctggtccctcagggaggcctggagacttctcagccagaaggcgaagcaggcgtgggggtggaaagtaacagcgatggcgcatctcctgagccgtgcacagtgactccaggcgccgtcaaactcgagaaggaaaaactggagcagaacccggaggaatctcaggatataaaggctctgcagaaggagctggagcagtttgccaaactcctcaagcagaagcgcattactcttggatacacacaggccgacgtgcacccgggtgggtctatctgggaggggattcagcccaacgaccacctgcctctctag

SEQ ID NO: 131133 - DNA, 1083 bp, Artificial Sequence
  derived and/or modified sequence
atggccggccacctggccagcgacttcgccttcagccccccccccgggggcggcggcgatggcccaggggggccggagccaggctgggtagaccctagaacatggctctcctttcaagggccccctgggggaccaggaattggacccggtgtgggccctggctctgaagtgtggggaatccccccctgcccccccccttatgagttttgtggcggaatggcgtattgtggtccgcaggtgggagtcggcctggtgcctcaggggggactggaaacttctcagccagaaggggaagccggggttggggttgaatcaaacagcgatggcgctagcccagaaccatgcacagtgacccccggagccgtcaaactagaaaaagaaaaacttgagcagaaccccgaggaatcgcaagatataaaggctctacaaaaggaactcgaacagtttgctaaactgttaaaacagaagaggatcaccctcggatatacccaggcggatgtgggcctcaccctgggagttctgtttggaaaggtctttagccagacaactatctgtcgtttcgaggccttgcaactaagcttcaaaaatatgtgtaagctgcgccctctgctgcagaagtgggtcgaggaagctgataacaatgaaaacctccaagaaatatgcaaagccgagacattagtgcaggcccggaagcgaaagcggacaagtattgaaaacagggtccgaggaaacctcgagaacctgtttctacaatgccctaaacctacacttcagcaaatttcccatattgcccagcagctcggattggagaaggatgtggtccgagtttggttctgtaatagaaggcaaaaaggcaaacgcagctcatctgattatgctcaaagagaggacttcgaggccgccgggtctccgttctctgggggaccagtttccttccccctggcacctggccctcatttcggcacccctggctacgggagccctcattttacagctctgtacagttccgtacctttccctgaaggcgaggcctttccaccagtgtccgtgacaacattagggtcaccaatgcattccaactag

SEQ ID NO: 131134 - DNA, 372 bp, Artificial Sequence
  derived and/or modified sequence
atggccggccacctggccagcgacttcgccttcagccccccccccggcggggggggcgatggcccagggggacctgagccaggctgggtggatccaaggacttggctgtcctttcaggggccccccgggggtcccgggatcgggcctggagtgggtccgggtagtgaggtgtggggaattcctccctgcccacccccttatgagttctgcggcggcatggcgtattgcggaccacaagttggcgtcggactggtcccccagggtggcctggaaacctcccagcccgaaggggaagccggggtcggtgtagagacaccaatggggcctccacgatcaccagccccgcatccctttcctttcccattgctatag

SEQ ID NO: 131135 - DNA, 558 bp, Artificial Sequence
  derived and/or modified sequence
atggccggccacctggccagcgacttcgccttcagccccccccccggggggggcggcgatggacccgggggccccgagcccggatgggttgatccaaggacctggctaagcttccagggccctccggggggccctggaatcggaccgggtgttggtccaggtagcgaggtgtggggcatacctccgtgcccccctccctacgagttttgtggcggaatggcatactgcggcccccaagtgggagtaggtctggtgccccagggcggtttagaaactagccagcccgagggtgaggctggagttggggtggagagcaattcagatggcgcttctcctgaaccttgcacagtcacacccggggcggtgaagttggaaaaagaaaaactcgaacagaaccctgaagagagtcaggatattaaagcacttcagaaagaactggaacagttcgctaaactcctcaagcagaaacggatcacacttgggtatacccaggcggacgttcatcccggcgggagcatctgggaaggcatacagcctaatgatcacctccccctctag

SEQ ID NO: 131136 - DNA, 558 bp, Artificial Sequence
  derived and/or modified sequence
atggccggccacctggccagcgacttcgccttcagccccccccccgggggaggcggcgacggacctggcgggcccgagcccggttgggtggatccgcggacgtggctctcctttcagggtcctcctggtggcccgggaatcggacctggcgtgggccccggatctgaggtgtggggtattcccccttgtccgcctccttacgaattttgcggaggcatggcctattgtggaccccaggttggagttggactggtgccccaaggagggcttgagacatctcaacccgaaggtgaggccggagtgggagtcgagtctaactctgatggagcgtctcctgagccctgtactgtgacacctggggccgtaaagttggaaaaagaaaagctggagcaaaacccagaggaatctcaggacatcaaagccttgcagaaagagctggaacagtttgccaaactattaaaacaaaagcgcatcacactgggttatacacaggccgatgttcaccccggtggatctatttgggaaggtatccaaccaaatgaccacctcccactctag

SEQ ID NO: 131137 - DNA, 1083 bp, Artificial Sequence
  derived and/or modified sequence
atggcagggcatctcgccagtgatttcgccttttctccaccacccggaggtggaggagatggtccaggaggtccggagcctgggtgggtcgatcctaggacatggttatcttttcagggtcctcctggagggcctggaattggacccggagtggggccaggttctgaagtgtggggtatccctccatgccccccaccctatgagttctgcggtggtatggcctactgtgggccacaggtcggcgtgggcctagttccacaagggggactggagacatcccagccggaaggagaagctggggtcggcgttgagagcaacagtgatggcgctagtccggaaccctgcaccgtgactcccggagctgtaaagctggagaaggagaagcttgaacagaaccccgaagaatcccaggacattaaagctttgcaaaaggagctggaacagtttgccaaactgctaaaacagaaaaggatcaccctcggatacacccaggctgacgtgggactaacacttggcgtgttgttcggaaaggtgttcagtcagactacgatttgtagatttgaggccttgcagctatcctttaaaaatatgtgcaaattgcgccctttgcttcagaagtgggtggaagaagctgataataatgaaaatttgcaagaaatttgcaaggccgagactctagttcaggctcggaaacgcaagcggacaagcatcgaaaatagggtccgaggcaatttagagaatctgtttctgcagtgcccaaagcctacattacagcagatcagccacatcgcccagcaactgggcctcgagaaggacgttgtcagagtgtggttctgtaataggcgccagaaaggaaagaggtctagcagcgattacgctcagagagaagacttcgaggcagctggatcacccttcagtggtggccctgtgagcttcccactggcccctgggccacactttggcactccaggctacgggtccccccactttaccgctctgtactcatcggtgcctttccccgagggcgaggcctttccaccagtcagtgtcacaacactgggatctccgatgcatagcaattag

SEQ ID NO: 131138 - DNA, 372 bp, Artificial Sequence
  derived and/or modified sequence
atggctggtcacttagcctccgattttgctttcagccccccaccgggtggtgggggtgacgggcctggcggacctgagccgggatgggtggaccctcgcacgtggctttcctttcagggcccaccaggagggcctggaatcggcccaggagtgggccctgggtctgaggtgtggggcataccaccttgcccacctccttatgaattctgcggcggaatggcctactgtggccctcaggtaggggtgggcctcgtgccccagggtggactagagacatctcagccagaaggcgaggctggcgtgggtgttgaaacccctatggggcctccaagaagcccggctccgcacccctttcctttcccgctcttgtag

SEQ ID NO: 131139 - DNA, 558 bp, Artificial Sequence
  derived and/or modified sequence
atggcaggccatctggcaagtgattttgcgttttcgcctcctccgggaggaggcggagacggcccaggcggacctgagccaggatgggtggaccctcgaacatggctgtctttccagggaccccctgggggtcctggtatcggccctggagtaggccctggctccgaggtgtggggtatccctccctgccccccaccatacgaattctgtgggggtatggcctactgcggaccccaggtgggggtgggtctcgtcccccagggagggttagagaccagccaacccgaaggcgaggccggagtgggcgtggaatcaaactctgacggtgcaagccccgagccttgcacagttacaccaggcgcagtgaagctggagaaggagaagttagagcaaaaccctgaagaatcccaagacatcaaggccctgcagaaggagcttgaacagtttgctaaactactgaaacagaaacggattactttaggctacacacaagccgatgtccacccgggtggctccatctgggagggcatccaaccgaacgaccatctccccctgtag

SEQ ID NO: 131140 - DNA, 558 bp, Artificial Sequence
  derived and/or modified sequence
atggctggacatctcgcaagcgacttcgctttttctccgcctccaggagggggtggagacgggcctggcggtcctgagccgggatgggtcgatccaagaacttggctgtcctttcaaggacctcccggtggccctggcataggccctggtgtaggcccaggcagcgaagtttggggcatacccccatgcccacccccatacgagttttgcggaggcatggcatattgcggacctcaagtgggggtcggccttgtacctcaggggggtctcgaaacatctcaacctgaaggagaggcaggagtgggagtggaaagcaattccgacggggctagccctgagccttgtaccgtgacaccgggagctgtcaagctggagaaggagaagctagagcaaaacccagaagaatctcaggacatcaaggcgctccagaaagaattggagcagttcgccaaattgctcaagcagaaaagaattacgctgggctatacacaggctgatgtgcatcccggaggctccatatgggagggaatacagcccaacgatcacctccctctgtag

SEQ ID NO: 131141 - DNA, 1080 bp, Artificial Sequence
  derived and/or modified sequence
atggcaggacatctcgcatcagacttcgcattttcaccaccaccaggaggaggaggggacggaccagggggtccggagccgggatgggtcgacccgaggacttggctgagcttccaaggcccgcctggcggacccggaatcggaccgggcgtcgggccaggctccgaggtctggggaatcccaccttgccctccgccatacgagttctgcggcgggatggcctattgcggtccgcaagtgggtgtgggactcgtgccccagggcggattggaaacctcgcagccggaaggtgaagctggcgtgggcgttgagtcgaactccgatggagcctccccggagccttgcaccgtcaccccgggagccgtgaagctcgagaaagaaaagctcgaacagaaccccgaagagagccaagatatcaaggcactccagaaagaactcgaacagtttgcgaagctgctgaagcagaagcggatcactctgggttacacccaggccgatgtgggactgactctcggtgtgctgttcgggaaggtgttctctcaaacgactatctgtagattcgaggccctgcagctgtcgttcaagaatatgtgtaaactgcgccccctgctgcaaaaatgggtggaagaagcagacaacaacgagaacttgcaagagatttgcaaggccgaaaccttggtgcaagcccgcaagaggaagcggaccagcatcgaaaatcgcgttagaggaaatcttgagaacctgttccttcagtgcccaaagccaacgctgcagcaaatttcacacatcgcgcagcagctcggactggagaaagacgtggtgcgagtgtggttctgcaaccgccggcagaaaggaaagagatccagctcagattacgcgcagcgggaggactttgaagctgccggatcccccttttcggggggaccggtcagcttcccactggcccctggcccgcactttggtaccccgggatacggatccccgcacttcactgctctgtactcgtcggtccccttcccggaaggcgaagcgttccctcctgtctcagtgactactcttggatcgccgatgcatagcaat

SEQ ID NO: 131142 - RNA, 1080 nt, Artificial Sequence
  derived and/or modified sequence
auggcaggacaucucgcaucagacuucgcauuuucaccaccaccaggaggaggaggggacggaccaggggguccggagccgggaugggucgacccgaggacuuggcugagcuuccaaggcccgccuggcggacccggaaucggaccgggcgucgggccaggcuccgaggucuggggaaucccaccuugcccuccgccauacgaguucugcggcgggauggccuauugcgguccgcaagugggugugggacucgugccccagggcggauuggaaaccucgcagccggaaggugaagcuggcgugggcguugagucgaacuccgauggagccuccccggagccuugcaccgucaccccgggagccgugaagcucgagaaagaaaagcucgaacagaaccccgaagagagccaagauaucaaggcacuccagaaagaacucgaacaguuugcgaagcugcugaagcagaagcggaucacucuggguuacacccaggccgaugugggacugacucucggugugcuguucgggaagguguucucucaaacgacuaucuguagauucgaggcccugcagcugucguucaagaauauguguaaacugcgcccccugcugcaaaaauggguggaagaagcagacaacaacgagaacuugcaagagauuugcaaggccgaaaccuuggugcaagcccgcaagaggaagcggaccagcaucgaaaaucgcguuagaggaaaucuugagaaccuguuccuucagugcccaaagccaacgcugcagcaaauuucacacaucgcgcagcagcucggacuggagaaagacguggugcgagugugguucugcaaccgccggcagaaaggaaagagauccagcucagauuacgcgcagcgggaggacuuugaagcugccggaucccccuuuucggggggaccggucagcuucccacuggccccuggcccgcacuuugguaccccgggauacggauccccgcacuucacugcucuguacucgucgguccccuucccggaaggcgaagcguucccuccugucucagugacuacucuuggaucgccgaugcauagcaau

SEQ ID NO: 131143 - protein, 301 aa, Artificial Sequence
  derived and/or modified sequence
MPGISSQILTNAQGQVIGTLPWVVNSASVAAPAPAQSLQVQAVTPQLLLNAQGQVIATLASSPLPPPVAVRKPSTPESPAKSEVQPIQPTPTVPQPAVVIASPAPAAKPSASAPIPITCSETPTVSQLVSKPHTPSLDEDGINLEEIREFAKNFKIRRLSLGLTQTQVGQALTATEGPAYSQSAICRFEKLDITPKSAQKLKPVLEKWLNEAELRNQEGQQNLMEFVGGEPSKKRKRRTSFTPQAIEALNAYFEKNPLPTGQEITEIAKELNYDREVVRVWFCNRRQTLKNTSKLNVFQIP

SEQ ID NO: 131144 - protein, 29 aa, Artificial Sequence
  derived and/or modified sequence
MPGISSQILTNAQGQVIGTLPWVVNSASV

SEQ ID NO: 131145 - DNA, 4715 bp, Artificial Sequence
  derived and/or modified sequence
aggatcaagggaatcgtggctgcctgccccactgagcccactgccccaaccccctctccttcttgtgccagatcccttgggattggagccgctgtgagcagtggctaggcatttgagcacctctgtctctgccttgctccatagcagctgctgtgctgaacaccgctcttccggcaccggtacaagctgccgcaccagtacaggcctcctcgacggcccaaccccggccaccagcccagccccagacgctgttccagacccagccgctgctgcagaccacacctgccatcctcccgcagcccactgctgccaccgctgctgcccctacccccaagccagtggacacccccccacagatcaccgtccagcctgcaggcttcgcatttagcccaggaatcatcagtgctgcttccctcgggggacagacccagatcctggggtccctcactacagctccagtcattaccagcgccattcccagcatgccagggatcagcagtcagatcctcaccaatgctcagggacaggttattggaacccttccatgggtagtgaactcagctagtgtggcggccccagcaccagcccaaagcctgcaggtccaggccgtgaccccccagctgttgttgaacgcccagggccaggtgattgcgaccctggctagcagccccctgcctccacctgtggctgtccggaagccaagcacacctgagtcccctgctaagagtgaggtgcagcccatccagcccacaccaaccgtgccccagcctgctgtggtcattgccagcccagctccagccgccaagccatctgcctctgctcctatcccaattacctgctcagagacccccaccgtcagccagttggtgtccaagccacatactccaagtctggatgaggatgggatcaacttagaagagatccgggagtttgccaagaactttaagatccggcggctctcgctgggccttacacagacccaggtgggtcaggctctgactgcaacggaaggtccagcctacagccagtcagccatctgccggttcgagaagctagacatcacacccaagagtgcccagaagctaaagccggtgctggaaaagtggctaaacgaagctgaactgcggaaccaggaaggccagcagaacctgatggagtttgtgggaggcgagccctccaagaaacgcaaacgccgcacctccttcaccccccaggccatagaggctctcaatgcctattttgagaagaacccactgcccacaggccaggagatcactgaaattgctaaggagctcaactacgaccgtgaggtagtgcgggtctggttctgcaatcggcgccagacgctcaagaacaccagcaagctgaacgtctttcagatcccttagggctcagcccctggccctgtgttctagcactttgtccatttcccgtggcatccggctgcagccactgccatgacagcacctgtcattttgccacgtgcagctgtgctcaccccaggtcatcagactccaccgtgtgcatgtgcatcaatgtccctcttttctcccacacatctcacatcatggggaggccagagggggccacacgagagctccaggctctgggctggtcactccgaagaagaggatttgtgacgtcacttagagaagcaccttgctagcatggtttctgaagggtgaattctggtggggaaccagaaactccctgtctttggggcagggctaaagcagctcctaaggaccactggccattagctcttgcttttgatggcattctctttccaccttgtcttctcctttgctcctctgtgttagtgtggcaggtatgacaactcatccagtggaaacacagcctcacactgcccttccgccccccacactttgcctgcaggtgcaccgaaaggacctgggagataaaattcaaaaaagtgtgatgtgctgctcagaaggtcagactccatgtctgccttgacctcaaggtcagaaggttcccaaacccctggggctggaacatgggatctcctcttccacctcttcctggttcctttgcggggaaaattgcactaaaacagaaccttttcttaatccatgttggaaggaagcaacagtgaactctacctgttctggagttctcctgggtctgcagaaggttgggaatttagaaaataaggctgttctttcatattttaatttaatctctgtcaatggccatccctcccacaaaaaaacgtgggttaagagaacttgcagactggatatgcaagcaaacgggcaactctggagaaaaataaggaaaggaatgctgactttctctttctttctcttgtccccacacccattcccaacccaatactggggccttctcaaaaggagcaaattaaacaataaaccagacagcaaggccctgggggaaaggacaacatcctgaaataaatgatggagcccaggaaggtctcttgtggaagttgacttaactctaattttctttgtaactttaagccttggatacgggaggagaaatctcattttgtcgagtctcagaccatgtctgtgtgtaagcaatccccacagtgtcctctgagccaaggacacccccagatcagattgagttttgcttctagacggggtagctatggtaccttgggggttagctctcatccaagctgttaagtgagtttccagcctcactgtggctggaaagcccctaaaattcagtatgtaactccaggaagtcaggagagaactgagatttgcctagatgaccacaggcttgcggtgtagattatccctaaagggccccaagtcacgggggtcaaccacccctgtcttcagtactcttatccttacagaggctggtctctaacagctgcctccagtggacctcccatgatccaccctgagggaaggaccgtcagctggggacacatcaccacctctgtcagtcactggtgcagagccacctcctagcctagcttcctctggtgtcctgtttcctttcccacttactgttggtgcctcccaggccctgcagtgccagcgtggccaccctcttggtagcctggccagtaagaggaggacagttgtgtgctgaattagcacacgcacgtgcagcgcgcacagacgcgcgcacacacacacacatacacgctctgctgcatttggacaaaccatgcctgccagagtgtagcagaggtgaggaagcaggtgggcagcttgcctgacccagcttttcaggagagcgtgtctccaacagagagtctccacactctagttcagggttatcgacctgcctcaatgagatgacagactcatttgggaggggtgttgcaaacaagttttcagtgagaatagttaagttccagagcttgtaaaggattcagtgactgacacttcagtaaattaggccaggcacattggcttatgcctgtaattccaacactttggaaggccgaggtgggcggatcatttgaggtctggagttcgagaccagcctgaccaacatggtgaaaccccgtctctactaaaaatacaaaaattagccaggtgtggtagtgcacatctgtaatcccagctacttgggaggtggaggcaggagaattgcttgaaccctggaggttgcaatgagctgagatcacactacttcactccagcctgggtgacagagcaagactcggtctcaaacaaacaaaaacttatggcgatgcaggttttcatgctcagacgcttgcattcaggtatgctttcttttttgagagagacaaatgggtcacagctggcaccctgggaatagcacataatccagggtgtgtctgtggtggtggacgtgcaggggaacaccatctgtcctgtgtcatgatgggaaaacaatcatgaaccactggtctaaattaggcctggccatgctttctcagcccctccctcatttaaatttgtcttcccaaagctgagctaaaactaaaccatttctcctctgctggaatgatggattggtcattcagaggaacaataccaggggtgggaggtttgcaggctgagttccccaggcatgggggtgcagggtgtccctgaggtttacccaaagcacagctcgctggcctgtgacctctgcccttcctcccacagtgtaagaccccccaggaagcagctggggcctgaacctctcacctaggaggtaggtttattttattttttgttagcatcaggctctgaaggagttggtatacattttgttttgaaaacatcttctggacttacaccagagcttagtgtcgtctttactatggaaagagaggagaatggacagaaatggtttaactgtgtggagttttgtttgttttgttttaaatggaagaaagaccaaaactttcctggtggatcagctagggcctttgaccctgcattaccacggcattttatccaggtgaagtccagggaaagaactcagccaaatggactaaggaacacacgagtttggaatgcgagactctgacatttttgtgttcttggaaatccaattaccttcccatgcccagatttccttcctgcctcttggaccaggctctggcactgaggttctcactgttcccaacacagacaaagcttcctgagggctggaggggcagcaaggggagaggagaatggggaagaagcgcttgatgtagttgtgtggaataaacagtattttttcttttgtaaaaaaaaaaaaaaaaa

SEQ ID NO: 131146 - DNA, 906 bp, Artificial Sequence
  derived and/or modified sequence
atgcctggtatctcttcccagatcctgacaaatgctcagggtcaggtgatcggaacgttgccatgggtcgttaattctgcttctgtcgccgccccagcacccgctcagtcactgcaagtgcaggccgtgactccccaactgttgctgaacgcgcagggccaggtcatcgccaccctagcgtcatctcctctccctcctcctgttgcggtcagaaagcccagcacaccagagtctccagctaagtctgaggtccaaccaattcaaccaactcccacagtgccacagcccgcagtggtgattgcaagccccgcccccgcggcaaaaccaagtgccagcgctccaatcccgataacctgctcggagacaccaaccgtatcccaactcgtttcgaagccacacacgccttccttggatgaggatggcattaatctggaagagatcagggaatttgccaaaaatttcaaaattcggcggctaagcttgggcctcactcagacccaggtgggacaagcacttacagctacagaagggccggcctactcccagagcgccatatgcagatttgagaaattggatattacgcctaaatccgcgcaaaagctaaagcctgtgttagagaaatggcttaacgaagccgagctgcgcaaccaggagggccagcaaaatttaatggagttcgttggcggcgaacctagcaagaaacggaagaggagaacttcattcaccccacaagccatagaggccctgaatgcttacttcgagaaaaaccccttgccaaccgggcaggagatcactgaaattgcgaaagagctgaactacgatcgtgaggtcgtccgtgtctggttctgtaaccgaagacagactctgaaaaatacttcaaagctcaacgtatttcaaatcccctag

SEQ ID NO: 131147 - DNA, 906 bp, Artificial Sequence
  derived and/or modified sequence
atgccaggaatctctagccaaatcttgaccaatgcccaggggcaggttatcggaaccctgccctgggtggtcaacagtgcctctgtcgccgcacctgcccctgctcagagcttgcaggtgcaagccgttaccccacagttgctcctgaatgctcagggccaggtgatcgccaccctcgcttcttctccactgcctcctccagtcgctgtgagaaaaccctcaacacccgaatctcctgctaaatctgaagttcaacccattcagccaacgcctacagtgccccagccagccgtcgttattgcctcccccgcccccgcggcgaagccaagtgctagcgctcctatcccaatcacatgttcagaaactcctacagtaagtcaactggtatctaagcctcacaccccgtctctagacgaggacggcatcaatctggaagagatccgagaattcgccaaaaattttaaaattagacggctgagcctgggtctgactcagactcaagtggggcaggcactcactgcgaccgaggggcctgcttatagtcagtcggccatctgcaggttcgagaaactcgatatcacacctaagtctgcccagaaactgaagccagtgctggagaaatggttgaatgaggcggagctgcgcaaccaggaagggcaacagaatctgatggagttcgtggggggcgaaccatctaaaaagcgaaagcgccggacgtcttttacccctcaagccatcgaagcactcaatgcttattttgaaaagaacccacttccgacgggtcaagagattaccgaaatcgctaaagaactcaactatgacagagaagttgtgagggtgtggttttgtaacaggcgccagacactgaagaacacatccaagttaaatgtgttccagataccatag

SEQ ID NO: 131148 - DNA, 90 bp, Artificial Sequence
  derived and/or modified sequence
atgcccggaatttcctctcagatcttgaccaacgcacagggtcaggtgatcgggacattaccttgggtcgttaactccgccagcgtgtag

SEQ ID NO: 131149 - DNA, 906 bp, Artificial Sequence
  derived and/or modified sequence
atgccgggaattagtagccaaatcctaacaaatgctcagggacaagttatcgggaccctgccgtgggtcgttaattccgcctctgttgcagccccagcacccgcacagtcactccaggtgcaggccgttaccccccagttgcttctcaacgcacaaggacaagtgatcgccacacttgccagcagtccactcccacctccagtggcagtgcgcaaacccagtacgcctgagagcccggctaagtctgaggttcagcctattcagccaacacccacggtaccacagccagctgtggtgattgcctctccagccccggccgcaaaacctagcgcaagtgccccaatcccaataacctgctcagagacacctactgtgtcacagctggtgagcaaaccccacacacctagcttagatgaagatgggatcaacctggaagagattagggagtttgctaaaaattttaaaatacggcggcttagtcttggtcttactcagacacaagtgggtcaggccctcactgccacagaaggtcccgcttactcccagagcgccatttgtcggttcgaaaagctggatatcactccaaaaagcgcacaaaagctgaagcctgtgctggagaaatggttgaacgaggccgaactgcggaaccaggaaggacagcaaaatctgatggagttcgttgggggagaaccctctaagaaaaggaaacgcaggacctctttcacccctcaagctattgaggctctgaacgcctactttgagaagaatccgctcccaacagggcaagaaatcacagagatagctaaagagctgaattatgaccgagaggtggtgagggtgtggttttgcaaccggaggcaaacactgaagaacacctcgaagctcaatgtctttcagatcccctag

SEQ ID NO: 131150 - DNA, 906 bp, Artificial Sequence
  derived and/or modified sequence
atgcctggcatcagcagccagatcctgaccaatgcccagggccaggtgattggcaccctgccctgggtggtgaacagcgcctctgtggccgccccagccccagcccagagcctgcaggtgcaggccgtgaccccccagctgctgctgaatgcccagggccaggtgattgccaccctggccagcagccccctgcccccacctgtggccgtgaggaagcccagcaccccagagagccctgccaagtctgaggtgcagcccatccagcccacccccaccgtgccccagcctgctgtggtgattgccagccctgccccagctgccaagcccagcgccagcgcccccatccccatcacctgcagcgagacccccaccgtgtcccagctggtgtccaagccccacacccccagcctggatgaagatggcatcaacctggaggagatccgggagtttgccaagaacttcaagatccggcggctgagcctgggcctgacccagacccaggtgggccaggccctgacagccacagagggccctgcctacagccagagcgccatctgccgctttgagaagctggacatcacccccaagagcgcccagaagctgaagcctgtgctggagaagtggctgaatgaggccgagctgaggaaccaggagggccagcagaacctgatggagtttgtgggcggggagcccagcaagaagaggaagaggaggaccagcttcaccccccaggccatcgaggccctgaatgcctactttgagaagaaccccctgcccaccggccaggagatcacagaaattgccaaggagctgaactatgaccgggaggtggtgcgggtgtggttctgcaacagacggcagaccctgaagaacaccagcaagctgaatgtgttccagatcccctag

SEQ ID NO: 131151 - DNA, 90 bp, Artificial Sequence
  derived and/or modified sequence
atgcctggcatcagcagccagatcctgaccaatgcccagggccaggtgattggcaccctgccctgggtggtgaacagcgcctctgtgtag

SEQ ID NO: 131152 - DNA, 2474 bp, Artificial Sequence
  derived and/or modified sequence
aggatcaagggaatcgtggctgcctgccccactgagcccactgccccaaccccctctccttcttgtgccagatcccttgggattggagccgctgtgagcagtggctaggcatttgagcacctctgtctctgccttgctccatagcagctgctgtgctgaacaccgctcttccggcaccggtacaagctgccgcaccagtacaggcctcctcgacggcccaaccccggccaccagcccagccccagacgctgttccagacccagccgctgctgcagaccacacctgccatcctcccgcagcccactgctgccaccgctgctgcccctacccccaagccagtggacacccccccacagatcaccgtccagcctgcaggcttcgcatttagcccaggaatcatcagtgctgcttccctcgggggacagacccagatcctggggtccctcactacagctccagtcattaccagcgccattcccagcatgccagggatcagcagtcagatcctcaccaatgctcagggacaggttattggaacccttccatgggtagtgaactcagctagtgtggcggccccagcaccagcccaaagcctgcaggtccaggccgtgaccccccagctgttgttgaacgcccagggccaggtgattgcgaccctggctagcagccccctgcctccacctgtggctgtccggaagccaagcacacctgagtcccctgctaagagtgaggtgcagcccatccagcccacaccaaccgtgccccagcctgctgtggtcattgccagcccagctccagccgccaagccatctgcctctgctcctatcccaattacctgctcagagacccccaccgtcagccagttggtgtccaagccacatactccaagtctggatgaggatgggatcaacttagaagagatccgggagtttgccaagaactttaagatccggcggctctcgctgggccttacacagacccaggtgggtcaggctctgactgcaacggaaggtccagcctacagccagtcagccatctgccggttcgagaagctagacatcacacccaagagtgcccagaagctaaagccggtgctggaaaagtggctaaacgaagctgaactgcggaaccaggaaggccagcagaacctgatggagtttgtgggaggcgagccctccaagaaacgcaaacgccgcacctccttcaccccccaggccatagaggctctcaatgcctattttgagaagaacccactgcccacaggccaggagatcactgaaattgctaaggagctcaactacgaccgtgaggtagtgcgggtctggttctgcaatcggcgccagacgctcaagaacaccagcaagctgaacgtctttcagatcccttagggctcagcccctggccctgtgttctagcactttgtccatttcccgtggcatccggctgcagccactgccatgacagcacctgtcattttgccacgtgcagctgtgctcaccccaggtcatcagactccaccgtgtgcatgtgcatcaatgtccctcttttctcccacacatctcacatcatggggaggccagagggggccacacgagagctccaggctctgggctggtcactccgaagaagaggatttgtgacgtcacttagagaagcaccttgctagcatggtttctgaagggtgaattctggtggggaaccagaaactccctgtctttggggcagggctaaagcagctcctaaggaccactggccattagctcttgcttttgatggcattctctttccaccttgtcttctcctttgctcctctgtgttagtgtggcaggtatgacaactcatccagtggaaacacagcctcacactgcccttccgccccccacactttgcctgcaggtgcaccgaaaggacctgggagataaaattcaaaaaagtgtgatgtgctgctcagaaggtcagactccatgtctgccttgacctcaaggtcagaaggttcccaaacccctggggctggaacatgggatctcctcttccacctcttcctggttcctttgcggggaaaattgcactaaaacagaaccttttcttaatccatgttggaaggaagcaacagtgaactctacctgttctggagttctcctgggtctgcagaaggttgggaatttagaaaataaggctgttctttcatattttaatttaatctctgtcaatggccatccctcccacaaaaaaacgtgggttaagagaacttgcagactggatatgcaagcaaacgggcaactctggagaaaaataaggaaaggaatgctgactttctctttctttctcttgtccccacacccattcccaacccaatactggggccttctcaaaaggagcaaattaaacaataaaccagacagcaaggccctgggggaaaggacaacatcctgaaataaatgatggagcccaggaaggtctcttgtggaagttga

SEQ ID NO: 131153 - DNA, 5157 bp, Artificial Sequence
  derived and/or modified sequence
aatcggtggccgccagacacccgcggcgaaggcggctcgggctcgggctccggatgtgctaggtgtgggccggcccccacccgaccctgacaagtgaccatggatcctggagccgggtcagagacatctctgactgtcaatgagcaggtcatcgtgatgtcaggtcatgagaccatccgagtgctggaagtcggagtggatgcccaactccctgctgaggaagagagcaaaggactggagggtgtggccgccgagggctcccagagcggagaccctgctgaagccagtcaagctgctggtgaagctgggccagacaacctgggctcctctgcagaggcaactgtgaagtcacccccggggatccctccgagccctgccactgccattgccaccttcagccaagccccaagccagcctcaggcatcgcagaccctgacgccactggctgtacaagctgccccccagtattgcaggtcaagtggctggtcagcaggggctggccgtgtggacaattcctacagcaactgtggctgccctcccaggactgaccgctgcttctcctacggggggagtgttcaagccacctttagccggtctccaagcagctgctgtgctgaacaccgctcttccggcaccggtacaagctgccgcaccagtacaggcctcctcgacggcccaaccccggccaccagcccagccccagacgctgttccagacccagccgctgctgcagaccacacctgccatcctcccgcagcccactgctgccaccgctgctgcccctacccccaagccagtggacacccccccacagatcaccgtccagcctgcaggcttcgcatttagcccaggaatcatcagtgctgcttccctcgggggacagacccagatcctggggtccctcactacagctccagtcattaccagcgccattcccagcatgccagggatcagcagtcagatcctcaccaatgctcagggacaggttattggaacccttccatgggtagtgaactcagctagtgtggcggccccagcaccagcccaaagcctgcaggtccaggccgtgaccccccagctgttgttgaacgcccagggccaggtgattgcgaccctggctagcagccccctgcctccacctgtggctgtccggaagccaagcacacctgagtcccctgctaagagtgaggtgcagcccatccagcccacaccaaccgtgccccagcctgctgtggtcattgccagcccagctccagccgccaagccatctgcctctgctcctatcccaattacctgctcagagacccccaccgtcagccagttggtgtccaagccacatactccaagtctggatgaggatgggatcaacttagaagagatccgggagtttgccaagaactttaagatccggcggctctcgctgggccttacacagacccaggtgggtcaggctctgactgcaacggaaggtccagcctacagccagtcagccatctgccggttcgagaagctagacatcacacccaagagtgcccagaagctaaagccggtgctggaaaagtggctaaacgaagctgaactgcggaaccaggaaggccagcagaacctgatggagtttgtgggaggcgagccctccaagaaacgcaaacgccgcacctccttcaccccccaggccatagaggctctcaatgcctattttgagaagaacccactgcccacaggccaggagatcactgaaattgctaaggagctcaactacgaccgtgaggtagtgcgggtctggttctgcaatcggcgccagacgctcaagaacaccagcaagctgaacgtctttcagatcccttagggctcagcccctggccctgtgttctagcactttgtccatttcccgtggcatccggctgcagccactgccatgacagcacctgtcattttgccacgtgcagctgtgctcaccccaggtcatcagactccaccgtgtgcatgtgcatcaatgtccctcttttctcccacacatctcacatcatggggaggccagagggggccacacgagagctccaggctctgggctggtcactccgaagaagaggatttgtgacgtcacttagagaagcaccttgctagcatggtttctgaagggtgaattctggtggggaaccagaaactccctgtctttggggcagggctaaagcagctcctaaggaccactggccattagctcttgcttttgatggcattctctttccaccttgtcttctcctttgctcctctgtgttagtgtggcaggtatgacaactcatccagtggaaacacagcctcacactgcccttccgccccccacactttgcctgcaggtgcaccgaaaggacctgggagataaaattcaaaaaagtgtgatgtgctgctcagaaggtcagactccatgtctgccttgacctcaaggtcagaaggttcccaaacccctggggctggaacatgggatctcctcttccacctcttcctggttcctttgcggggaaaattgcactaaaacagaaccttttcttaatccatgttggaaggaagcaacagtgaactctacctgttctggagttctcctgggtctgcagaaggttgggaatttagaaaataaggctgttctttcatattttaatttaatctctgtcaatggccatccctcccacaaaaaaacgtgggttaagagaacttgcagactggatatgcaagcaaacgggcaactctggagaaaaataaggaaaggaatgctgactttctctttctttctcttgtccccacacccattcccaacccaatactggggccttctcaaaaggagcaaattaaacaataaaccagacagcaaggccctgggggaaaggacaacatcctgaaataaatgatggagcccaggaaggtctcttgtggaagttgacttaactctaattttctttgtaactttaagccttggatacgggaggagaaatctcattttgtcgagtctcagaccatgtctgtgtgtaagcaatccccacagtgtcctctgagccaaggacacccccagatcagattgagttttgcttctagacggggtagctatggtaccttgggggttagctctcatccaagctgttaagtgagtttccagcctcactgtggctggaaagcccctaaaattcagtatgtaactccaggaagtcaggagagaactgagatttgcctagatgaccacaggcttgcggtgtagattatccctaaagggccccaagtcacgggggtcaaccacccctgtcttcagtactcttatccttacagaggctggtctctaacagctgcctccagtggacctcccatgatccaccctgagggaaggaccgtcagctggggacacatcaccacctctgtcagtcactggtgcagagccacctcctagcctagcttcctctggtgtcctgtttcctttcccacttactgttggtgcctcccaggccctgcagtgccagcgtggccaccctcttggtagcctggccagtaagaggaggacagttgtgtgctgaattagcacacgcacgtgcagcgcgcacagacgcgcgcacacacacacacatacacgctctgctgcatttggacaaaccatgcctgccagagtgtagcagaggtgaggaagcaggtgggcagcttgcctgacccagcttttcaggagagcgtgtctccaacagagagtctccacactctagttcagggttatcgacctgcctcaatgagatgacagactcatttgggaggggtgttgcaaacaagttttcagtgagaatagttaagttccagagcttgtaaaggattcagtgactgacacttcagtaaattaggccaggcacattggcttatgcctgtaattccaacactttggaaggccgaggtgggcggatcatttgaggtctggagttcgagaccagcctgaccaacatggtgaaaccccgtctctactaaaaatacaaaaattagccaggtgtggtagtgcacatctgtaatcccagctacttgggaggtggaggcaggagaattgcttgaaccctggaggttgcaatgagctgagatcacactacttcactccagcctgggtgacagagcaagactcggtctcaaacaaacaaaaacttatggcgatgcaggttttcatgctcagacgcttgcattcaggtatgctttcttttttgagagagacaaatgggtcacagctggcaccctgggaatagcacataatccagggtgtgtctgtggtggtggacgtgcaggggaacaccatctgtcctgtgtcatgatgggaaaacaatcatgaaccactggtctaaattaggcctggccatgctttctcagcccctccctcatttaaatttgtcttcccaaagctgagctaaaactaaaccatttctcctctgctggaatgatggattggtcattcagaggaacaataccaggggtgggaggtttgcaggctgagttccccaggcatgggggtgcagggtgtccctgaggtttacccaaagcacagctcgctggcctgtgacctctgcccttcctcccacagtgtaagaccccccaggaagcagctggggcctgaacctctcacctaggaggtaggtttattttattttttgttagcatcaggctctgaaggagttggtatacattttgttttgaaaacatcttctggacttacaccagagcttagtgtcgtctttactatggaaagagaggagaatggacagaaatggtttaactgtgtggagttttgtttgttttgttttaaatggaagaaagaccaaaactttcctggtggatcagctagggcctttgaccctgcattaccacggcattttatccaggtgaagtccagggaaagaactcagccaaatggactaaggaacacacgagtttggaatgcgagactctgacatttttgtgttcttggaaatccaattaccttcccatgcccagatttccttcctgcctcttggaccaggctctggcactgaggttctcactgttcccaacacagacaaagcttcctgagggctggaggggcagcaaggggagaggagaatggggaagaagcgcttgatgtagttgtgtggaataaacagtattttttcttttgta

SEQ ID NO: 131154 - DNA, 207 bp, Artificial Sequence
  derived and/or modified sequence
atttagcccaggaatcgctcttcctccacccacagatcagtgctgcttccctcgggggacagacccagatcctggggtccctcactacagctccagtcattaccagcgccattcccagcatgccagggatcagcagtcagatcctcaccaatgctcagggacaggttattggaacccttccatgggtagtgaactcagctagtgtgg

SEQ ID NO: 131155 - DNA, 2183 bp, Artificial Sequence
  derived and/or modified sequence
gaagcccacattcacatctacccaccccaatgccctctgtcctcttccctctgcccggggttcttctcaccccttggcttctgagcaaggctcttcctccacccacagatcagtgctgcttccctcgggggacagacccagatcctggggtccctcactacagctccagtcattaccagcgccattcccagcatgccagggatcagcagtcagatcctcaccaatgctcagggacaggttattggaacccttccatgggtagtgaactcagctagtgtggcggccccagcaccagcccaaagcctgcaggtccaggccgtgaccccccagctgttgttgaacgcccagggccaggtgattgcgaccctggctagcagccccctgcctccacctgtggctgtccggaagccaagcacacctgagtcccctgctaagagtgaggtgcagcccatccagcccacaccaaccgtgccccagcctgctgtggtcattgccagcccagctccagccgccaagccatctgcctctgctcctatcccaattacctgctcagagacccccaccgtcagccagttggtgtccaagccacatactccaagtctggatgaggatgggatcaacttagaagagatccgggagtttgccaagaactttaagatccggcggctctcgctgggccttacacagacccaggtgggtcaggctctgactgcaacggaaggtccagcctacagccagtcagccatctgccggttcgagaagctagacatcacacccaagagtgcccagaagctaaagccggtgctggaaaagtggctaaacgaagctgaactgcggaaccaggaaggccagcagaacctgatggagtttgtgggaggcgagccctccaagaaacgcaaacgccgcacctccttcaccccccaggccatagaggctctcaatgcctattttgagaagaacccactgcccacaggccaggagatcactgaaattgctaaggagctcaactacgaccgtgaggtagtgcgggtctggttctgcaatcggcgccagacgctcaagaacaccagcaagctgaacgtctttcagatcccttagggctcagcccctggccctgtgttctagcactttgtccatttcccgtggcatccggctgcagccactgccatgacagcacctgtcattttgccacgtgcagctgtgctcaccccaggtcatcagactccaccgtgtgcatgtgcatcaatgtccctcttttctcccacacatctcacatcatggggaggccagagggggccacacgagagctccaggctctgggctggtcactccgaagaagaggatttgtgacgtcacttagagaagcaccttgctagcatggtttctgaagggtgaattctggtggggaaccagaaactccctgtctttggggcagggctaaagcagctcctaaggaccactggccattagctcttgcttttgatggcattctctttccaccttgtcttctcctttgctcctctgtgttagtgtggcaggtatgacaactcatccagtggaaacacagcctcacactgcccttccgccccccacactttgcctgcaggtgcaccgaaaggacctgggagataaaattcaaaaaagtgtgatgtgctgctcagaaggtcagactccatgtctgccttgacctcaaggtcagaaggttcccaaacccctggggctggaacatgggatctcctcttccacctcttcctggttcctttgcggggaaaattgcactaaaacagaaccttttcttaatccatgttggaaggaagcaacagtgaactctacctgttctggagttctcctgggtctgcagaaggttgggaatttagaaaataaggctgttctttcatattttaatttaatctctgtcaatggccatccctcccacaaaaaaacgtgggttaagagaacttgcagactggatatgcaagcaaacgggcaactctggagaaaaataaggaaaggaatgctgactttctctttctttctcttgtccccacacccattcccaacccaatactggggccttctcaaaaggagcaaattaaacaataaaccagacagcaaggccctgggggaaaggacaacatcctgaaataaatgatggagcccaggaaggtctcttgtggaagttg

SEQ ID NO: 131156 - DNA, 906 bp, Artificial Sequence
  derived and/or modified sequence
atgcccggcatcagcagccagatcctgaccaacgcccagggccaggtgataggcacactgccctgggtagtgaacagtgcttcagttgctgccccggcccccgcccaatccctccaggtgcaagctgtcacgcctcagcttctgctgaacgcccagggacaggttattgctacactcgcgtccagccccttgcccccacccgtggctgtgcgcaaacccagtacccctgaatcacctgcgaaatcagaagtgcagccgatacagcccacccctacggtaccacaacctgcggtcgttatcgctagccctgcaccagccgccaagccctcagcgtccgcccctatcccgataacgtgctcagagactcccactgtttcacagttggtttctaagccccacacccctagtctggatgaggatggaatcaatcttgaagaaatccgtgagtttgccaagaactttaagatccggcggctctcattgggcctaacacagacgcaagttggacaggctcttaccgccaccgaaggacccgcttattctcaaagcgctatttgtagatttgaaaagctagacattacccccaagtcggcccaaaagctgaaacccgtgctggaaaagtggctaaacgaagcagaactgaggaaccaggaagggcaacagaatctaatggaatttgtaggcggagagccctctaagaagcggaaaagacgtacatcctttacacctcaggccatcgaggccctcaatgcttacttcgagaaaaatcccctacctacaggtcaggagatcacagagattgccaaggagctgaattatgatagggaagtggtccgcgtgtggttctgtaacaggagacagacccttaagaacacaagcaagctcaacgtgtttcaaatcccctag

SEQ ID NO: 131157 - DNA, 906 bp, Artificial Sequence
  derived and/or modified sequence
atgcccggcatcagcagccagatcctgaccaacgcccagggccaggtcatcggcactctcccttgggtggtgaactcagcctctgtcgccgcacctgcgccggctcagtcactccaggtgcaagccgtgaccccccagctactgcttaatgcccagggccaggtgatcgccacactggcctcttcccctttaccacccccagtcgccgtaaggaagccttctacaccagaatcgccagctaagagcgaagtgcaacctatccagcctactcccactgtgccccaacccgcagtcgttattgctagccccgcccccgctgctaagcctagtgccagcgcgcccatcccaatcacttgctccgagacgcctactgtatctcagttagttagcaagccacatactccatcgcttgacgaggatggcatcaatctggaggagataagagaatttgcgaaaaattttaagatcagacgactttccctgggactgacacagacccaggtcggccaggcactaaccgccaccgaagggcccgcttactctcagtcagccatctgtagatttgaaaaactggacatcacccctaaatccgcacaaaaattgaagcccgtactcgaaaagtggctcaacgaggccgagctccgcaatcaggaaggtcagcagaaccttatggaatttgtcgggggcgaaccaagcaagaaaagaaagagacggacatcatttacccctcaagctattgaagctctgaatgcttactttgagaagaacccccttccaaccggtcaggagatcactgagatagcaaaggaattgaactacgatcgagaggtcgtaagagtgtggttttgtaacaggcgtcaaacactaaagaatactagcaaattaaatgtcttccagattccctag

SEQ ID NO: 131158 - DNA, 90 bp, Artificial Sequence
  derived and/or modified sequence
atgcccggcatcagcagccagatcctgaccaacgcccagggccaggtcattggaacactcccgtgggtggtcaattctgcgtctgtgtag

SEQ ID NO: 131159 - DNA, 906 bp, Artificial Sequence
  derived and/or modified sequence
atgcccggcatcagcagccagatcctgaccaacgcccagggccaggtgatcggcactcttccgtgggtggtgaattcagcatccgtggccgcacccgcccctgctcagtctttacaggtccaggctgtaactccacagcttctgctcaacgcccaagggcaggtgattgccaccctggccagctcgccccttcctcccccagtcgccgtgagaaaaccctccacccctgaatccccggctaagtcagaggtgcaacctatccaaccgactccaacagtgcctcagcccgcggtcgtcatcgcgagtcctgcccccgctgccaagccatccgcatccgcgcccatccccataacatgttcagaaactcccaccgtctctcagctggtgtcaaagccccacactccatcccttgacgaagacggcatcaaccttgaggaaatcagagagttcgccaagaatttcaaaattcgccgtctgtctctcgggctgactcagacgcaggtgggacaggctcttacagcgacagagggtcctgcctacagtcagagtgcaatttgtagattcgagaagttagacatcacgccgaagagtgcgcagaagctaaagcctgtcttagaaaaatggctaaacgaggcggaactgcgaaaccaggagggccagcagaacctgatggaatttgtggggggggagccctccaagaagcggaagcgccgcacttctttcactccacaggctatcgaagctctgaacgcctactttgaaaagaacccattgcctacaggccaagaaatcaccgagattgctaaggagctcaactacgatagggaagtggtgcgcgtgtggttctgcaaccgacggcagactcttaaaaacacttccaaactgaacgtgtttcagataccttag

SEQ ID NO: 131160 - DNA, 906 bp, Artificial Sequence
  derived and/or modified sequence
atgcctggaataagcagccaaatcttgacaaacgcccaggggcaggtgatagggactcttccatgggtggtgaactcggcctctgtcgcagcccctgctccagcccagagcttgcaggtccaggcagttaccccacagctgctcctcaatgcccagggtcaagtaatcgctacgctcgcttccagtccattgccacctcccgtggctgttaggaagccaagtactcctgaatcccccgcaaaaagcgaagttcagccaatccagcctaccccgacagtgccccaacctgctgtggtgatcgcgagccccgctcccgcagcaaagccgtcagccagcgcaccaatccctattacatgttctgaaactcccactgtgagccagctggtgtctaaaccacacacgccatccctggatgaggacggcattaacttagaggagatcagggaatttgccaagaattttaaaatccgaaggctttctctcggtcttactcagacccaggtgggccaggctcttacagctacggagggccctgcatactcccagagcgcaatctgtaggttcgagaagttagatataacgcctaagtcggcccagaagcttaagccagtcctggagaagtggctaaacgaagccgaacttcgcaaccaagaagggcagcagaacctgatggaattcgtgggcggtgaacccagtaaaaaacgcaaacgcagaacatcttttaccccccaggctatcgaagcattgaacgcatacttcgaaaaaaatccactcccaaccggtcaagagattacggagatagcaaaagagctaaactatgatagagaggtggttagggtatggttttgcaatcggcgtcagacactaaaaaataccagcaagctgaatgtgttccagataccttag

SEQ ID NO: 131161 - DNA, 906 bp, Artificial Sequence
  derived and/or modified sequence
atgcctggaataagctcgcaaatcctgaccaatgcacagggccaggttattggtaccctcccttgggttgtgaactctgcttctgtggccgctcctgctccagcacagagcctgcaagtccaggcagtcactcctcagctgctgctgaacgcacagggacaggtgattgccacactggctagtagtcctctccccccaccagtggctgtccggaagccatctactccagagtctcccgctaaaagtgaggtccagcccatccagcctactccgacagttcctcagccagccgtcgtcatagcatccccagctcctgcagccaagccgagcgcatcagcccctattcccattacctgcagcgagaccccaactgtatcacagctggtgtctaagccacacacaccgagcctagacgaggatggcataaatctggaggagattagggaatttgctaagaactttaagattagaaggctcagcttaggtttgacccagacgcaggttggccaggccctgactgcaaccgaaggtccagcatatagtcagtctgctatctgcaggttcgaaaaattggatattacccccaagtctgctcagaagttaaagcccgtgttggagaagtggctcaatgaggcggaactgcggaaccaggagggccagcagaacctgatggagttcgttggcggagagccttccaaaaaaagaaagcgccgaacatcttttaccccccaggcaatcgaagctcttaacgcgtacttcgagaagaaccccctacctacgggacaagaaattaccgaaatagctaaggaactgaattacgaccgggaggtcgtgcgtgtgtggttctgcaatcggaggcagacccttaagaatacgtcgaaacttaacgtgtttcaaatcccttag

SEQ ID NO: 131162 - DNA, 90 bp, Artificial Sequence
  derived and/or modified sequence
atgcctggcatcagcagtcagatcttgacaaatgctcagggtcaggtcattggcacactcccgtgggtcgtgaattccgcctccgtatag

SEQ ID NO: 131163 - DNA, 906 bp, Artificial Sequence
  derived and/or modified sequence
atgccaggtatttctagccagatcttgacgaatgctcagggacaggtgataggcactctgccttgggtggtgaactcggcctccgtggcagcaccagcgccagctcagagcctgcaagtgcaggcagttacacctcaattactgctcaatgcccaagggcaagtcatcgctactcttgcttcatcaccgctgccacctcccgttgccgtccgcaaacccagtactccggaatctccggctaaaagtgaggtgcaaccaattcaaccgacccctaccgtgccccagcctgccgtcgtgattgcatcgcctgctccagcagccaagcctagcgcttctgctcctattcctatcacttgctctgaaacaccaacggtatcccagctggtgagtaaaccccatacccccagcctggacgaggacggtattaacctcgaggagataagggagttcgcaaaaaattttaagatccgcaggctgtctttaggcctcacacagacccaggttggccaagcactaacagctactgagggaccagcatactcccagtccgctatttgccgtttcgagaagctggatattactcccaagagcgctcagaagctcaaacctgtgctcgaaaaatggctgaatgaggcggagctcagaaatcaggagggtcagcagaatctgatggaattcgtgggcggtgagccaagcaagaaaaggaagaggcgcaccagctttaccccacaggcgatagaagcactgaatgcctatttcgagaagaacccattgcccactggtcaggagatcactgagattgccaaggaactgaactatgatcgcgaagtggtgcgggtctggttttgtaaccgcagacagacgctgaaaaacacatcaaaactgaacgtgttccagatcccgtag

SEQ ID NO: 131164 - DNA, 906 bp, Artificial Sequence
  derived and/or modified sequence
atgcccggcatcagcagccagatcctgaccaacgcccagggccaggtgatcggcaccctgccctgggtggtgaacagcgccagcgtggccgcccccgcccccgcccagagcctgcaggtgcaggccgtgaccccccagctgctgctgaacgcccagggccaggtgatcgccaccctggccagcagccccctgcccccccccgtggccgtgagaaagcccagcacccccgagagccccgccaagagcgaggtgcagcccatccagcccacccccaccgtgccccagcccgccgtggtgatcgccagccccgcccccgccgccaagcccagcgccagcgcccccatccccatcacctgcagcgagacccccaccgtgagccagctggtgagcaagccccacacccccagcctggacgaggacggcatcaacctggaggagatcagagagttcgccaagaacttcaagatcagaagactgagcctgggcctgacccagacccaggtgggccaggccctgaccgccaccgagggccccgcctacagccagagcgccatctgcagattcgagaagctggacatcacccccaagagcgcccagaagctgaagcccgtgctggagaagtggctgaacgaggccgagctgagaaaccaggagggccagcagaacctgatggagttcgtgggcggcgagcccagcaagaagagaaagagaagaaccagcttcaccccccaggccatcgaggccctgaacgcctacttcgagaagaaccccctgcccaccggccaggagatcaccgagatcgccaaggagctgaactacgacagagaggtggtgagagtgtggttctgcaacagaagacagaccctgaagaacaccagcaagctgaacgtgttccagatcccctag

SEQ ID NO: 131165 - DNA, 90 bp, Artificial Sequence
  derived and/or modified sequence
atgcccggcatcagcagccagatcctgaccaacgcccagggccaggtgatcggcaccctgccctgggtggtgaacagcgccagcgtgtag

SEQ ID NO: 131166 - protein, 517 aa, Artificial Sequence
  derived and/or modified sequence
MELEELGIREECGVFGCIASGEWPTQLDVPHVITLGLVGLQHRGQESAGIVTSDGSSVPTFKSHKGMGLVNHVFTEDNLKKLYVSNLGIGHTRYATTGKCELENCQPFVVETLHGKIAVAHNGELVNAARLRKKLLRHGIGLSTSSDSEMITQLLAYTPPQEQDDTPDWVARIKNLMKEAPTAYSLLIMHRDVIYAVRDPYGNRPLCIGRLIPVSDINDKEKKTSETEGWVVSSESCSFLSIGARYYREVLPGEIVEISRHNVQTLDIISRSEGNPVAFCIFEYVYFARPDSMFEDQMVYTVRYRCGQQLAIEAPVDADLVSTVPESATPAALAYAGKCGLPYVEVLCKNRYVGRTFIQPNMRLRQLGVAKKFGVLSDNFKGKRIVLVDDSIVRGNTISPIIKLLKESGAKEVHIRVASPPIKYPCFMGINIPTKEELIANKPEFDHLAEYLGANSVVYLSVEGLVSSVQEGIKFKKQKEKKHDIMIQENGNGLECFEKSGHCTACLTGKYPVELEW

SEQ ID NO: 131167 - DNA, 1554 bp, Artificial Sequence
  derived and/or modified sequence
atggagctggaggaactcggaataagagaggaatgtggcgtgtttgggtgtattgcgtctggcgagtggcctactcagctcgacgtccctcacgtgatcacattggggctggtgggcttacagcaccggggacaggagagcgccggcattgtaacaagtgacggaagttcagtccctaccttcaagtcccacaagggcatgggtctcgtgaaccacgtgtttaccgaagataatctgaaaaagctgtatgtaagtaatctagggattggtcacacacggtacgctaccactggcaaatgtgagctggaaaactgtcaaccatttgttgtcgaaaccctgcacggcaagattgctgtcgctcacaacggagagttggtgaatgcagctcgcctgagaaagaaactactgcgccacggaataggattgtcaaccagcagcgatagcgaaatgataactcagttactggcatacacaccacctcaggagcaagacgatacacctgactgggtggccaggattaagaacctaatgaaagaagctccaacagcttactccctgctaatcatgcatagagatgtgatatatgctgttcgggatccatacgggaatcggccactgtgtatcgggaggttgattcccgtttctgatatcaatgataaagaaaagaagacctctgagacagaaggatgggtagtgagttcagagtcctgctcgttcctgtctattggtgcacggtactatcgcgaagtactcccgggggagattgtggaaatctcgagacataacgtgcagaccctggatattatcagccgctcagagggcaatcccgttgctttttgtatttttgagtatgtctactttgctcggcctgactctatgttcgaggatcagatggtgtacacggtcaggtaccggtgtggacagcagcttgcgatagaggccccggtggacgctgatctggtgagcacagtcccagaatcagcgacacctgcagccctcgcttacgcaggtaagtgtggcttaccctacgtcgaagtcctatgcaagaaccggtatgtaggccgcacttttatacagcccaacatgaggttgagacagcttggcgtggcgaaaaagtttggtgtcctgtctgataacttcaaaggaaagcgaattgtcctggtggacgacagcattgtccgggggaacaccataagccctataattaagctcttgaaagaatctggtgcgaaagaagttcacatacgggtcgcaagccctcccattaagtatccctgttttatgggaatcaatattccaaccaaagaggagctgattgctaacaagccagaattcgatcatctggccgaatatttgggcgccaattcagtcgtctacctctcagtggagggactggtttcctccgtgcaagaagggataaaattcaaaaagcagaaggagaagaaacacgacattatgatccaggagaatgggaacggactggagtgtttcgaaaagtctggtcattgtaccgcttgcctgaccggtaagtatcctgtggagctggaatggtag

SEQ ID NO: 131168 - DNA, 1554 bp, Artificial Sequence
  derived and/or modified sequence
atggagctggaggagctgggcatccgggaggagtgtggggtgtttggctgcatcgccagcggggagtggcccacccagctggatgtgccccacgtgatcaccctgggcctggtgggcctgcagcaccggggccaggagagcgctggcatcgtgaccagtgatggcagctctgtgcccaccttcaagagccacaagggcatgggcctggtgaaccacgtgttcacagaggacaacctgaagaagctgtatgtgagcaacctgggcatcggccacaccaggtatgccaccactggaaaatgtgagctggagaactgccagccctttgtggtggagaccctgcacggcaagattgctgtggcccacaacggggagctggtgaatgctgcccggctgaggaagaagctgctgcggcacggcatcggcctgagcaccagcagtgacagcgagatgatcacccagctgctggcctacaccccaccccaggagcaggatgacaccccagactgggtggcccgcatcaagaacctgatgaaggaggcccccacagcctacagcctgctgatcatgcacagagatgtgatctatgctgtgcgggacccctacggcaaccggcccctgtgcatcggccgcctcatccctgtgtctgacatcaatgacaaggagaagaagaccagcgagacagagggctgggtggtgagcagcgagagctgcagcttcctgagcatcggggcccgctactaccgggaggtgctgcccggggagatcgtggagatcagccgccacaacgtgcagaccctggacatcatcagccgctctgagggcaaccctgtggccttctgcatctttgaatatgtgtactttgcccggccagacagcatgtttgaggaccagatggtgtacacagtgcgctaccgctgtggccagcagctggccatcgaggcccctgtggatgctgacctggtgtccacagtgcctgagagcgccaccccagctgccctggcctatgctggaaaatgtggcctgccctacgtggaggtgctgtgcaagaaccgctacgtgggccgcaccttcatccagcccaacatgaggctgcggcagctgggcgtggccaagaagtttggagtgctgagtgacaacttcaagggcaagagaattgtgctggtggatgacagcatcgtgcggggcaacaccatcagccccatcatcaagctgctgaaggagagcggggccaaggaggtgcacatccgggtggccagcccccccatcaagtacccctgcttcatgggcatcaacatccccaccaaggaggagctgattgccaacaagccagagtttgaccacctggccgagtacctgggcgccaacagcgtggtgtacctgtctgtggagggcctggtgtcctctgtgcaggagggcatcaagttcaagaagcagaaggagaagaagcatgacatcatgatccaggagaatggaaatggcctggagtgctttgagaagagcggccactgcacagcctgcctgaccgggaagtaccctgtggagctggagtggtag

SEQ ID NO: 131169 - DNA, 1554 bp, Artificial Sequence
  derived and/or modified sequence
atggagctggaggagctgggcatccgggaggagtgcggcgtgttcggatgcatcgcctctggcgagtggccgactcagctggacgtcccacacgtcattactttagggttggtgggactccagcaccgaggtcaggaatcagcagggatcgtaacgagcgacggaagcagcgtgccaacctttaagtcacacaagggcatgggccttgtgaatcacgtgtttacagaggataatttaaagaagctgtacgtcagtaatctcggtatcggccacacccggtacgccactacaggaaagtgcgagctggagaattgtcagccgtttgtcgtggagacattgcacggtaagattgcagttgcacataacggggagctggtaaatgcggcccgtctgcggaagaagctcttacggcatggaatcggtttgtcgacctcctccgattctgaaatgatcactcagctgctggcgtacacccctccacaggagcaggatgacacacctgattgggtggcgcggattaagaacctgatgaaggaagcccccactgcatactccctgcttattatgcatcgtgacgtgatttatgccgtccgggacccttatggcaatcggcccctttgtattggccggcttatcccagttagtgatatcaatgataaggaaaagaaaacgtcggaaacagaggggtgggtggttagttccgagagctgctcattcctctctatcggcgctcgatactaccgagaggtcctgccaggcgaaatcgttgaaatcagcagacacaatgtgcaaactctagacatcatatcgcggagtgaggggaatcccgtcgccttctgtatattcgagtacgtttacttcgcccgccctgactcgatgtttgaggaccagatggtctacacggttaggtaccggtgcgggcaacagcttgccatcgaagctcccgtggatgccgaccttgtgagtacggttcctgaaagcgcgactccagccgcacttgcttacgccggcaaatgcgggttaccctatgtggaggtgctctgtaagaacagatacgttggaagaacctttattcaacccaatatgcgccttagacagctgggtgtggccaaaaaatttggggtactctccgacaacttcaaagggaagaggatcgtgctggtcgacgactcaatagttcgtggcaatacaattagccctatcattaagttgctgaaggagagcggcgcgaaagaggtgcacattagggttgcctccccccccatcaagtatccctgttttatgggaatcaatattccaacaaaggaagaacttattgctaataaacctgaattcgaccacttggcagagtacctcggtgccaattcagtggtctatttgtctgtggagggactggtgtcttccgtgcaggagggaataaaatttaaaaaacagaaggagaagaaacatgatatcatgatccaggaaaacggaaacggcctggaatgctttgagaaaagtggacactgtactgcctgtctaaccgggaaataccctgtggagcttgaatggtag

SEQ ID NO: 131170 - DNA, 3682 bp, Artificial Sequence
  derived and/or modified sequence
agtagctggggccaccctcgggaaggaagagcctgtcgcgagcgcgagcttctgagctcgacgggccgagctggcagctggttggtgcttacaccttggccgcagcggcaggtccttccacgtgctttcggcggcgacatggagctggaggagttggggatccgagaggaatgtggcgtgttcgggtgcatcgcctcaggagagtggcccacgcagctggatgtaccgcatgtgatcactctgggactcgtggggctgcagcaccggggtcaggagagtgctggtattgtgactagtgatgggagttcggtgccaacattcaaatcacacaagggaatgggtcttgtaaatcacgtctttactgaagacaatttgaaaaaattatatgtttcaaatcttggaattggacacaccaggtatgccaccacaggaaaatgtgaactagaaaattgtcagcccttcgttgttgaaacacttcatgggaagatagctgtggcacataatggcgaattggtaaatgctgctcgattaaggaaaaagcttctgcgtcatggtattggtctgtctacaagttctgatagtgaaatgattacccagttactggcgtatacccctcctcaggaacaagatgacaccccagactgggtagccaggattaaaaacttgatgaaggaagcacccacagcatactccctgcttataatgcacagagatgttatttatgcagtacgagatccttatggaaatcgtcccttatgcattggtcgtcttattccagtgtctgatataaatgacaaagagaaaaaaacatcagaaacagaaggatgggtggtgtcttcagaatcttgtagcttcttatctattggtgcaagatattaccgtgaagtcttgcctggagaaattgtggaaatatccagacacaatgtccaaactcttgatattatatcaaggtctgaaggaaacccagtggctttttgtatctttgaatatgtttattttgcaagaccagacagtatgttcgaagaccaaatggtttatacagtaagataccgttgtggccagcagctagcgattgaagcacctgtggatgcagatttggttagcactgttccagaatctgctacgcctgctgctcttgcttacgcaggaaagtgtggacttccatatgtggaggtgctgtgtaaaaaccggtatgtagggagaaccttcattcagccaaacatgaggttaagacaacttggtgttgcaaaaaaatttggagtattgtcagacaactttaaaggcaaaagaattgttcttgtagatgattcaattgtcagaggcaataccatctcacctataataaaactgctcaaagaatctggtgcaaaagaggtacacattcgagtagcttcaccaccaattaaatatccatgcttcatgggaataaacattcctacaaaagaagagctcattgccaataaaccagaatttgatcaccttgcagaatatctaggagcaaacagtgttgtgtatctgtcagtagaaggactggtttcatctgtacaagaagggataaagtttaaaaaacagaaagagaaaaagcacgatattatgatccaagaaaatggaaatggtctggaatgttttgaaaagagtggtcattgtacagcttgtctcactggaaaatatcctgtagaattagaatggtagctggtagggttggatgtgtgtagtttcaagatagaaagttggtcaagaagttatagtggtcacacctcatctatttactgttactcagttggtacaatgtaaaatgccatgcttatgtttataagttttgagattttttttttttctgaaaaggataccaaagtgcgataactgaacatttccaattgcatataatacaacaatatgtggtgttcttttttttacacaagcattggctagcctttttaacctggtcagagaaggcaggtggtcactgacatttcccaagtccatgctttaaagggtttgcaagaagttagggttaaggagaggtgatgccaacaagacaggtgagttaaatataccatttcacacaaagtttgaatagaatacattatacctcataggtgtctagcctctacagttctggctgtagttatgaccttggcttccctgtctaactgtagacaaatctttaaaaaaaaataataataatctggtgcctcagtttccccacatgtgcaatgggatacttattaaataattaataagaatgtgaataagtgtcatacttttgtgatttgagccatcatttcacttctgattttaagacaactcatgattgttagctttcagaaagctaatgattgttaactttttgaaattagtttacaattaattaagatttcattatgatggaaggagacataattggcagatctttgccatctctctttgagatgtcctaaaaagggttgtaaaaatctgtgaaaaagtttttcctacatttgactagaaaatgtgatccatagtatttagtgccctgatactataagctcagcaagtaacctggtacatttgaaataaaaaccaaatttttagattcaaacaatccctttatccttaatttaattaattatcatatgctttttttaatgaagtgcttgatcacttgcaaacatatatacatgtagatgtacatatacatgtacacatacacataaatattattgcaattaagtgatcaagtacagacacaataggggccagttttgtttaaggatcaaagagacaaccactttggggaattagtatcaacttacaatccaagtccaagtatcatcttataatcacttttttctactatattaagatctaatgaatttgatttcttttttgaagttttttcttgtaacatctgagattagaagtttaagatgacttgaccccaaacctttgtttatgtaagaatttttaaacataaaagtgtttgtttctgttatgttaccataatttgatgtatatagtgtccagatccatttagaaatttaatatttattaataactgaaactgtttgtcttcctttggtatatagtctcgcatattatattatagcaggccaagataaaattttgacagctctttaagcccacatgcagcagtgggtcagataaccctgtggcagtgacacgggcaaattggcatttgaataaagccctgggaccacctcaacatgcgtagcctcttgtcttaaatgtactccccatggcagcatggaggaggcaagacctgtgggtcaattttgaactggccttactttgatttttaaaacaagagactcagggaaagtactaaaccaaaatctctgattttactttgcgttttctgtagtttttgttttactgagatgcttttgtaaaggaaaataatactgtgacagtttagtaattctacagattcttaatatttctccatcatggccttttacttcacaattttctgaagtctgaattcaattacaatttttttttaccaatttaatctcaaatgttgtttaactgctttaaattcatatacgtagagtattataaactgcagagatgaaaaatgtgttttcacgggatttatattgtgaactaaactaagcctactttttgtgacttatttgtgatgccttgttgataaatatgtgtaataagtatgtttaaa

SEQ ID NO: 131171 - DNA, 1554 bp, Artificial Sequence
  derived and/or modified sequence
atggagctcgaggagctaggaatccgggaggagtgcggggttttcggatgtattgctagtggagagtggcctacccagttagacgtaccacatgtgattaccctcggtctggtaggcttacagcacaggggccaggagtcagctggaattgtgactagcgacggatcttctgtgccgactttcaagagtcataagggcatgggattagtgaatcacgtattcacagaggataatcttaagaagctgtatgtgtcaaatcttgggatcggacatacacggtatgcaactactggcaagtgcgagttagagaattgccagccctttgtcgtagaaacattacacggcaaaatagccgtagcccataatggcgaactcgtcaacgctgcgagactgaggaagaagttactgcgccatggtatcggtctgtctacctcaagtgattctgaaatgatcacccagctgctggcttacacgccaccccaggagcaggacgatacccccgattgggtcgcacgtataaaaaacctgatgaaagaagctcccacagcctattcacttcttattatgcacagagatgtgatttacgccgttcgggatccttacggaaaccgcccactgtgtataggtcgtctcataccagtcagcgacattaacgataaggagaagaagacatctgaaactgaggggtgggtggtatcctcagagagttgtagcttcctctctatcggtgcgaggtactacagggaggtactgcctggagagattgttgaaatttcccggcacaacgtgcagactctcgacataatcagtcgctctgagggaaatcctgtggcattttgcatctttgagtacgtgtactttgccaggccagactctatgtttgaggaccagatggtttacactgtgcgatatagatgcggccagcagcttgccattgaggccccagttgatgccgacttggtgtcaaccgttccagaatctgcaactccagcagccctggcctacgccggtaagtgtggtctcccgtacgtcgaggttctgtgcaagaatagatacgttgggagaacctttattcagccaaacatgaggcttaggcagctgggcgtcgctaagaagtttggggtcctctctgacaattttaagggaaaaaggattgtcctggtggacgatagcatcgttaggggaaacacgatctcccccattatcaaactactcaaggagtctggtgctaaggaggtgcatatcagagtagcctctcctcctattaagtatccctgttttatggggatcaatatccccaccaaagaggagcttattgccaataagcctgagttcgaccacctggcagagtacctcggagccaatagcgtggtgtatctgtcggttgagggcctggtaagtagcgtgcaggaaggcataaaattcaagaagcagaaggagaagaagcacgatatcatgattcaggagaatggtaatggcttggaatgcttcgaaaagtctggtcactgcaccgcctgtcttaccgggaagtatccagtggaattggagtggtag

SEQ ID NO: 131172 - DNA, 1554 bp, Artificial Sequence
  derived and/or modified sequence
atggagctggaggagctgggcatcagagaggagtgcggcgtgttcggctgcatcgccagcggcgagtggcccacccagctggacgtgccccacgtgatcaccctgggcctggtgggcctgcagcacagaggccaggagagcgccggcatcgtgaccagcgacggcagcagcgtgcccaccttcaagagccacaagggcatgggcctggtgaaccacgtgttcaccgaggacaacctgaagaagctgtacgtgagcaacctgggcatcggccacaccagatacgccaccaccggcaagtgcgagctggagaactgccagcccttcgtggtggagaccctgcacggcaagatcgccgtggcccacaacggcgagctggtgaacgccgccagactgagaaagaagctgctgagacacggcatcggcctgagcaccagcagcgacagcgagatgatcacccagctgctggcctacacccccccccaggagcaggacgacacccccgactgggtggccagaatcaagaacctgatgaaggaggcccccaccgcctacagcctgctgatcatgcacagagacgtgatctacgccgtgagagacccctacggcaacagacccctgtgcatcggcagactgatccccgtgagcgacatcaacgacaaggagaagaagaccagcgagaccgagggctgggtggtgagcagcgagagctgcagcttcctgagcatcggcgccagatactacagagaggtgctgcccggcgagatcgtggagatcagcagacacaacgtgcagaccctggacatcatcagcagaagcgagggcaaccccgtggccttctgcatcttcgagtacgtgtacttcgccagacccgacagcatgttcgaggaccagatggtgtacaccgtgagatacagatgcggccagcagctggccatcgaggcccccgtggacgccgacctggtgagcaccgtgcccgagagcgccacccccgccgccctggcctacgccggcaagtgcggcctgccctacgtggaggtgctgtgcaagaacagatacgtgggcagaaccttcatccagcccaacatgagactgagacagctgggcgtggccaagaagttcggcgtgctgagcgacaacttcaagggcaagagaatcgtgctggtggacgacagcatcgtgagaggcaacaccatcagccccatcatcaagctgctgaaggagagcggcgccaaggaggtgcacatcagagtggccagcccccccatcaagtacccctgcttcatgggcatcaacatccccaccaaggaggagctgatcgccaacaagcccgagttcgaccacctggccgagtacctgggcgccaacagcgtggtgtacctgagcgtggagggcctggtgagcagcgtgcaggagggcatcaagttcaagaagcagaaggagaagaagcacgacatcatgatccaggagaacggcaacggcctggagtgcttcgagaagagcggccactgcaccgcctgcctgaccggcaagtaccccgtggagctggagtggtag

SEQ ID NO: 131173 - protein, 66 aa, Artificial Sequence
  derived and/or modified sequence
AELRCMCIKTTSGIHPKNIQSLEVIGKGTHCNQVEVIATLKDGRKICLDPDAPRIKKIVQKKLAGD

SEQ ID NO: 131174 - protein, 85 aa, Artificial Sequence
  derived and/or modified sequence
NLAKGKEESLDSDLYAELRCMCIKTTSGIHPKNIQSLEVIGKGTHCNQVEVIATLKDGRKICLDPDAPRIKKIVQKKLAGDESAD

SEQ ID NO: 131175 - protein, 68 aa, Artificial Sequence
  derived and/or modified sequence
LRCMCIKTTSGIHPKNIQSLEVIGKGTHCNQVEVIATLKDGRKICLDPDAPRIKKIVQKKLAGDESAD

SEQ ID NO: 131176 - protein, 70 aa, Artificial Sequence
  derived and/or modified sequence
AELRCMCIKTTSGIHPKNIQSLEVIGKGTHCNQVEVIATLKDGRKICLDPDAPRIKKIVQKKLAGDESAD

SEQ ID NO: 131177 - protein, 69 aa, Artificial Sequence
  derived and/or modified sequence
MAELRCMCIKTTSGIHPKNIQSLEVIGKGTHCNQVEVIATLKDGRKICLDPDAPRIKKIVQKKLAGDES

SEQ ID NO: 131178 - protein, 84 aa, Artificial Sequence
  derived and/or modified sequence
MNLAKGKEESLDSDLYAELRCMCIKTTSGIHPKNIQSLEVIGKGTHCNQVEVIATLKDGRKICLDPDAPRIKKIVQKKLAGDES

SEQ ID NO: 131179 - protein, 91 aa, Artificial Sequence
  derived and/or modified sequence
MGHHHHHHHHHHSSGHIEGRHMYLRCMCIKTTSGIHPKNIQSLEVIGKGTHCNQVEVIATLKDGRKICLDPDAPRIKKIVQKKLAGDESAD

SEQ ID NO: 131180 - protein, 93 aa, Artificial Sequence
  derived and/or modified sequence
MGHHHHHHHHHHSSGHIEGRHMYAELRCMCIKTTSGIHPKNIQSLEVIGKGTHCNQVEVIATLKDGRKICLDPDAPRIKKIVQKKLAGDESAI

SEQ ID NO: 131181 - protein, 86 aa, Artificial Sequence
  derived and/or modified sequence
MNLAKGKEESLDSDLYAELRCMCIKTTSGIHPKNIQSLEVIGKGTHCNQVEVIATLKDGRKICLDPDAPRIKKIVQKKLAGDESAD

SEQ ID NO: 131182 - protein, 68 aa, Artificial Sequence
  derived and/or modified sequence
AELRCMCIKTTSGIHPKNIQSLEVIGKGTHCNQVEVIATLKDGRKICLDPDAPRIKKIVQKKLAGDES

SEQ ID NO: 131183 - protein, 83 aa, Artificial Sequence
  derived and/or modified sequence
NLAKGKEESLDSDLYAELRCMCIKTTSGIHPKNIQSLEVIGKGTHCNQVEVIATLKDGRKICLDPDAPRIKKIVQKKLAGDES

SEQ ID NO: 131184 - protein, 128 aa, Artificial Sequence
  derived and/or modified sequence
MSLRLDTTPSCNSARPLHALQVLLLLSLLLTALASSTKGQTKRNLAKGKEESLDSDLYAELRCMCIKTTSGIHPKNIQSLEVIGKGTHCNQVEVIATLKDGRKICLDPDAPRIKKIVQKKLAGDESAD

SEQ ID NO: 131185 - DNA, 387 bp, Artificial Sequence
  derived and/or modified sequence
atgagtctccgattggacactaccccttcttgtaactccgcacgaccgctgcacgcccttcaggtcctcctcctgctatctcttctgctcaccgcactagccagcagcacaaaaggccagaccaagaggaatttggccaaaggaaaggaggagtcactcgattccgacctgtacgcagaacttcgctgtatgtgtatcaagaccacaagcggaattcacccaaagaatatacagagcctggaagtgatcggcaagggaacccactgtaaccaggtggaagtcatcgctactcttaaggacgggagaaaaatttgcctggatcctgacgcccctcggattaaaaagatcgtgcagaagaagctggccggagatgaatcagccgactag

SEQ ID NO: 131186 - DNA, 387 bp, Artificial Sequence
  derived and/or modified sequence
atgagcctgcggctggacaccacccccagctgcaacagcgcccggcccctgcacgccctgcaggtgctgctgctgctgagcctgctgctgacagccctggccagcagcaccaagggccagaccaagaggaacctggccaagggcaaggaggagagcctggacagcgacctgtatgcagagctgcgctgcatgtgcatcaagaccaccagcggcatccaccccaagaacatccagagcctggaggtgattggcaagggcacccactgcaaccaggtggaggtgattgccaccctgaaggatggcaggaagatctgcctggaccctgatgccccccgcatcaagaagatcgtgcagaagaagctggccggagatgagagcgctgactag

SEQ ID NO: 131187 - DNA, 387 bp, Artificial Sequence
  derived and/or modified sequence
atgagcctgcggctggacaccacccccagctgcaacagcgcccggccactccacgcccttcaggtccttctgctgctctcactccttttaacggcactggcctcttcaaccaaaggacaaacaaaacgtaatctcgccaagggcaaggaagaaagtctcgattccgatttgtacgccgagctgagatgcatgtgtattaaaactacctcggggatccatcctaaaaacatacagagcctggaagtcatcgggaaaggaacccactgtaaccaggtcgaggtgatcgccactttaaaggatggacggaaaatctgcctggaccccgacgcccccaggatcaagaagatcgtgcagaaaaaactggccggagacgagagtgctgactag

SEQ ID NO: 131188 - DNA, 387 bp, Artificial Sequence
  derived and/or modified sequence
atgtccctaaggttagataccacaccctcctgcaattctgctaggcctctgcacgcattgcaggtgctcttactcctatccctgctgcttacagccctggcttctagtaccaaggggcagacaaaacgcaacctggctaagggaaaggaagagtctctcgattctgacctgtatgcagaactgagatgtatgtgcatcaagacgacaagtggcattcaccccaagaacatccagtctttagaggtgattggtaagggaactcactgcaaccaggtcgaggttatcgccacgctaaaggacgggcgaaagatttgtctggacccggacgcaccacgcatcaagaagattgtgcaaaaaaaattggcaggcgatgaatctgcagactag

SEQ ID NO: 131189 - DNA, 715 bp, Artificial Sequence
  derived and/or modified sequence
agaagccacttatctgcagacttgtaggcagcaactcaccctcactcagaggtcttctggttctggaaacaactctagctcagccttctccaccatgagcctcagacttgataccaccccttcctgtaacagtgcgagaccacttcatgccttgcaggtgctgctgcttctgtcattgctgctgactgctctggcttcctccaccaaaggacaaactaagagaaacttggcgaaaggcaaagaggaaagtctagacagtgacttgtatgctgaactccgctgcatgtgtataaagacaacctctggaattcatcccaaaaacatccaaagtttggaagtgatcgggaaaggaacccattgcaaccaagtcgaagtgatagccacactgaaggatgggaggaaaatctgcctggacccagatgctcccagaatcaagaaaattgtacagaaaaaattggcaggtgatgaatctgctgattaatttgttctgtttctgccaaacttctttaactcccaggaagggtagaattttgaaaccttgattttctagagttctcatttattcaggatacctattcttactgtattaaaatttggatatgtgtttcattctgtctcaaaaatcacattttattctgagaaggttggttaaaagatggcagaaagaagatgaaaataaataagcctggtttcaaccctctaattcttgcctaaa

SEQ ID NO: 131190 - DNA, 387 bp, Artificial Sequence
  derived and/or modified sequence
atgagcctgagactggacaccacccccagctgcaacagcgccagacccctgcacgccctgcaggtgctgctgctgctgagcctgctgctgaccgccctggccagcagcaccaagggccagaccaagagaaacctggccaagggcaaggaggagagcctggacagcgacctgtacgccgagctgagatgcatgtgcatcaagaccaccagcggcatccaccccaagaacatccagagcctggaggtgatcggcaagggcacccactgcaaccaggtggaggtgatcgccaccctgaaggacggcagaaagatctgcctggaccccgacgcccccagaatcaagaagatcgtgcagaagaagctggccggcgacgagagcgccgactag

SEQ ID NO: 131191 - protein, 1756 aa, Artificial Sequence
  derived and/or modified sequence
MNSLFRKRNKGKYSPTVQTRSISNKELSELIEQLQKNADQVEKNIVDTEAKMQSDLARLQEGRQPEHRDVTLQKVLDSEKLLYVLEADAAIAKHMKHPQGDMIAEDIRQLKERVTNLRGKHKQIYRLAVKEVDPQVNWAALVEEKLDKLNNQSFGTDLPLVDHQVEEHNIFHNEVKAIGPHLAKDGDKEQNSELRAKYQKLLAASQARQQHLSSLQDYMQRCTNELYWLDQQAKGRMQYDWSDRNLDYPSRRRQYENFINRNLEAKEERINKLHSEGDQLLAAEHPGRNSIEAHMEAVHADWKEYLNLLICEESHLKYMEDYHQFHEDVKDAQELLRKVDSDLNQKYGPDFKDRYQIELLLRELDDQEKVLDKYEDVVQGLQKRGQQVVPLKYRRETPLKPIPVEALCDFEGEQGLISRGYSYTLQKNNGESWELMDSAGNKLIAPAVCFVIPPTDPEALALADSLGSQYRSVRQKAAGSKRTLQQRYEVLKTENPGDASDLQGRQLLAGLDKVASDLDRQEKAITGILRPPLEQGRAVQDSAERAKDLKNITNELLRIEPEKTRSTAEGEAFIQALPGSGTTPLLRTRVEDTNRKYEHLLQLLDLAQEKVDVANRLEKSLQQSWELLATHENHLNQDDTVPESSRVLDSKGQELAAMACELQAQKSLLGEVEQNLQAAKQCSSTLASRFQEHCPDLERQEAEVHKLGQRFNNLRQQVERRAQSLQSAKAAYEHFHRGHDHVLQFLVSIPSYEPQETDSLSQMETKLKNQKNLLDEIASREQEVQKICANSQQYQQAVKDYELEAEKLRSLLDLENGRRSHVSKRARLQSPATKVKEEEAALAAKFTEVYAINRQRLQNLEFALNLLRQQPEVEVTHETLQRNRPDSGVEEAWKIRKELDEETERRRQLENEVKSTQEEIWTLRNQGPQESVVRKEVLKKVPDPVLEESFQQLQRTLAEEQHKNQLLQEELEALQLQLRALEQETRDGGQEYVVKEVLRIEPDRAQADEVLQLREELEALRRQKGAREAEVLLLQQRVAALAEEKSRAQEKVTEKEVVKLQNDPQLEAEYQQLQEDHQRQDQLREKQEEELSFLQDKLKRLEKERAMAEGKITVKEVLKVEKDAATEREVSDLTRQYEDEAAKARASQREKTELLRKIWALEEENAKVVVQEKVREIVRPDPKAESEVANLRLELVEQERKYRGAEEQLRSYQSELEALRRRGPQVEVKEVTKEVIKYKTDPEMEKELQRLREEIVDKTRLIERCDLEIYQLKKEIQALKDTKPQVQTKEVVQEILQFQEDPQTKEEVASLRAKLSEEQKKQVDLERERASQEEQIARKEEELSRVKERVVQQEVVRYEEEPGLRAEASAFAESIDVELRQIDKLRAELRRLQRRRTELERQLEELERERQARREAEREVQRLQQRLAALEQEEAEAREKVTHTQKVVLQQDPQQAREHALLRLQLEEEQHRRQLLEGELETLRRKLAALEKAEVKEKVVLSESVQVEKGDTEQEIQRLKSSLEEESRSKRELDVEVSRLEARLSELEFHNSKSSKELDFLREENHKLQLERQNLQLETRRLQSEINMAATETRDLRNMTVADSGTNHDSRLWSLERELDDLKRLSKDKDLEIDELQKRLGSVAVKREQRENHLRRSIVVIHPDTGRELSPEEAHRAGLIDWNMFVKLRSQECDWEEISVKGPNGESSVIHDRKSGKKFSIEEALQSGRLTPAQYDRYVNKDMSIQELAVLVSGQK

SEQ ID NO: 131192 - DNA, 5271 bp, Artificial Sequence
  derived and/or modified sequence
atgaattctctgtttcggaagagaaacaagggcaaatacagcccaactgtgcagactcggtccataagcaataaagagttgagtgagctgatcgagcagctgcaaaagaatgccgatcaggtggagaaaaacattgtggatactgaagccaagatgcagagtgacttagcaaggctacaggaaggccgccagcccgaacaccgcgatgtgacactgcagaaggtcctggattccgagaaactgttgtacgtgctggaagctgacgctgccattgctaaacatatgaagcatccccaaggtgacatgatcgcggaggacatacgccagttgaaagagcgcgtaacaaaccttcgcgggaaacataagcagatttatcggttggccgtcaaggaggtggatccccaggtgaactgggctgccctggtggaggagaagctggacaagttaaacaatcagtccttcggtacggaccttcctttagttgatcaccaggtggaggagcacaacatttttcacaatgaggtgaaagctattggacctcacctggccaaagatggggacaaggaacagaactcggagctgcgcgctaaatatcagaaattactagctgcatcccaggccagacagcagcatttatcaagcctgcaagattacatgcagcggtgcaccaatgagttgtattggctggaccaacaggctaagggacgtatgcaatatgattggagcgaccggaacttggattatccaagccggcgcagacagtacgaaaacttcataaatcggaacttagaagccaaggaagagcgcataaacaagctacactccgagggtgaccagttgttagcagcggaacatcctggtaggaattcaatagaagcccatatggaggcggtccacgccgactggaaggagtacctgaacctgttgatttgtgaggagtctcacttgaagtacatggaagactaccatcagttccacgaggatgtgaaagatgctcaagagctgttgagaaaggtcgatagtgacctcaaccaaaagtacgggccggactttaaggatagataccagattgagttgctcttaagagagttggacgaccaggaaaaagtattggataagtacgaagacgtggtgcaagggttacagaaaaggggacagcaggtcgtgcccttgaagtaccggcgcgaaaccccactcaagcctatccctgtggaagctctgtgcgatttcgagggcgaacagggcctgatctccagaggctattcgtatactttgcagaagaacaatggcgagagctgggaactgatggattcagccggtaacaaactgatcgcgcctgctgtatgtttcgtgataccaccaactgatcccgaggcactggccctggctgattccttgggctcccaatatcgatcagtgaggcagaaagccgcggggagcaaaaggacactgcaacaaaggtacgaagttctgaagactgaaaacccaggtgacgcctccgacttacagggaaggcagttgctggccgggctggacaaggtagcttctgacctcgatcggcaggagaaggctatcactggaatcttgagaccaccactcgagcagggaagagccgtacaggatagcgccgagagggctaaggatctgaaaaacattaccaatgaactgttacggatcgagcccgagaaaacacggtccacagcggaaggggaggcttttatacaggccctgccaggaagcggaactacccccctcctaaggacccgcgtcgaggatacaaataggaagtacgaacacttattacagctcttggatctggcccaggagaaggtggatgtggcgaaccggctggaaaaaagcctgcaacagagctgggaactcctagctactcacgaaaatcacctgaaccaggacgacacagtcccagagtcaagtagggtcctggactccaagggccaagaacttgccgccatggcatgtgaactgcaggctcagaagagtttgctgggtgaagtggagcagaacctgcaggcagcaaaacagtgcagctcgacgctggcgtctcgattccaggagcactgccctgatctggaacggcaggaggccgaggttcacaaattggggcagcgattcaacaatctgcgccagcaggtggaaagacgagcccaatccctccagagcgcaaaggctgcttacgagcacttccaccgcggtcacgatcacgtcctgcagttccttgtttccatcccatcatatgagccccaagaaaccgactctctgagtcagatggaaactaagctcaaaaaccagaagaacctcttggacgaaattgccagccgggaacaggaggtgcaaaaaatctgcgcaaattcacaacagtatcagcaggctgtgaaagattacgagctagaagccgagaagttaagatcattactcgatctcgaaaacggccgccgatcccacgtcagtaaaagggcccggctccagagcccggctactaaggtcaaggaggaggaagccgctctggcagcaaaattcacggaagtgtacgctattaaccgacagcgccttcagaatctggagttcgccctgaacctgttacgccagcaacccgaagttgaggtaacacacgaaaccctgcaaagaaatcgtcctgactccggcgtcgaagaagcctggaagataagaaaagagcttgacgaggaaactgaaagacgccgccagctcgaaaacgaagtaaagagcactcaggaggaaatctggacactaaggaaccaggggccccaggagagtgtcgtgagaaaagaggtccttaagaaagtccctgacccagtgcttgaagaaagctttcagcagctccaacgcacgttggccgaggagcagcacaagaatcaactgctgcaggaagaattggaggccctccagctgcagttgagagcactggagcaagaaaccagggatggaggccaagaatatgtcgtaaaggaggtcttacgtatcgagcctgatagggcccaagccgatgaggttctccagctgagagaagaattggaagcgctgaggcggcagaagggggcaagggaggctgaggtactgcttctacagcagcgcgtggccgccctggccgaagaaaagtcccgcgctcaggagaaagtcaccgagaaggaagttgtgaagctgcaaaacgatccccagctggaggcagaatatcagcagctccaggaagaccaccagcgacaggaccagctaagagagaagcaagaagaggagctgagttttctgcaggacaagttaaaacgcctagaaaaggagagggcgatggctgaaggcaaaataacagtgaaagaggtattgaaggttgaaaaggatgctgcgaccgaacgcgaagtgtcagacctgacacgccagtatgaggatgaagcggcgaaagccagagcttcccaacgcgagaaaacagagctgctgaggaagatttgggccctggaggaggagaatgccaaggtcgtggttcaagaaaaggttagagaaatagtgcgccccgatccgaaggctgagtctgaagtggctaacttgcggctggaactggtagaacaggaaagaaagtatcgaggcgccgaggagcagttgaggtcataccagtctgaacttgaggccctccgccgaaggggaccacaggtcgaggtgaaggaggtgacaaaggaagtcattaagtataagacggacccagagatggagaaggaactgcaacggctgcgagaggagattgtggacaaaactcgtctgattgagcgctgcgatctggagatttatcaacttaagaaggagatccaggcccttaaggacaccaaacctcaagtgcagacgaaggaggtggtacaggaaattctgcaatttcaggaagatcctcaaactaaggaagaggttgcctctctccgagccaaactgtctgaagagcaaaaaaaacaagtcgacctggaacgggagcgggcctcccaggaagaacagatcgcaagaaaagaggaagaattatctcgtgtaaaggagcgggtggtccagcaggaagtcgtccggtatgaagaggagcccggcctgcgcgccgaggcgagtgcattcgctgaatccattgatgtggagctgcgtcagattgacaagctgagggccgagctgaggcgtctgcagaggaggcgtactgagctcgagaggcaattggaggaactggaaagggaaagacaggccaggcgcgaagctgagagggaggtgcagcggctgcagcagagactggccgctctggaacaggaggaggcagaggcccgggagaaagtgacacacacacagaaagtcgtgctgcagcaggatccacagcaggcacgggagcatgccctactcaggctacagctggaggaagaacagcaccggcgtcagttgcttgaaggcgagctggaaacactcagacgcaagttggcggcattggagaaagctgaggtgaaggaaaaggtcgtcctctctgagtcggtccaggtcgaaaagggggacaccgagcaggagatccagagactcaaaagttctctggaagaagaatcaaggtcaaaaagagaattggacgtggaagtctcccgacttgaagcacgcctctctgaactggaatttcataactctaaatccagcaaggagctagacttcttgcgagaggagaatcataagttgcaactggaaagacagaacctacagttagaaacccgcagactccagagcgagatcaatatggccgctacagagacccgcgacctgagaaatatgacggttgccgattctgggactaaccacgattctagattatggtctcttgaacgggagctggacgatctaaagagactctctaaggacaaggatctcgagatcgacgagctgcagaagagattgggctcagtggccgttaagagggagcagagagagaatcatctgcggcgctccattgttgtgatccacccagacacgggtagggagctgtccccagaagaggcacatagggctggtctcatcgactggaatatgttcgttaagttgcggagtcaggagtgcgactgggaggagataagcgtaaaggggccaaatggtgagagctccgtcatccacgaccggaaatcaggcaagaagttttcaattgaggaagccttacagagcggacgcttgacccctgctcaatatgaccggtacgtaaacaaagacatgagtatccaggaactggcggtgttagtcagcgggcagaagtag

SEQ ID NO: 131193 - DNA, 5271 bp, Artificial Sequence
  derived and/or modified sequence
atgaacagcctcttcaggaagaggaacaagggcaagtacagccccaccgtgcagaccaggagcatcagcaacaaggagctgtctgagctgattgagcagctgcagaagaatgctgaccaggtggagaagaacatcgtggacacagaggccaagatgcagagcgacctggcccggctgcaggagggccggcagcctgagcacagagatgtgaccctgcagaaggtgctggacagcgagaagctgctgtatgtgctggaggctgatgctgccatcgccaagcacatgaagcacccccagggcgacatgattgctgaggacatccggcagctgaaggagcgggtgaccaacctgcggggcaagcacaagcagatctaccgcctggccgtgaaggaggtggacccccaggtgaactgggccgccctggtggaggagaagctggacaagctgaacaaccagagctttggaacagacctgcccctggtggaccaccaggtggaggagcacaacatcttccacaatgaggtgaaggccatcggcccccacctggccaaggatggagacaaggagcagaacagcgagctgcgggccaagtaccagaagctgctggccgccagccaggcccggcagcagcacctgagcagcctgcaggactacatgcagcgctgcaccaatgagctgtactggctggaccagcaggccaagggccgcatgcagtatgactggagcgacaggaacctggactaccccagcagaagacggcagtatgagaacttcatcaacagaaacctggaggccaaggaggagcgcatcaacaagctgcacagcgagggggaccagctgctggccgctgagcaccctggcaggaacagcattgaggcccacatggaggccgtgcacgccgactggaaggagtacctgaacctgctgatctgtgaggagagccacctgaagtacatggaggactaccaccagttccatgaagatgtgaaggatgcccaggagctgctgaggaaggtggacagcgacctgaaccagaagtatggccctgacttcaaggaccgctaccagatcgagctgctgctgcgggagctggatgaccaggagaaggtgctggacaagtatgaagatgtggtgcagggcctgcagaagaggggccagcaggtggtgcccctgaagtaccgccgggagacccccctgaagcccatccctgtggaggccctgtgtgactttgaaggagagcagggcctcatcagccggggctacagctacaccctgcagaagaacaatggagagagctgggagctgatggacagcgctggcaacaagctgattgccccagctgtgtgcttcgtcatccccccaacagatcctgaggccctggccctggccgacagcctgggcagccagtacagatctgtgcggcagaaggccgccggcagcaagaggaccctgcagcagagatatgaggtgctgaagacagagaaccctggagatgccagtgacctgcagggccggcagctgctggccggcctggacaaggtggccagtgacctggaccggcaggagaaggccatcaccggcatcctgcggccccccctggagcagggccgggctgtgcaggacagcgctgagcgggccaaggacctgaagaacatcaccaatgagctgctgagaattgagcctgagaagaccaggagcacagctgagggggaggccttcatccaggccctgcccggcagcggcaccacccccctgctgcggaccagggtggaggacaccaacagaaaatatgagcacctgctgcagctgctggacctggcccaggagaaggtggatgtggccaaccggctggagaagagcctgcagcagagctgggagctgctggccacccatgagaaccacctgaaccaggatgacacagtgcctgagagcagccgggtgctggacagcaagggccaggagctggccgccatggcctgtgagctgcaggcccagaagagcctgctgggggaggtggagcagaacctgcaggccgccaagcagtgcagcagcaccctggccagccgcttccaggagcactgcccagacctggagcggcaggaggccgaggtgcacaagctgggccagcgcttcaacaacctgcggcagcaggtggagcggcgggcccagagcctgcagagcgccaaggccgcctatgagcacttccaccggggccatgaccacgtgctgcagttcctggtgtccatccccagctatgagccccaggagacagacagcctgagccagatggagaccaagctgaagaaccagaagaacctgctggatgaaattgccagccgggagcaggaggtgcagaagatctgtgccaacagccagcagtaccagcaggccgtgaaggactatgagctggaggccgagaagctgcggagcctgctggacctggagaatggccgccgcagccacgtgtccaagagggcccggctgcagagccctgccaccaaggtgaaggaggaggaggccgccctggccgccaagttcacagaggtgtatgccatcaaccggcagaggctgcagaacctggagtttgccctgaacctgctgcggcagcagcctgaggtggaggtgacccatgagaccctgcagaggaacagaccagattctggagtggaggaggcctggaagatcaggaaggagctggatgaggagacagaaagaagacggcagctggagaatgaggtgaagagcacccaggaggagatctggaccctgaggaaccagggcccccaggagagcgtggtgaggaaggaggtgctgaagaaggtgcctgaccctgtgctggaggagagcttccagcagctgcagaggaccctggccgaggagcagcacaagaaccagctgctgcaggaggagctggaggccctgcagctgcagctgcgggccctggagcaggagaccagagatggcggccaggagtatgtggtgaaggaggtgctgcgcatcgagccagaccgggcccaggctgatgaggtgctgcagctgcgggaggagctggaggccctgcggcggcagaagggggcccgggaggccgaggtgctgctgctgcagcagagggtggccgccctggccgaggagaagagccgggcccaggagaaggtgacagagaaggaggtggtgaagctgcagaatgacccccagctggaggccgagtaccagcagctgcaggaggaccaccagaggcaggaccagctgcgggagaagcaggaggaggagctgtccttcctgcaggacaagctgaagaggctggagaaggagcgggccatggccgagggcaagatcaccgtgaaggaggtgctgaaggtggagaaggatgctgccacagagcgggaggtgtctgacctgacccggcagtatgaagatgaagctgccaaggcccgggccagccagcgggagaagacagagctgctgaggaagatctgggccctggaggaggagaatgccaaggtggtggtgcaggagaaggtgcgggagatcgtgcggccagaccccaaggccgagagcgaggtggccaacctgcggctggagctggtggagcaggagaggaagtacagaggagctgaggagcagctgcggagctaccagagcgagctggaggccctgcggcggcggggcccccaggtggaggtgaaggaggtgaccaaggaggtgatcaagtacaagacagatcctgagatggagaaggagctgcagaggctgcgggaggagatcgtggacaagaccaggctcatcgagcgctgtgacctggagatctaccagctgaagaaggagatccaggccctgaaggacaccaagccccaggtgcagaccaaggaggtggtgcaggagatcctgcagttccaggaggacccccagaccaaggaggaggtggccagcctgcgggccaagctgtctgaggagcagaagaagcaggtggacctggagcgggagcgggccagccaggaggagcagatcgccaggaaggaggaggagctgagccgggtgaaggagcgggtggtgcagcaggaggtggtgcgctatgaggaggagcccggcctgcgggcagaggccagcgcctttgctgagagcattgatgtggagctgcggcagattgacaagctgcgggcagagctgcggcggctgcagaggagaagaacagagctggagcggcagctggaggagctggagcgggagcggcaggcccggcgggaggccgagcgggaggtgcagaggctgcagcagaggctggccgccctggagcaggaggaggccgaggcccgggagaaggtgacccacacccagaaggtggtgctgcagcaggacccccagcaggcccgggagcacgccctgctgcggctgcagctggaggaggagcagcaccggcggcagctgctggagggggagctggagaccctgcggaggaagctggccgccctggagaaggccgaggtgaaggagaaggtggtgctgtctgagagcgtgcaggtggagaagggggacacagagcaggagatccagaggctgaagagcagcctggaggaggagagccgcagcaagcgggagctggatgtggaggtgtcccggctggaggcccggctgtctgagctggagttccacaacagcaagagcagcaaggagctggacttcctgcgggaggagaaccacaagctgcagctggagcggcagaacctgcagctggagacccggcggctgcagagcgagatcaacatggccgccacagagacccgggacctgaggaacatgacagtggccgacagcggcaccaaccacgacagccggctgtggagcctggagcgggagctggatgacctgaagaggctgagcaaggacaaggacctggagattgatgagctgcagaagaggctgggctctgtggccgtgaagcgggagcagcgggagaaccacctgcggcgcagcatcgtggtgatccacccagacaccggccgggagctgagccctgaggaggcccacagagctggcctgattgactggaacatgtttgtgaagctgcggagccaggagtgtgactgggaggagatctctgtgaagggccccaacggggagagcagcgtcatccatgacaggaagagcggcaagaagttcagcattgaggaggccctgcagagcggccgcctgaccccagcccagtatgaccgctacgtgaacaaggacatgagcatccaggagctggccgtgctggtgtctggccagaagtag

SEQ ID NO: 131194 - DNA, 5271 bp, Artificial Sequence
  derived and/or modified sequence
atgaacagcctgttccggaagcggaacaagggcaagtacagccccaccgtccagaccagaagcatatctaataaggaactctccgaactgatcgaacagctacagaaaaatgccgaccaggtagagaagaacattgtcgatacagaggctaagatgcagtccgatctggctcgccttcaagagggtagacaaccagagcacagagatgtcacactgcagaaggtgttggacagcgagaagcttttgtacgtcttggaagcagacgctgccatcgccaagcacatgaaacatccgcagggcgatatgatcgccgaggacatcagacaactcaaagagcgggtcactaatcttagaggaaaacataagcagatctatcgtcttgcagtcaaagaggtggaccctcaggtgaactgggccgcactcgtcgaggagaaactcgataaattaaacaaccagtcttttggcacagatcttccgctcgttgatcaccaggtggaggaacacaatatcttccataacgaagtgaaggcaatcggcccccacttggcaaaggacggcgacaaagaacaaaactccgagctgagagctaaatatcaaaaactcctcgccgccagtcaggctagacagcaacacctcagcagtctgcaggattatatgcaaagatgtaccaacgaactgtactggctagatcagcaagctaaggggcggatgcaatacgactggagcgacaggaatctcgactaccctagtcgacgtcgtcaatacgagaactttatcaaccgcaacttagaagctaaggaagaacgtatcaataagttgcactccgaaggtgatcagctattagcagctgaacaccccgggcgtaactccatcgaagcacacatggaggccgtccacgccgactggaaagagtacttgaacctactgatatgtgaggagtcccacctgaagtacatggaagactatcaccagtttcacgaggacgtgaaagatgcccaagagctgctgcgtaaagtggattctgacctgaatcagaaatatggacctgattttaaggaccgctaccagatcgagttactcttgcgggagttagacgatcaggagaaggtgctggacaaatacgaggacgttgtccagggcttgcagaaacggggccagcaggtggttccactgaagtacagaagggagacacccttaaagcccattcccgtagaggccctctgcgattttgagggagaacagggcctcattagcagaggttattcgtacactctacaaaagaataatggggagagttgggagcttatggacagtgctggaaacaaactcatcgcacccgctgtgtgtttcgtgattccaccaacagatcccgaggcactcgctctggcagactctcttgggtcccagtacaggtcagtgcgtcagaaagctgcggggtcaaagcgcacactgcagcagcgatatgaagtcctgaagaccgagaatcccggagacgcttccgatctgcaggggcgccagctccttgctggacttgacaaggtggccagcgatctggatagacaggagaaagccatcactggcatcctcaggccccctctcgaacaaggccgagccgtgcaggacagcgccgaacgggccaaggatctgaagaatattaccaacgagctcctgagaattgaacccgaaaaaacgaggtccacagccgaaggggaagcattcatacaagcattgccaggctcaggcacaactccactgctgagaacccgtgtggaggatactaacaggaagtatgaacaccttctgcaactgctggacctggcacaggagaaggtggatgttgccaacagactggagaagagcctccagcagtcttgggaactgctcgctacacacgagaatcatctaaatcaagacgacactgtgccggaaagctcacgcgtcctggacagcaaaggacaagagctggctgctatggcctgtgaacttcaagcgcagaaatccctgctcggagaggtggagcagaatcttcaggctgcaaagcagtgcagtagcacactcgcgtctagatttcaggagcactgccccgatctggagaggcaggaggccgaggtgcataaattgggacagagattcaacaacctccgccaacaggtggagagacgggctcaaagcctgcagagcgctaaggccgcctacgagcacttccatcgtgggcacgatcatgtacttcaattccttgtctcaatcccatcctacgagccccaggagacggactccctgagccagatggagacaaagctcaaaaatcaaaagaatttactcgatgaaatcgcttcccgggagcaggaggttcagaaaatctgcgccaattcccagcagtaccagcaggctgtgaaggattacgagctggaggccgaaaagttgagatcgctgctggatttggaaaatggcagacggtcccacgtgtcaaagagggcccgtctacagagtcccgctactaaagttaaggaagaggaggccgctctcgccgcaaaatttaccgaagtgtatgccatcaacaggcagcgcctgcagaaccttgagttcgccctgaatctgctgaggcagcagcctgaggtggaggtgactcatgagactctgcagcgtaaccggcccgatagtggcgtggaggaagcctggaagatccgcaaggagcttgacgaagaaactgagagacgcaggcaactcgaaaacgaagttaaatccacacaggaggagatttggacactcagaaaccagggacctcaggagagcgtggttagaaaagaagtgctgaagaaagtgcccgatcccgtgctggaggagtcattccagcagctgcaacgcaccctggctgaagagcagcacaagaatcagctgttacaggaggaactggaggccctccaactccagttacgcgcgctggagcaagaaacgcgagacggaggtcaagagtacgtcgtcaaagaagtgctgcggatcgaacctgatcgtgctcaggccgacgaagtgttacagttaagggaggaactagaagccttaaggagacagaaaggtgcacgggaagccgaggtgttactgctccagcagagagtggcagccctggcagaggaaaagtcccgggcgcaggagaaggtgaccgagaaagaagtggtcaagctgcaaaacgacccacagctagaggccgagtatcagcagctgcaggaagatcatcagcgacaggaccagctccgagagaaacaggaggaagagctgagctttttacaggataaattgaaacggcttgagaaagaaagagcaatggccgagggcaagataaccgttaaggaggtgctgaaagtagagaaagacgccgcaaccgaacgagaagttagtgacctgacaagacagtacgaggacgaggccgctaaagccagggcatcccagcgcgagaaaacagaactgctgcgtaaaatttgggctctcgaagaagaaaatgccaaggtggtcgtgcaagaaaaagttagagagatagtgcggcctgaccccaaagccgagtccgaagtggccaacctcaggctagaactagttgaacaagagcggaagtataggggggccgaggaacaactcaggtcttatcagtctgagttggaggccctgcggaggagaggcccacaagtggaagtgaaagaggtcactaaggaggtcattaagtacaaaacagatcccgaaatggagaaggagctacagagactgcgtgaagaaatcgttgacaaaaccagactgatcgaacggtgcgatctggagatttaccaacttaaaaaggaaattcaggccctgaaggacacaaaaccgcaagttcagaccaaggaggttgttcaggagatcctgcaattccaggaagacccgcaaacaaaggaagaggtggcctccttacgggctaagctttcagaagaacagaagaagcaggtcgatctggagcgggagagggcttcacaggaggagcagatagcccgtaaggaggaggagctctctagagtgaaggagcgggtggtccagcaagaggtggtccgctatgaggaggagccaggcctacgcgcagaagccagcgccttcgctgagagcattgatgtggaattacgccagattgataagcttagggccgagcttcggagactgcagcgtagaagaacggagctagagcgtcagctggaagaactggaacgagagcgccaggccagacgggaagcggaacgcgaggtgcaaagattacagcagcggctggctgctctggaacaggaggaagccgaggcgcgagagaaggtgacccacacacagaaagtcgtcctgcaacaggatcctcagcaggcccgggaacacgccctcttaaggctccaactcgaggaagaacaacacagaaggcagttgttggagggtgaactggagacactcaggcgaaaactcgccgctttggagaaggcagaggtcaaggagaaggtggtcctcagcgagtccgttcaagtggaaaagggagatacagaacaggaaatccagaggttaaagtctagcctcgaggaagaatctcggagcaagcgggagcttgacgttgaagtgagcagactggaagctaggctgagcgaactggaatttcacaacagcaagagcagcaaagagctcgatttccttcgggaggagaaccacaaattgcagctggaaagacagaacctccagctggaaacgcgtcggcttcagtctgagatcaacatggcagccacggagacaagggacctgagaaatatgacagtggctgactcgggaaccaaccacgatagtaggctgtggagtctcgagcgggaactggatgatctgaagaggctctctaaagataaggacttagagatcgacgagttgcagaagcggctgggatccgttgccgtcaagagggagcaacgggagaatcaccttagacgaagcatcgtggtgatacatccggacactggcagagaattgtcccccgaggaagcacaccgagccggtcttatcgactggaatatgtttgtgaaattgagatcccaggagtgtgactgggaagaaatctcagtaaaagggcctaatggcgaatcttcagtcatccatgacaggaaatccgggaagaaatttagcatcgaagaagcactacagtctgggcggctcacgcctgcccagtatgaccgttatgtgaacaaggatatgtccattcaggagctggcggtactcgtctccgggcaaaaatag

SEQ ID NO: 131195 - DNA, 6238 bp, Artificial Sequence
  derived and/or modified sequence
cgcgccgccgctcgctcacctgcgctcccgcccgcccctcggtgcgcgcccggcccgccagccgccgccgcccgcaccccgagcgccaccatgaactcgctcttcaggaagagaaacaaaggcaaatacagccccactgtgcagacccggagcatctctaacaaggagctctcggagctgatcgagcagctgcagaagaatgccgaccaggtggagaagaacatcgtggacacagaggccaagatgcagagtgacctggctcggctgcaggagggtcggcagcctgagcaccgggacgtgaccctgcagaaggtgttggactctgagaagctgctctatgtgctagaggcggatgcggccattgccaagcacatgaagcacccacagggggacatgatcgccgaggatatccgccagctgaaggagcgtgtgaccaacctgcgcgggaaacacaagcagatctacaggctggcggtgaaggaagtggatccacaggtcaactgggcggcactggtggaggagaagctggacaagctgaacaaccagagctttgggactgacctgccgctggtggaccaccaagtggaggagcataacatcttccacaatgaggtcaaggccatcgggccccacctggccaaggacggggacaaggagcagaacagcgaactccgggccaagtaccagaaactgctggcagcatcacaggcccggcagcagcacctgagttcgctgcaggactacatgcagcgctgcaccaatgagctgtactggctggaccagcaggccaagggccgcatgcagtacgactggagtgaccgcaacctcgactaccccagccgccggcgccagtatgagaatttcatcaaccggaacctggaggccaaagaggagagaatcaacaaactgcacagcgagggcgaccagctgctggcggccgagcaccccgggaggaactccattgaggcgcacatggaggctgtgcacgcagactggaaggagtacctgaacctgctcatctgcgaggagagccacctcaagtacatggaggactaccaccagtttcacgaagacgtgaaggacgctcaggagctgctgcgcaaggtggactcggacctgaaccagaagtatggccctgacttcaaggaccggtaccagattgagctgctgctgcgggagctggatgaccaggagaaggtgctggacaagtatgaggacgtggtgcaggggctgcagaagcgaggccagcaggtggtgcccctcaagtaccgccgggagactccgctcaagcccatccccgtggaggcactctgtgactttgagggggagcagggcctgatctcgcggggctacagctacaccctgcagaagaacaacggggagagctgggagctcatggacagcgctgggaacaagctgattgctccggccgtgtgttttgtgatcccccccacagaccctgaggccctggctctggctgacagcctgggcagccagtaccggagcgtgcggcagaaggcagctgggagcaaacgcacgctgcagcagcggtatgaggtgctgaagaccgagaatcccggagatgcctctgacctacaggggcggcagctgctggctggcttggacaaggtggccagcgacctggaccggcaggagaaggccatcacagggatcctgcggccaccactggagcaaggccgggctgtgcaggacagtgccgagcgggccaaggacctcaagaacatcaccaacgagctactgcggattgaacctgagaagacgcggagcacggctgagggcgaagccttcatccaggccctcccaggcagtggcaccacacccctgctgaggacccgggtggaggacaccaaccggaaatacgagcacctcctgcagctgctggacttggcccaggagaaggttgatgtggccaaccgcctggagaagagcctgcagcagagctgggagttgctggccacacacgagaaccatctgaatcaggatgacacagtgcctgagagcagccgtgtcctggacagcaaggggcaggagctggcggccatggcctgtgagttacaggcccagaagtccctcctgggtgaggtggagcagaacttgcaggcggccaagcagtgctcgagcacactggccagccgcttccaggagcactgtccggacctggagcgccaggaggccgaggtgcacaagctgggccagcgtttcaacaacctgcgccagcaggtggaacgcagggcgcagagcctacagagcgccaaggcagcctacgagcacttccaccgcggccatgaccacgtgctgcagttcctagtcagcatccccagttacgagccccaggagacagacagcctcagccagatggagaccaagctgaagaaccagaagaacctgctagatgagatagcaagtagggagcaggaagtacagaagatctgtgccaattcccagcagtaccagcaagctgtaaaggactatgagttagaagcagaaaaactaaggtctcttctcgacttggagaatggaaggagaagccacgtgagcaagagagccaggctccaatctcctgccaccaaagtgaaggaagaggaagcagcacttgccgccaagttcactgaagtttatgccatcaacagacagaggctgcagaatctggagtttgctctgaatctcctcagacagcagccggaagtagaagtgacccatgagaccctgcaaaggaataggccggactctggagtggaggaggcgtggaagatcaggaaggaactggatgaggagactgagcggaggcggcagctggagaacgaggtcaagagcacccaggaagaaatctggaccttgaggaatcaggggcctcaggaatcggtggtgaggaaggaggtgctcaagaaggtgccggatcccgtgctggaggagagcttccagcagctgcagcggacgctggcagaggagcagcacaagaaccagctgctgcaggaggagctggaggcactgcagctgcagctgcgtgccctggagcaggagaccagagacggggggcaggagtacgtggtcaaggaggtcctgcgcatcgagcctgacagggcccaggcggatgaggtcttgcagctgcgggaggagctggaggcactgaggcggcagaagggcgcccgggaggcagaggtgctcctcctgcagcagcgtgtggccgccctggctgaagagaagagccgggcgcaggagaaggtcacagagaaagaggtggtgaaactgcagaatgacccccagctggaggcagagtaccagcagctgcaggaggaccaccagcgccaggaccagctcagggagaagcaggaggaggagctgagcttcctccaggacaagctcaagaggctagagaaggagcgggccatggccgagggcaagatcaccgtcaaggaggtgctcaaggtggagaaggacgcggccaccgagagggaggtcagcgatctcacccgccaatatgaggacgaggctgccaaggctcgcgctagccagagggagaagacggagctgctccgaaagatatgggccttggaggaggagaacgccaaagtggtggtgcaggagaaggtgcgggagatcgtgcggccagaccccaaggcggaaagtgaagtggcgaacctccgcctggagcttgtggagcaggagcgaaagtaccggggtgccgaggagcagctccggagctaccagagtgagctggaggccctcaggaggcgaggcccccaggtggaagtcaaagaggtgactaaggaagtcattaagtacaagactgaccctgagatggagaaggagcttcagcggctcagggaggagatcgtggacaagaccagactgatcgaaaggtgtgatttagagatctaccagctgaaaaaggaaatccaggccctgaaagacaccaaaccccaggtccagaccaaagaggtggtccaggagatcctccaattccaagaagaccctcaaaccaaggaggaggtggcgtctctgagggcaaagctctcagaggagcagaagaaacaagtggatctggagagggaaagagcttcccaggaagagcagatcgcccggaaagaggaggagctctcgcgggtgaaggaaagggtggtgcagcaggaggtggtcaggtatgaggaggagccaggcctgcgggccgaggcgagcgcctttgccgagagcatcgatgtggagctgcggcagattgacaagctgcgggcagagctgcggcggctgcagcgccggcgcaccgagcttgagcggcagctggaggagctagagcgcgagcggcaggcccgcagggaggccgagcgcgaggtacagcggttgcagcagcggctggcagcgctggagcaggaagaagctgaggcccgtgagaaggtaacccatacgcagaaggtggtgctgcagcaggacccgcagcaggcgcgagagcatgccctgctccgactccagctggaagaagagcagcaccggcggcagctcctggagggggagctcgagaccctccggaggaaactggctgcactggagaaggcggaggtcaaggagaaggtggtgctctccgagagtgtccaggtggagaagggcgacaccgagcaagagatccagaggctcaagagcagcctggaggaggagagccgcagcaagcgcgagctggacgtcgaggtgagccggctggaagccaggctttcggagctggaattccataactccaagtcatccaaggaactagactttctgagggaagagaaccacaaattacagctggagaggcaaaacctgcagctggagacccgaaggctccaatcggaaatcaacatggcagcgacggaaacacgagacctgcggaacatgaccgtggcggactctgggaccaaccatgactccagactgtggtccctggagagggaactggatgacctcaagaggctctccaaggacaaagacctcgagatcgacgagctgcagaagcgcctgggctccgtggccgtcaagcgggagcagcgggagaaccacctgcggcgctccatcgtagtcatccaccctgacacaggccgcgagctgtccccggaggaagcccaccgtgccgggctcattgactggaacatgttcgtgaaactcagaagccaggagtgcgactgggaggagatctcagtgaagggtcccaatggggagtcctcagtgatacacgacaggaagtctggcaagaagttctccatcgaagaggccctgcagagtggcaggctgacccctgctcagtatgaccgctatgtcaacaaggatatgtccatccaggagctggcggtcttggtatctgggcagaagtaggcacagctcttgcaactcttcgtaacggcagacgctggccctctcctacgacgcagtgacctccttggtgtcgtcctctcccttgccctggtgcaggccaagcattttatacataccctcgctgccaggctgctcagagtcccgcccacatatgagacaggcactggctgaagacaggcaactctcgtcccaaccatcattcaccctgagtgacgtacttcatcctccaatgactggacaactgcgatgccttttcctcccttttcctgtacactcccagcaacaaactcctcatgataactgcacacaatctgaaaaccactgaaggacaagccaaccacagcagccaagcccactccttgcagcatgggtactggtggcacaccagacagtgacactgccccacaaaggcctgggcccgtgggggctgctgcctggcatgacatctctccagatttctggcttaaaaccaactttccatccgagaagcctcctcagtagttactctgctcatgagacagatctgggctccaagccaggaaaggtgaacagaaaccacaagtgtccagccctcggtgctggagtggacgttaattgtcagccaccagactgtcccggcacctacagagaatgtttcacagttctggcatttaaatcctttgatagtggattgtgctgctgttagccttagtttcagtgctttacaagtctcgcttattatctcactggtatttaggtatacaaaacagttgattattcaccacgccaatatctgggtctctgtatctcatgtagaacataagaaaatgggaactaatagggaaatttatttatagcatgaaaataaacctggtggctggagtctgcttgtacggtc

SEQ ID NO: 131196 - DNA, 5270 bp, Artificial Sequence
  derived and/or modified sequence
atgaacagcctgtttagaaaaagaaataagggtaagtactccccaaccgtgcagacacggtcaatttctaacaaggaactatccgagctcattgaacagctgcaaaagaacgcagatcaggtcgagaagaatatagtggacacagaagctaagatgcaatccgaccttgccaggcttcaggagggacggcagcctgagcatcgggacgtgaccctgcagaaagtgctggactccgaaaaactcttgtatgttctcgaggccgacgcagccattgctaaacatatgaagcacccacagggtgatatgattgccgaagacattaggcagctgaaggagagggtgacaaacctccgcggtaagcacaaacagatctacagacttgcagtaaaagaggtggatccccaggtcaattgggccgcactcgtggaggaaaagctggataaactcaacaaccaaagctttgggacagacctgcccctggtggaccatcaggtagaagaacacaacatcttccacaacgaagtgaaggcaataggtccccaccttgcgaaggacggggacaaagaacaaaactctgagctaagggccaagtatcagaagctcttagccgcttcacaggctcggcagcagcacctgtcttcactgcaggactacatgcagcgctgcaccaacgaactctattggctggaccaacaagccaagggacgcatgcagtatgattggtcagatcggaacctggactacccttctcggcgaagacagtacgaaaacttcattaaccgcaatctggaggccaaagaagagcgtattaataagttacattccgaaggggaccaactgctcgctgctgaacaccctggccgaaactcaatagaagcacacatggaggcggtgcatgcagactggaaagaatatctgaaccttcttatatgtgaagagtcccacttaaagtatatggaagattaccatcagttccacgaggacgtgaaggatgcacaagagctcctgcggaaggtggactccgatctcaatcaaaagtacggcccagacttcaaggacaggtatcagattgaattactcctgcgggaacttgatgaccaagaaaaagtgcttgacaaatatgaggatgtggtgcaggggctgcagaaaagagggcagcaggtcgttcccctcaaatatcgtcgtgaaacacctttaaagccaattccggtggaggcactgtgtgatttcgaaggagaacagggccttatttcaagagggtatagttacactctgcagaagaacaacggagagtcatgggaactgatggactccgctgggaataagctgatagcccctgctgtgtgctttgtgatcccacctactgatcccgaggccctggccctggctgactcattgggttcacagtaccgcagtgtgcgacagaaggcagccggttcaaagcgtaccctccagcagcgctacgaggtgctaaaaacggagaacccaggcgacgcttccgaccttcagggaagacagctcctggctgggctggacaaagtggcgagcgatctggatagacaggaaaaagccatcactggaattctccgccctcccttggagcagggtcgtgctgtgcaagatagcgcagagcgcgctaaagacctaaagaatatcactaatgagctactgcggattgagccggaaaagactaggtctacggctgagggggaagcatttatccaggccctgccaggctctgggactacacctctgctgcggacccgcgtggaggacacaaacaggaaatacgagcacctgcttcagctgctcgacctggcacaagagaaggtggatgtggctaaccgcttggagaaaagcctccagcagtcttgggagctcttggcaacacatgagaatcacttgaaccaggacgacacagtccctgaatccagccgagtcttggactcaaaaggacaggaattggcagcgatggcctgtgagctccaagcacagaagagcctcctgggtgaagtggaacaaaatctgcaggcggcaaagcaatgtagctctacacttgccagccgtttccaggaacactgcccagacctcgagagacaggaggccgaagtccacaagcttggccagcgcttcaacaatttaaggcagcaggtcgaaagacgtgcccagtcgctgcaatctgcaaaggctgcttacgaacactttcatcgcggacacgaccacgttctacagttcttggtgagtattccctcctacgaaccccaggagaccgacagcctatcccagatggaaacgaaactcaagaaccaaaaaaacctgctggacgagattgcctcgagagaacaggaggttcaaaagatttgtgccaattcacagcagtaccagcaggcagtgaaggattacgaactcgaggccgaaaagcttcgttctttgctcgatctggagaacggccgaagatcccacgtttctaagcgggctagattgcaatctccagctactaaggtcaaggaggaagaggccgctcttgccgcaaaatttaccgaagtttatgcgatcaacagacaacggctgcaaaacctcgaattcgccttgaatcttcttaggcagcagccagaggtagaagtgacacacgagaccttgcagcgaaacaggcccgatagcggcgtggaagaggcttggaaaatccggaaggagctggatgaggaaaccgagcgcagaaggcagctcgagaacgaggtgaagtctacccaagaggagatctggaccctgagaaaccagggacctcaagagtcagtggtgagaaaagaagttctaaaaaaggttccagaccctgtgttggaggagtctttccagcagctgcagagaaccctggctgaggaacagcacaaaaatcaattgctacaggaagagctggaggcacttcaattgcagctgcgagcgttggagcaggagacccgagacgggggtcaggaatatgttgtgaaagaggtcttaaggatcgagccggatcgggctcaggcagacgaagtcctgcagttgcgggaggagctagaggctctgaggagacaaaagggggcaagggaagctgaggtgcttctcctgcaacagcgagtagcagccctcgcagaggagaagagcagagcccaggagaaagtgaccgagaaagaagtggtgaagttgcagaatgatccgcaattagaggccgagtaccagcagctccaggaagaccaccaaaggcaggaccagcttagggagaagcaggaggaagagctgtcgttcttgcaggataaacttaagcggctggaaaaagagcgggcaatggctgaaggtaaaatcacagtaaaagaggtgctgaaggttgaaaaggatgcagcgaccgaaagagaggtgagcgatctgactagacagtacgaggacgaggccgctaaggcgagagccagtcagagggagaagacggagttactacggaagatctgggccctggaggaggagaacgcaaaggtggtcgtccaggaaaaggtacgcgagatagtgaggccagatccaaaggcagagagtgaagtggccaacctgcgtctggagcttgtggaacaggaacgtaaatatcgcggtgctgaagaacagttacgaagttatcaaagcgaacttgaggcgctgagacggcgaggccctcaagtggaagtaaaagaggtgactaaagaggttatcaagtataagacagatccagagatggaaaaagagttgcaacggctacgcgaagaaatcgtggacaaaacacgcctcattgagcggtgtgatctggagatctatcagttgaagaaggaaatccaagcattaaaggataccaaaccacaggtgcaaactaaggaagtggtgcaagagatcctgcaatttcaagaagacccccagacaaaggaggaggttgctagcctaagagctaagctgtctgaggaacagaagaaacaggtagatttggagcgagagcgtgcgtcccaagaagagcagatcgccagaaaggaagaagagctgtccagagtcaaggaacgggtcgtgcaacaggaggttgttagatacgaggaggaacccggacttagggctgaagcaagcgcctttgccgagtcaattgatgtcgaactgcgccagatcgacaaactgagggccgagctcaggcggcttcagcgtagacggaccgagcttgagagacagctggaggagttagagagggagcgccaggcccgacgagaagctgaacgtgaagtccaaaggctccaacagagacttgctgcgctggaacaggaggaagcagaggcccgtgaaaaagtgacgcatacgcagaaagtcgttttgcagcaggacccacagcaagccagagagcacgccctgttgcggctgcagctcgaggaggagcaacatcggcgacagttacttgagggcgagttagagacgctgcggcgtaaactggccgctcttgagaaagctgaggtgaaggagaaggtggttctcagtgaatcagtgcaggtggaaaagggcgacacagaacaggaaatacagcggttaaaatcgtcactggaggaggagtcacgctcgaagagagaactagacgtggaagtgtctcgtctcgaggccagattgtccgaattggagttccacaattcaaagtcttcgaaagagctggacttcctgagagaggagaaccataagctccagctcgagagacagaatctccagttggagactcgccgactccagtccgagattaacatggcggcaacagaaaccagagacctacggaacatgacggtggcagattcggggaccaaccatgacagcaggctgtggtctcttgaacgagagttggacgaccttaagcgcctctctaaggacaaggacctagagatagatgaactgcagaagagacttggaagcgtcgctgtcaagcgcgagcaacgtgagaaccatttgaggcggagtatcgtagtgatacatccagatactggaagggaattgtcacctgaggaggcgcacagggcaggcctcattgattggaatatgttcgttaaactccgcagccaagaatgcgattgggaggaaatctcagtcaagggccctaatggcgaatcaagcgtgatacacgataggaagtctgggaagaaatttagcattgaagaagcgcttcagtcagggcgattgactcccgcacagtatgatagatacgtgaacaaagatatgtcgatccaagaacttgccgtgctcgtttcagggcagaaata

SEQ ID NO: 131197 - DNA, 5271 bp, Artificial Sequence
  derived and/or modified sequence
atgaacagcctgttcagaaagagaaacaagggcaagtacagccccaccgtgcagaccagaagcatcagcaacaaggagctgagcgagctgatcgagcagctgcagaagaacgccgaccaggtggagaagaacatcgtggacaccgaggccaagatgcagagcgacctggccagactgcaggagggcagacagcccgagcacagagacgtgaccctgcagaaggtgctggacagcgagaagctgctgtacgtgctggaggccgacgccgccatcgccaagcacatgaagcacccccagggcgacatgatcgccgaggacatcagacagctgaaggagagagtgaccaacctgagaggcaagcacaagcagatctacagactggccgtgaaggaggtggacccccaggtgaactgggccgccctggtggaggagaagctggacaagctgaacaaccagagcttcggcaccgacctgcccctggtggaccaccaggtggaggagcacaacatcttccacaacgaggtgaaggccatcggcccccacctggccaaggacggcgacaaggagcagaacagcgagctgagagccaagtaccagaagctgctggccgccagccaggccagacagcagcacctgagcagcctgcaggactacatgcagagatgcaccaacgagctgtactggctggaccagcaggccaagggcagaatgcagtacgactggagcgacagaaacctggactaccccagcagaagaagacagtacgagaacttcatcaacagaaacctggaggccaaggaggagagaatcaacaagctgcacagcgagggcgaccagctgctggccgccgagcaccccggcagaaacagcatcgaggcccacatggaggccgtgcacgccgactggaaggagtacctgaacctgctgatctgcgaggagagccacctgaagtacatggaggactaccaccagttccacgaggacgtgaaggacgcccaggagctgctgagaaaggtggacagcgacctgaaccagaagtacggccccgacttcaaggacagataccagatcgagctgctgctgagagagctggacgaccaggagaaggtgctggacaagtacgaggacgtggtgcagggcctgcagaagagaggccagcaggtggtgcccctgaagtacagaagagagacccccctgaagcccatccccgtggaggccctgtgcgacttcgagggcgagcagggcctgatcagcagaggctacagctacaccctgcagaagaacaacggcgagagctgggagctgatggacagcgccggcaacaagctgatcgcccccgccgtgtgcttcgtgatcccccccaccgaccccgaggccctggccctggccgacagcctgggcagccagtacagaagcgtgagacagaaggccgccggcagcaagagaaccctgcagcagagatacgaggtgctgaagaccgagaaccccggcgacgccagcgacctgcagggcagacagctgctggccggcctggacaaggtggccagcgacctggacagacaggagaaggccatcaccggcatcctgagaccccccctggagcagggcagagccgtgcaggacagcgccgagagagccaaggacctgaagaacatcaccaacgagctgctgagaatcgagcccgagaagaccagaagcaccgccgagggcgaggccttcatccaggccctgcccggcagcggcaccacccccctgctgagaaccagagtggaggacaccaacagaaagtacgagcacctgctgcagctgctggacctggcccaggagaaggtggacgtggccaacagactggagaagagcctgcagcagagctgggagctgctggccacccacgagaaccacctgaaccaggacgacaccgtgcccgagagcagcagagtgctggacagcaagggccaggagctggccgccatggcctgcgagctgcaggcccagaagagcctgctgggcgaggtggagcagaacctgcaggccgccaagcagtgcagcagcaccctggccagcagattccaggagcactgccccgacctggagagacaggaggccgaggtgcacaagctgggccagagattcaacaacctgagacagcaggtggagagaagagcccagagcctgcagagcgccaaggccgcctacgagcacttccacagaggccacgaccacgtgctgcagttcctggtgagcatccccagctacgagccccaggagaccgacagcctgagccagatggagaccaagctgaagaaccagaagaacctgctggacgagatcgccagcagagagcaggaggtgcagaagatctgcgccaacagccagcagtaccagcaggccgtgaaggactacgagctggaggccgagaagctgagaagcctgctggacctggagaacggcagaagaagccacgtgagcaagagagccagactgcagagccccgccaccaaggtgaaggaggaggaggccgccctggccgccaagttcaccgaggtgtacgccatcaacagacagagactgcagaacctggagttcgccctgaacctgctgagacagcagcccgaggtggaggtgacccacgagaccctgcagagaaacagacccgacagcggcgtggaggaggcctggaagatcagaaaggagctggacgaggagaccgagagaagaagacagctggagaacgaggtgaagagcacccaggaggagatctggaccctgagaaaccagggcccccaggagagcgtggtgagaaaggaggtgctgaagaaggtgcccgaccccgtgctggaggagagcttccagcagctgcagagaaccctggccgaggagcagcacaagaaccagctgctgcaggaggagctggaggccctgcagctgcagctgagagccctggagcaggagaccagagacggcggccaggagtacgtggtgaaggaggtgctgagaatcgagcccgacagagcccaggccgacgaggtgctgcagctgagagaggagctggaggccctgagaagacagaagggcgccagagaggccgaggtgctgctgctgcagcagagagtggccgccctggccgaggagaagagcagagcccaggagaaggtgaccgagaaggaggtggtgaagctgcagaacgacccccagctggaggccgagtaccagcagctgcaggaggaccaccagagacaggaccagctgagagagaagcaggaggaggagctgagcttcctgcaggacaagctgaagagactggagaaggagagagccatggccgagggcaagatcaccgtgaaggaggtgctgaaggtggagaaggacgccgccaccgagagagaggtgagcgacctgaccagacagtacgaggacgaggccgccaaggccagagccagccagagagagaagaccgagctgctgagaaagatctgggccctggaggaggagaacgccaaggtggtggtgcaggagaaggtgagagagatcgtgagacccgaccccaaggccgagagcgaggtggccaacctgagactggagctggtggagcaggagagaaagtacagaggcgccgaggagcagctgagaagctaccagagcgagctggaggccctgagaagaagaggcccccaggtggaggtgaaggaggtgaccaaggaggtgatcaagtacaagaccgaccccgagatggagaaggagctgcagagactgagagaggagatcgtggacaagaccagactgatcgagagatgcgacctggagatctaccagctgaagaaggagatccaggccctgaaggacaccaagccccaggtgcagaccaaggaggtggtgcaggagatcctgcagttccaggaggacccccagaccaaggaggaggtggccagcctgagagccaagctgagcgaggagcagaagaagcaggtggacctggagagagagagagccagccaggaggagcagatcgccagaaaggaggaggagctgagcagagtgaaggagagagtggtgcagcaggaggtggtgagatacgaggaggagcccggcctgagagccgaggccagcgccttcgccgagagcatcgacgtggagctgagacagatcgacaagctgagagccgagctgagaagactgcagagaagaagaaccgagctggagagacagctggaggagctggagagagagagacaggccagaagagaggccgagagagaggtgcagagactgcagcagagactggccgccctggagcaggaggaggccgaggccagagagaaggtgacccacacccagaaggtggtgctgcagcaggacccccagcaggccagagagcacgccctgctgagactgcagctggaggaggagcagcacagaagacagctgctggagggcgagctggagaccctgagaagaaagctggccgccctggagaaggccgaggtgaaggagaaggtggtgctgagcgagagcgtgcaggtggagaagggcgacaccgagcaggagatccagagactgaagagcagcctggaggaggagagcagaagcaagagagagctggacgtggaggtgagcagactggaggccagactgagcgagctggagttccacaacagcaagagcagcaaggagctggacttcctgagagaggagaaccacaagctgcagctggagagacagaacctgcagctggagaccagaagactgcagagcgagatcaacatggccgccaccgagaccagagacctgagaaacatgaccgtggccgacagcggcaccaaccacgacagcagactgtggagcctggagagagagctggacgacctgaagagactgagcaaggacaaggacctggagatcgacgagctgcagaagagactgggcagcgtggccgtgaagagagagcagagagagaaccacctgagaagaagcatcgtggtgatccaccccgacaccggcagagagctgagccccgaggaggcccacagagccggcctgatcgactggaacatgttcgtgaagctgagaagccaggagtgcgactgggaggagatcagcgtgaagggccccaacggcgagagcagcgtgatccacgacagaaagagcggcaagaagttcagcatcgaggaggccctgcagagcggcagactgacccccgcccagtacgacagatacgtgaacaaggacatgagcatccaggagctggccgtgctggtgagcggccagaagtag

SEQ ID NO: 131198 - protein, 479 aa, Artificial Sequence
  derived and/or modified sequence
MGAFLDKPKTEKHNAHGAGNGLRYGLSSMQGWRVEMEDAHTAVVGIPHGLEDWSFFAVYDGHAGSRVANYCSTHLLEHITTNEDFRAAGKSGSALELSVENVKNGIRTGFLKIDEYMRNFSDLRNGMDRSGSTAVGVMISPKHIYFINCGDSRAVLYRNGQVCFSTQDHKPCNPREKERIQNAGGSVMIQRVNGSLAVSRALGDYDYKCVDGKGPTEQLVSPEPEVYEILRAEEDEFIILACDGIWDVMSNEELCEYVKSRLEVSDDLENVCNWVVDTCLHKGSRDNMSIVLVCFSNAPKVSDEAVKKDSELDKHLESRVEEIMEKSGEEGMPDLAHVMRILSAENIPNLPPGGGLAGKRNVIEAVYSRLNPHRESDGASDEAEESGSQGKLVEALRQMRINHRGNYRQLLEEMLTSYRLAKVEGEESPAEPAATATSSNSDAGNPVTMQESHTESESGLAELDSSNEDAGTKMSGEKI

SEQ ID NO: 131199 - protein, 380 aa, Artificial Sequence
  derived and/or modified sequence
MGAFLDKPKTEKHNAHGAGNGLRYGLSSMQGWRVEMEDAHTAVVGIPHGLEDWSFFAVYDGHAGSRVANYCSTHLLEHITTNEDFRAAGKSGSALELSVENVKNGIRTGFLKIDEYMRNFSDLRNGMDRSGSTAVGVMISPKHIYFINCGDSRAVLYRNGQVCFSTQDHKPCNPREKERIQNAGGSVMIQRVNGSLAVSRALGDYDYKCVDGKGPTEQLVSPEPEVYEILRAEEDEFIILACDGIWDVMSNEELCEYVKSRLEVSDDLENVCNWVVDTCLHKGSRDNMSIVLVCFSNAPKVSDEAVKKDSELDKHLESRVEEIMEKSGEEGMPDLAHVMRILSAENIPNLPPGGGLAGKRNVIEAVYSRLNPHRESDGQK

SEQ ID NO: 131200 - protein, 327 aa, Artificial Sequence
  derived and/or modified sequence
MGAFLDKPKTEKHNAHGAGNGLRYGLSSMQGWRVEMEDAHTAVVGIPHGLEDWSFFAVYDGHAGSRVANYCSTHLLEHITTNEDFRAAGKSGSALELSVENVKNGIRTGFLKIDEYMRNFSDLRNGMDRSGSTAVGVMISPKHIYFINCGDSRAVLYRNGQVCFSTQDHKPCNPREKERIQNAGGSVMIQRVNGSLAVSRALGDYDYKCVDGKGPTEQLVSPEPEVYEILRAEEDEFIILACDGIWDVMSNEELCEYVKSRLEVSDDLENVCNWVVDTCLHKGSRDNMSIVLVCFSNAPKVSDEAVKKDSELDKHLESRVEGKTNAF

SEQ ID NO: 131201 - protein, 378 aa, Artificial Sequence
  derived and/or modified sequence
MGAFLDKPKTEKHNAHGAGNGLRYGLSSMQGWRVEMEDAHTAVVGIPHGLEDWSFFAVYDGHAGSRVANYCSTHLLEHITTNEDFRAAGKSGSALELSVENVKNGIRTGFLKIDEYMRNFSDLRNGMDRSGSTAVGVMISPKHIYFINCGDSRAVLYRNGQVCFSTQDHKPCNPREKERIQNAGGSVMIQRVNGSLAVSRALGDYDYKCVDGKGPTEQLVSPEPEVYEILRAEEDEFIILACDGIWDVMSNEELCEYVKSRLEVSDDLENVCNWVVDTCLHKGSRDNMSIVLVCFSNAPKVSDEAVKKDSELDKHLESRVEEIMEKSGEEGMPDLAHVMRILSAENIPNLPPGGGLAGKRNVIEAVYSRLNPHRESDG

SEQ ID NO: 131202 - DNA, 1440 bp, Artificial Sequence
  derived and/or modified sequence
atgggagcattcctggacaaaccaaaaacggagaaacataacgctcatggggccggaaacgggctgcggtacggacttagtagtatgcagggttggagagtcgagatggaggacgctcacactgccgtggttggtatcccacatggcctggaggattggtcatttttcgcagtgtacgacgggcacgctggctcacgagtcgccaattattgttcaactcacctccttgagcacatcactaccaacgaggattttcgtgccgccgggaagagcggctccgcattggaactgagtgtggagaatgttaaaaacggcatacgtactggtttcctgaagatcgacgagtatatgcgcaatttctccgatctacgaaacggcatggacaggtcggggagcacagctgtcggcgtaatgatcagccccaaacatatctactttatcaattgcggcgacagccgtgctgtactctacaggaatgggcaggtttgcttctcgacacaagatcacaaaccgtgcaatcctagggagaaggaacggatccaaaatgcagggggtagcgtgatgatacagcgcgtcaatggaagcttagcagtgtcccgggcactgggcgactacgactacaagtgtgtagatggaaaaggaccaacggagcaacttgtttccccggagcctgaagtatatgagatcctgcgcgctgaggaagatgagtttatcattctcgcctgtgacggaatatgggacgtcatgagcaatgaggagctatgcgaatatgtcaagagcagactcgaggtgtctgacgacctggaaaacgtgtgcaactgggtagtagatacatgtctgcacaagggcagccgcgacaatatgagcatcgtactcgtgtgtttcagcaatgcaccgaaggtctcagacgaggctgtaaaaaaggacagtgagctcgacaaacacctggagagtcgggtcgaggaaataatggagaagagcggtgaagagggaatgccagaccttgctcacgtgatgagaatcttatcggccgaaaatattccaaaccttccgcctgggggcgggctggccgggaagcgcaatgtcatagaggccgtgtactccaggctgaatccgcatcgcgagtctgatggcgcttccgatgaggccgaagaaagcggcagtcaaggcaagttagtcgaggcactccgacagatgcgtattaatcacagaggtaattatagacagttactggaagaaatgttaacatcctatcgactcgcaaaagttgagggggaagaatcaccagctgagcctgctgccacggcgacctctagcaacagcgacgctggcaatcctgtgaccatgcaggagtctcacacggagtctgagtccggattagccgagctggatagcagtaacgaggacgcagggacaaagatgtccggagagaaaatttag

SEQ ID NO: 131203 - DNA, 1440 bp, Artificial Sequence
  derived and/or modified sequence
atgggcgccttcctggacaagcccaagacagagaagcacaatgcccacggggctggaaatggcctgcgctatggcctgagctccatgcagggctggagggtggagatggaggatgcccacacagctgtggtgggcatcccccacggcctggaggactggagcttctttgctgtgtatgatggccatgctggcagccgggtggccaactactgcagcacccacctgctggagcacatcaccaccaatgaagacttccgggccgccggcaagagcggcagcgccctggagctgtctgtggagaatgtgaagaatggcatcagaacaggcttcctgaagattgatgagtacatgaggaacttcagtgacctgagaaatggcatggacaggagcggcagcacagctgtgggcgtgatgatcagccccaagcacatctacttcatcaactgtggggacagcagagctgtgctgtacagaaatggccaggtgtgcttcagcacccaggaccacaagccctgcaacccccgggagaaggagcgcatccagaatgccggcggctctgtgatgatccagagggtgaatggcagcctggccgtgtcccgggccctgggggactatgactacaagtgtgtggatggcaagggccccacagagcagctggtgtccccagagcctgaggtgtatgagatcctgcgggcagaggaggatgagttcatcatcctggcctgtgatggcatctgggatgtgatgagcaatgaggagctgtgtgaatatgtgaagagccggctggaggtgtctgatgacctggagaatgtgtgcaactgggtggtggacacctgcctgcacaagggcagccgggacaacatgagcatcgtgctggtgtgcttcagcaatgcccccaaggtgtctgatgaagctgtgaagaaggacagcgagctggacaagcacctggagagccgggtggaggagatcatggagaagtctggagaggagggcatgccagacctggcccacgtgatgaggatcctgtctgctgagaacatccccaacctgcccccaggcggcggcctggccggcaagagaaatgtgattgaagctgtgtacagccggctgaacccccaccgggagagtgatggagccagtgatgaagctgaggagagcggcagccagggcaagctggtggaggccctgcggcagatgaggatcaaccaccggggcaactaccggcagctgctggaggagatgctgaccagctaccgcctggccaaggtggagggggaggagagccctgctgagcctgctgccacagccaccagcagcaacagtgatgctggcaaccctgtgaccatgcaggagagccacacagagagcgagagcggcctggccgagctggacagcagcaatgaagatgctggcaccaagatgtctggagagaagatctag

SEQ ID NO: 131204 - DNA, 1440 bp, Artificial Sequence
  derived and/or modified sequence
atgggcgccttcctggacaagcccaagaccgagaagcacaacgcccacggggccggaaatggcctgcggtacggtttaagttcaatgcaggggtggcgagttgagatggaggacgcccatactgctgtggtgggaattcctcatgggctggaagactggagcttctttgccgtgtatgatgggcacgctggctcaagagtcgcaaattactgctctacacacctcctggaacacattaccactaacgaggattttcgtgcagcgggaaaatcaggttcggctcttgaactgagcgttgagaatgtgaagaacggcatccggaccgggtttttgaaaatagacgagtatatgaggaacttcagtgacctacggaatgggatggatagaagcgggtccaccgctgtgggggttatgatctctcccaaacatatctacttcatcaattgtggagactctcgcgccgtgctgtaccgaaatggccaggtgtgttttagtacccaggaccacaagccctgtaatccaagagagaaagagcggattcaaaatgccgggggctctgtgatgatccagagagtcaatggctctctggcagtatcccgcgccttaggagattacgactacaaatgcgtggacgggaagggtcccactgagcagcttgtgagccctgaacccgaagtttacgaaattctccgggcagaggaagacgaattcatcatactggcttgtgacggcatctgggacgtgatgtcaaacgaggaactgtgcgaatacgttaagagcaggctcgaagtgagcgatgatctggaaaacgtgtgcaactgggtggtggatacatgcctccataagggctctagagataacatgtccattgtgctggtctgcttcagcaatgcccctaaggtcagcgacgaagcagtgaaaaaagacagcgagctggacaagcatttagaatctcgcgtggaggagatcatggagaagagtggtgaagaggggatgcccgacctggcccacgtgatgcgaattttatcagcagagaacattccaaatttgccccctggcggcggtctggccggaaaacggaatgttattgaggccgtgtattcgcgtctaaacccccatcgcgagagcgacggggcaagtgatgaagccgaggaatccggatcccaaggcaaactcgtggaggcattaaggcagatgcgcattaaccatcgaggaaactaccgtcagctgctggaagaaatgctgacctcctaccgcctggccaaagtcgagggggaggagtcaccagccgagccggcggccactgctacatcctcaaacagcgacgccgggaaccccgtgaccatgcaagagtcccatactgagtcagaaagcggcctggcagaactggacagcagtaacgaagacgccggcactaagatgagtggagagaaaatttag

SEQ ID NO: 131205 - DNA, 1440 bp, Artificial Sequence
  derived and/or modified sequence
atgggtgcatttcttgacaagccaaagaccgagaaacacaatgcacacggggcaggcaacggtctgcggtacggcctgtctagcatgcaggggtggcgagtcgaaatggaggacgcgcacacagccgtggtcggaattccacatggactagaagattggtctttttttgcagtgtatgacggccacgcaggcagccgggtggccaattactgttccacacatttgctggagcacattaccaccaatgaggactttagagcggcaggaaagtctggttccgcactggagttgtctgttgagaacgtcaagaacggtataaggacagggttcctcaagatcgatgagtacatgcggaatttctctgatctcagaaacggtatggaccgatccgggtccaccgccgtaggtgtgatgataagccccaagcacatatattttatcaattgcggtgactcccgcgctgtattgtacagaaacgggcaggtgtgctttagcacccaggatcacaaaccttgtaacccacgggaaaaggagcgcattcagaacgccggaggcagcgttatgatccaaagagttaatggtagtctggcagtgtcccgggctttaggcgattacgattataagtgtgttgatggcaaagggcctaccgagcagctagttagtccagagccggaggtgtacgagatcctacgggctgaagaagatgagttcataatactggcatgcgatgggatatgggacgtgatgagtaatgaggagctgtgcgagtatgtcaaaagtaggctggaggtgtccgacgatctggagaatgtttgtaattgggtagtggatacttgcctgcacaagggctcaagagacaacatgtccattgtgctcgtgtgcttctccaacgccccaaaggtatccgacgaggctgtaaagaaagattctgaacttgacaaacatttggaaagcagagtggaggaaattatggaaaagtcaggagaagagggaatgcctgacctggcacatgtgatgcgcatcctttctgccgagaacatcccgaatttgccaccgggaggcggattggctggcaaacgcaatgtgatagaagccgtgtattctaggttaaacccccatcgtgagtccgatggagctagtgacgaggcagaggagagtgggtcacagggcaaactcgttgaggctctgcgtcagatgcgcattaatcacaggggcaattaccggcagctgctggaggaaatgctgacaagctataggctggctaaagttgagggggaagaatcccctgccgagcccgctgccactgctacctcatctaattctgacgcaggaaatcccgttactatgcaggaatcgcataccgaatcagaaagcggccttgccgaactagatagttccaatgaagacgccggtacaaagatgtctggagagaagatatag

SEQ ID NO: 131206 - DNA, 2606 bp, Artificial Sequence
  derived and/or modified sequence
aaaaggagccgagcggcttctgctcaatggcggaaaagccgccggtgctctgacggcctcgttcccctagcagttgcgggggagtttcctgccggcgcggctggagtctctgattctcagggttcggtggttggaagatgctccagagagacgaggctgcggcggaggaggtggcggcggccgaatcggcaacggcgctagggtggagagaaggcggcatcggcggcggcggcggcgtgaggggccgggcggtgtaaacagccccggaggcggcggtcgagaccccgagggggaagcggcggctgagtcagggtcgcgcctccgttggaaacttgggctgagtaccgcggcgggcgcgagcgaggcgccctagacatcttctccctcccttgcctcagatttattgctaaacatgggtgcatttttggataaacccaaaactgaaaaacataatgctcatggtgctgggaatggtttacgttatggcctgagcagcatgcaaggatggagagtggaaatggaagatgcacacacagctgttgtaggtattcctcacggcttggaagactggtcattttttgcagtttatgatggtcatgctggatcccgagtggcaaattactgctcaacacatttattagaacacatcactactaacgaagactttagggcagctggaaaatcaggatctgctcttgagctttcagtggaaaatgttaagaatggtatcagaactggatttttgaaaattgatgaatacatgcgtaacttttcagacctcagaaacgggatggacaggagtggttcaactgcagtgggagttatgatttcacctaagcatatctactttatcaactgtggtgattcacgtgctgttctgtataggaatggacaagtctgcttttctacccaggatcacaaaccttgcaatccaagggaaaaggagcgaatccaaaatgcaggaggcagcgtgatgatacaacgtgttaatggttcattagcagtatctcgtgctctgggggactatgattacaagtgtgttgatggcaagggcccaacagaacaacttgtttctccagagcctgaggtttatgaaattttaagagcagaagaggatgaatttatcatcttggcttgtgatgggatctgggatgttatgagtaatgaggagctctgtgaatatgttaaatctaggcttgaggtatctgatgacctggaaaatgtgtgcaattgggtagtggacacttgtttacacaagggaagtcgagataacatgagtattgtactagtttgcttttcaaatgctcccaaggtctcagatgaagcggtgaaaaaagattcagagttggataagcacttggaatcacgggttgaagagattatggagaagtctggcgaggaaggaatgcctgatcttgcccatgtcatgcgcatcttgtctgcagaaaatatcccaaatttgcctcctgggggaggtcttgctggcaagcgtaatgttattgaagctgtttatagtagactgaatccacatagagaaagtgatggggcctccgatgaagcagaggaaagtggatcacagggaaaattggtggaagctctcaggcaaatgagaattaatcataggggaaactaccgacaacttctggaggagatgctgactagttacaggctagctaaagtagagggagaagaaagccctgctgaaccagctgccacagctacttcttcgaacagtgatgctggaaacccagtgacaatgcaggaaagccatactgaatcagaaagtggtcttgctgaattagacagctctaatgaagatgcagggacaaagatgagtggtgaaaaaatatgactttcctttttggtaatatttttgtgatctttgatggtttttaacctaggaagtgtaatgtatgcatttatataactgttttgttatttgaatcttggaaaactagttttattatattcagatagccttgttttttaaaaaggcctttgcatacacctttatgagatagtgtaaaattgactatttatagtactatggatttaatgaaattatatgtcatttcacattgtatgccagaaattaggctaccaattatgaattaaagtcagtagttaaattaatactagatagaattagaaattttgattagagagattatgctatattatggaaaaacttgttaatgtagaattatactgcttcatattattttacctattagtacactcatagttagctttgtaataaatttatgttttctttaataattttagttcttcaaagaatggctgatgctggcctgtaatttttctttcaaggatgataatttgtgtgttgtttgatttgtttatattttacatctctgtagttttatttttagaagttgtgagatattggatgtgtggctatttttcctttctctgtattctttatgaaacataacttttgaaaaacctatgtattattcatacagctttggtttgtatattctgtatagcctaactacacacatcaaaatgtatgtcaaccaagtgtttagaatgaaattataagtgtttaagtccaaataaagcatgtgatgtggaataatcta

SEQ ID NO: 131207 - DNA, 1713 bp, Artificial Sequence
  derived and/or modified sequence
aaaagccgccggtgctctgacggcctcgttcccctagcagttgcgggggagtttcctgccggcgcggctggagtctctgattctcagggttcggtggttggaagatgctccagagagacgaggctgcggcggaggaggtggcggcggccgaatcggcaacggcgctagggtggagagaaggcggcatcggcggcggcggcggcgtgaggggccgggcggtgtaaacagccccggaggcggcggtcgagaccccgagggggaagcggcggctgagtcagggtcgcgcctccgttggaaacttgggctgagtaccgcggcgggcgcgagcgaggcgccctagacatcttctccctcccttgcctcagggaagtcgagataacatgagtattgtactagtttgcttttcaaatgctcccaaggtctcagatgaagcggtgaaaaaagattcagagttggataagcacttggaatcacgggttgaagagattatggagaagtctggcgaggaaggaatgcctgatcttgcccatgtcatgcgcatcttgtctgcagaaaatatcccaaatttgcctcctgggggaggtcttgctggcaagcgtaatgttattgaagctgtttatagtagactgaatccacatagagaaagtgatggggcctccgatgaagcagaggaaagtggatcacagggaaaattggtggaagctctcaggcaaatgagaattaatcataggggaaactaccgacaacttctggaggagatgctgactagttacaggctagctaaagtagagggagaagaaagccctgctgaaccagctgccacagctacttcttcgaacagtgatgctggaaacccagtgacaatgcaggaaagccatactgaatcagaaagtggtcttgctgaattagacagctctaatgaagatgcagggacaaagatgagtggtgaaaaaatatgactttcctttttggtaatatttttgtgatctttgatggtttttaacctaggaagtgtaatgtatgcatttatataactgttttgttatttgaatcttggaaaactagttttattatattcagatagccttgttttttaaaaaggcctttgcatacacctttatgagatagtgtaaaattgactatttatagtactatggatttaatgaaattatatgtcatttcacattgtatgccagaaattaggctaccaattatgaattaaagtcagtagttaaattaatactagatagaattagaaattttgattagagagattatgctatattatggaaaaacttgttaatgtagaattatactgcttcatattattttacctattagtacactcatagttagctttgtaataaatttatgttttctttaataattttagttcttcaaagaatggctgatgctggcctgtaatttttctttcaaggatgataatttgtgtgttgtttgatttgtttatattttacatctctgtagttttatttttagaagttgtgagatattggatgtgtggctatttttcctttctctgtattctttatgaaacataacttttgaaaaacctatgtattattcatacagctttggtttgtatattctgtatagcctaactacacacatcaaaatgtatgtcaaccaagtgtttagaatgaaattataagtgtttaagtccaaataaagcatgtgatgtggaataatcta

SEQ ID NO: 131208 - DNA, 1440 bp, Artificial Sequence
  derived and/or modified sequence
atgggcgccttcctggacaagcccaagaccgagaagcacaacgcccacggcgccggcaacggcctgagatacggcctgagcagcatgcagggctggagagtggagatggaggacgcccacaccgccgtggtgggcatcccccacggcctggaggactggagcttcttcgccgtgtacgacggccacgccggcagcagagtggccaactactgcagcacccacctgctggagcacatcaccaccaacgaggacttcagagccgccggcaagagcggcagcgccctggagctgagcgtggagaacgtgaagaacggcatcagaaccggcttcctgaagatcgacgagtacatgagaaacttcagcgacctgagaaacggcatggacagaagcggcagcaccgccgtgggcgtgatgatcagccccaagcacatctacttcatcaactgcggcgacagcagagccgtgctgtacagaaacggccaggtgtgcttcagcacccaggaccacaagccctgcaaccccagagagaaggagagaatccagaacgccggcggcagcgtgatgatccagagagtgaacggcagcctggccgtgagcagagccctgggcgactacgactacaagtgcgtggacggcaagggccccaccgagcagctggtgagccccgagcccgaggtgtacgagatcctgagagccgaggaggacgagttcatcatcctggcctgcgacggcatctgggacgtgatgagcaacgaggagctgtgcgagtacgtgaagagcagactggaggtgagcgacgacctggagaacgtgtgcaactgggtggtggacacctgcctgcacaagggcagcagagacaacatgagcatcgtgctggtgtgcttcagcaacgcccccaaggtgagcgacgaggccgtgaagaaggacagcgagctggacaagcacctggagagcagagtggaggagatcatggagaagagcggcgaggagggcatgcccgacctggcccacgtgatgagaatcctgagcgccgagaacatccccaacctgccccccggcggcggcctggccggcaagagaaacgtgatcgaggccgtgtacagcagactgaacccccacagagagagcgacggcgccagcgacgaggccgaggagagcggcagccagggcaagctggtggaggccctgagacagatgagaatcaaccacagaggcaactacagacagctgctggaggagatgctgaccagctacagactggccaaggtggagggcgaggagagccccgccgagcccgccgccaccgccaccagcagcaacagcgacgccggcaaccccgtgaccatgcaggagagccacaccgagagcgagagcggcctggccgagctggacagcagcaacgaggacgccggcaccaagatgagcggcgagaagatctag

SEQ ID NO: 131209 - protein, 330 aa, Artificial Sequence
  derived and/or modified sequence
MSDSEKLNLDSIIGRLLEVQGSRPGKNVQLTENEIRGLCLKSREIFLSQPILLELEAPLKICGDIHGQYYDLLRLFEYGGFPPESNYLFLGDYVDRGKQSLETICLLLAYKIKYPENFFLLRGNHECASINRIYGFYDECKRRYNIKLWKTFTDCFNCLPIAAIVDEKIFCCHGGLSPDLQSMEQIRRIMRPTDVPDQGLLCDLLWSDPDKDVQGWGENDRGVSFTFGAEVVAKFLHKHDLDLICRAHQVVEDGYEFFAKRQLVTLFSAPNYCGEFDNAGAMMSVDETLMCSFQILKPADKNKGKYGQFSGLNPGGRPITPPRNSAKAKK

SEQ ID NO: 131210 - protein, 414 aa, Artificial Sequence
  derived and/or modified sequence
MRQRADRRSMVSTSGAATASSAAGPSRGAAHSPSSAPHASRHRPPFSSRATGLLQQRQHCVHHCTQLCPRVQTPCLPPPPAPATELHSYLQQGGERGLLDTTPGTAGWGTSATGAVQGSRPGKNVQLTENEIRGLCLKSREIFLSQPILLELEAPLKICGDIHGQYYDLLRLFEYGGFPPESNYLFLGDYVDRGKQSLETICLLLAYKIKYPENFFLLRGNHECASINRIYGFYDECKRRYNIKLWKTFTDCFNCLPIAAIVDEKIFCCHGGLSPDLQSMEQIRRIMRPTDVPDQGLLCDLLWSDPDKDVQGWGENDRGVSFTFGAEVVAKFLHKHDLDLICRAHQVVEDGYEFFAKRQLVTLFSAPNYCGEFDNAGAMMSVDETLMCSFQILKPADKNKGKYGQFSGLNPGGR

SEQ ID NO: 131211 - DNA, 993 bp, Artificial Sequence
  derived and/or modified sequence
atgagtgacagtgaaaaattgaacctggatagcattataggcaggctgttagaagtgcagggatcacgacctgggaagaatgtccagttaacagaaaacgaaattaggggcttgtgtctcaaaagtcgcgagatattcttatcccagcctattttactggagctggaggcccctctcaaaatttgcggtgatattcacggacagtactacgacctccttcgcttatttgaatacggcggtttcccacccgagtccaattatctatttctgggagactatgtcgacagggggaagcagtcattggaaactatctgtttattgctagcttataagataaagtatccagagaactttttcttgttgcgcgggaaccatgagtgtgcctcaatcaaccggatctatggcttttatgacgaatgcaagcgcaggtacaacatcaagttatggaagaccttcacagattgtttcaattgccttcccatagccgcgatcgtcgacgagaaaattttctgctgtcatggcggactgagccccgatctgcaatcaatggaacaaatcagacgcatcatgcgcccaactgacgtgcccgatcagggactcctgtgcgacctcctctggtcagatcctgataaagatgtccagggatggggtgagaacgatcgtggtgttagctttacttttggagcggaagtagtggccaaatttctgcataaacacgatctcgatctaatctgtagagcccatcaggtggtggaagatggctacgaatttttcgccaagcgtcaactggtaactttattctcagcccccaattactgcggcgaattcgacaacgctggggctatgatgtcagtggacgagacattgatgtgttccttccagattctgaagcctgctgataagaataagggaaagtatggccagttcagcggcctgaacccgggagggagacccatcacacctcctcgcaactcagcaaaagcaaaaaagtag

SEQ ID NO: 131212 - DNA, 1245 bp, Artificial Sequence
  derived and/or modified sequence
atgcgccaacgggccgacagacggtctatggtatcaacaagtggagctgcaacagccagttctgcagccggaccttctagaggcgctgctcacagtccatctagtgctccgcacgcctcgaggcaccgccctccctttagttcccgtgccacagggctgttgcagcaacgtcagcattgtgtgcaccattgcactcagctctgccctagagttcagactccttgcctccctccaccccccgccccagccaccgagcttcacagctacctccagcagggcggggagcgcggcttgctggatacaacccctggaaccgcgggttggggcacatccgctaccggcgcagtgcagggctctcgtccaggcaaaaacgtgcaactcacagagaatgaaattagaggactgtgcttaaaatctcgcgaaatctttttgagccaacccatcctactggagctcgaggccccactgaaaatctgtggagacattcatgggcagtattacgacttgctgcgtcttttcgaatacgggggctttcctccggaatccaactacctgttcctgggcgactacgtggaccggggaaaacagagtctcgagaccatctgtctgctgctcgcctacaagattaagtatcccgagaacttttttctgctgcgcgggaaccatgagtgcgcctcaattaatcgaatctacggtttttacgacgagtgcaagcgcagatacaacatcaagctctggaagacattcaccgattgcttcaactgtctccctattgctgccatcgtcgatgagaagattttctgttgtcacggtggcttgagcccggatctccagagcatggaacagatcagaaggatcatgcgacccactgacgtcccggatcagggcctgctgtgcgatctgctgtggtccgaccccgataaagacgttcaaggctggggtgaaaacgaccgcggagtcagctttacgttcggtgctgaagtagtcgctaaattccttcacaagcatgatctcgatctgatttgcagggctcaccaagtcgtcgaggatgggtacgagttctttgcgaagaggcagctggtaacgctgttctccgctcctaactattgtggggaatttgacaacgccggtgcaatgatgagcgttgacgaaaccctcatgtgctccttccagatcctgaaaccagctgacaaaaacaaaggtaaatacggccaatttagcgggctcaatcctggaggtcgatag

SEQ ID NO: 131213 - DNA, 993 bp, Artificial Sequence
  derived and/or modified sequence
atgtctgacagcgagaagctgaacctggacagcatcatcggccgcctgctggaggtgcagggcagcaggcctgggaagaatgtgcagctgacagaaaatgagatccggggcctgtgcctgaagagccgggagatcttcctgagccagcccatcctgctggagctggaggcccccctgaagatctgtggggacatccacggccagtactatgacctgctgcggctgtttgaatatggaggcttccccccagagagcaactacctgttcctgggggactatgtggaccggggcaagcagagcctggagaccatctgcctgctgctggcctacaagatcaagtacccagagaacttcttcctgctgcggggcaaccatgaatgtgccagcatcaaccgcatctacggcttctatgatgagtgcaagaggcgctacaacatcaagctgtggaagaccttcacagactgcttcaactgcctgcccatcgccgccatcgtggatgagaagatcttctgctgccacggcggcctgagcccagacctgcagagcatggagcagatccgccgcatcatgaggcccacagatgtgcctgaccagggcctgctgtgtgacctgctgtggagcgaccctgacaaggatgtgcagggctggggagaaaatgaccggggcgtgtccttcacctttggagctgaggtggtggccaagttcctgcacaagcatgacctggacctgatctgccgggcccaccaggtggtggaggatggctatgagttctttgccaagaggcagctggtgaccctcttcagcgcccccaactactgtggggagtttgacaatgctggggccatgatgtctgtggatgagaccctgatgtgcagcttccagatcctgaagccagctgacaagaacaagggcaagtatggccagttcagcggcctgaaccctgggggccggcccatcaccccaccaagaaattctgccaaggccaagaagtag

SEQ ID NO: 131214 - DNA, 1245 bp, Artificial Sequence
  derived and/or modified sequence
atgaggcagagagctgacagaagatccatggtgtccaccagcggggccgccacagccagcagcgctgctggccccagcagaggagctgcccacagccccagcagcgccccccacgccagccgccaccggccccccttcagcagccgggccaccggcctgctgcagcagaggcagcactgtgtgcaccactgcacccagctgtgcccccgggtgcagaccccctgcctgcccccacctccagccccagccacagagctgcacagctacctgcagcagggcggggagcggggcctgctggacaccaccccaggcacagctggctggggcaccagcgccactggagctgtgcagggcagcaggcctgggaagaatgtgcagctgacagaaaatgagatccggggcctgtgcctgaagagccgggagatcttcctgagccagcccatcctgctggagctggaggcccccctgaagatctgtggggacatccacggccagtactatgacctgctgcggctgtttgaatatggaggcttccccccagagagcaactacctgttcctgggggactatgtggaccggggcaagcagagcctggagaccatctgcctgctgctggcctacaagatcaagtacccagagaacttcttcctgctgcggggcaaccatgaatgtgccagcatcaaccgcatctacggcttctatgatgagtgcaagaggcgctacaacatcaagctgtggaagaccttcacagactgcttcaactgcctgcccatcgccgccatcgtggatgagaagatcttctgctgccacggcggcctgagcccagacctgcagagcatggagcagatccgccgcatcatgaggcccacagatgtgcctgaccagggcctgctgtgtgacctgctgtggagcgaccctgacaaggatgtgcagggctggggagaaaatgacagaggagtgtccttcaccttcggggctgaggtggtggccaagttcctgcacaagcatgacctggacctgatctgccgggcccaccaggtggtggaggatggctatgagttctttgccaagaggcagctggtgaccctcttcagcgcccccaactactgtggggagtttgacaatgctggggccatgatgtctgtggatgagaccctgatgtgcagcttccagatcctgaagccagctgacaagaacaagggcaagtatggccagttcagcggcctgaaccctgggggccgctag

SEQ ID NO: 131215 - DNA, 993 bp, Artificial Sequence
  derived and/or modified sequence
atgagcgacagcgagaagctgaacctggacagcatcatcggccggttgttggaggtccaggggagtaggcccgggaaaaatgttcaactcaccgaaaatgagatcaggggcttgtgcttgaagtcccgcgaaattttcttgtctcaaccaatactgctggagcttgaagcccctctgaagatttgcggagacatccacggccagtactacgatttgctccggctgttcgaatacggtggcttcccgcctgagagcaattatttgtttctgggcgactacgttgacagaggaaagcagagcctcgagacgatttgcctgcttctggcatacaaaatcaagtatccagagaacttctttcttcttcgtgggaatcatgaatgcgcctccatcaacagaatatatggcttctacgacgaatgcaaaaggaggtataatattaagctctggaaaacattcactgactgctttaattgcctgcctatagcggcaatcgtagacgagaaaatcttttgctgccacggcggactgtcaccagacttgcagtctatggaacagattaggcgaataatgcgacctactgacgtcccagatcaaggcttactgtgcgacctattatggagcgacccagacaaggatgtccagggatggggcgaaaatgatcggggggtgtccttcactttcggggcagaagtagtcgctaaatttctccataaacacgatttagacctcatttgtcgtgcccaccaggtcgtcgaagacggatacgagttcttcgcgaagagacaactggttacattgttcagcgctcctaactattgcggcgagttcgataacgctggggccatgatgtcggttgatgagacattaatgtgcagctttcagattctaaagcccgccgacaaaaacaagggtaaatatgggcagttctccggcctgaaccccggcggaagacctataacaccaccacggaatagcgctaaagccaaaaagtag

SEQ ID NO: 131216 - DNA, 1245 bp, Artificial Sequence
  derived and/or modified sequence
atgcggcagcgggccgaccggcggagcatggtgagcaccagcggcgcagccaccgccagcagcgctgcgggtccaagcagaggagcagcgcacagcccttcctctgcacctcacgcctctcggcatcgcccgccgttctcatctagggccacagggctgctgcagcagcgccagcattgcgtgcaccattgtacccagctatgccctcgcgtgcaaaccccatgtttgccaccacctcctgccccagccaccgaactgcactcttatctgcagcaggggggtgaaagaggcctcctggacacaacacccggcaccgccggctgggggacgtcagctaccggcgctgtccaaggcagccggcctggcaagaatgtgcaattgacggagaacgagatacgagggctgtgcttgaaatcccgggagattttcctgtcacagccaatactgcttgagctagaagcaccgctgaagatctgcggagacatacatggccagtactacgaccttctgcgtcttttcgagtatggaggttttcccccagagtccaactatctattccttggtgactatgtggacagaggcaagcaatcactcgagacaatttgcctgctgctcgcatataaaatcaagtacccagaaaacttttttttgctcagagggaaccacgagtgcgccagtattaaccgtatctatgggttctacgacgaatgtaaacgccgctataatatcaaactgtggaagactttcacagattgctttaactgcctgcccatagcggcgatcgtagacgagaaaatcttctgctgccatggtggcctgtcgcccgacctgcagtcaatggaacagatcaggcgtataatgcgcccaacagatgtgcccgaccagggacttctctgcgacctgctgtggtccgatccagataaagacgtgcagggatggggggaaaatgaccggggggtctcctttactttcggggcggaagttgtggccaaatttttgcataaacatgatctggatctgatttgtagggcccatcaagtggtagaggacggttacgagtttttcgcaaagagacaactagtgaccctgttctccgctcctaactactgtggcgaattcgacaacgcaggcgcaatgatgtccgtggacgagacgctgatgtgctccttccaaatactcaaaccggctgacaagaacaaggggaagtacggccagttctccggcctgaatcccggagggagatag

SEQ ID NO: 131217 - DNA, 993 bp, Artificial Sequence
  derived and/or modified sequence
atgtcagattcagagaagctcaacctggatagtattatcggacgcctcctcgaagtacagggttctcgacccggtaagaacgtacagttgactgaaaacgagattcgaggcctttgtctaaagtcccgcgaaatttttctctcgcagcccatcctgctcgaattagaggcacccctgaagatctgcggggatattcacgggcagtattacgacttgctccgactttttgagtacgggggtttcccaccggaatccaactatcttttcctgggcgattatgtggatcgcggaaagcagtccctcgaaacaatctgcttactgctagcgtacaagattaagtaccctgagaatttttttcttctgcgtgggaaccacgaatgcgcttccattaatcggatatacggcttctacgatgagtgcaagagacgatacaatatcaagctgtggaagacctttaccgattgcttcaactgtctgccaatcgccgctattgtagacgagaaaatcttctgttgccatggcggtctgtcacctgacctccagagcatggagcagatcagacggatcatgcggccaactgacgtgccggatcaggggctcctgtgcgatctgctctggtcggatcctgacaaggacgtgcagggttggggtgaaaacgacaggggagtgtcattcaccttcggggctgaagtggtggcgaaattcctccataagcatgatctcgacctgatatgcagagctcaccaggtggttgaggacggatacgagtttttcgccaaaaggcaactggttacgctgttctctgctcctaattactgcggggagtttgacaacgccggtgcaatgatgtctgttgacgagaccctaatgtgctctttccagatactgaagcccgctgataagaataagggtaaatatggccaattctcaggcctgaatcccggtggacggccaattaccccgcctagaaactctgctaaagccaaaaaatag

SEQ ID NO: 131218 - DNA, 1245 bp, Artificial Sequence
  derived and/or modified sequence
atgcggcagcgggctgacagacggagcatggtgtccacatcaggcgctgctaccgcttccagtgccgcaggaccaagtcgaggagccgctcattccccaagctcagcaccgcatgccagccggcacaggcctcctttcagcagcagggccaccggcctgctgcagcaacgccagcactgtgtccaccactgcacacagctctgtccaagagtccaaaccccctgtctacctccccctccagcccctgccactgaactccacagttatctacagcagggcggtgagagaggcttgctggacactactcctggaaccgctggttggggtactagcgctactggtgccgttcaaggttcccgcccaggcaaaaacgtgcagctgactgagaatgagataaggggcctgtgtctgaagtcccgggaaatctttcttagtcagcccatattgctcgagcttgaggcccctttgaaaatctgcggcgacatccacggccagtattatgatttgctgcggttattcgaatatggagggtttccgcctgagtcaaactatctgttcttaggtgattacgtagaccgcggaaagcagtccctggagactatatgcctgctgctcgcttacaagatcaaatatccggagaattttttcctgctgcggggtaaccatgagtgcgcctcgatcaatagaatttatgggttttacgatgagtgcaagaggaggtataacattaagctgtggaagacttttactgactgctttaattgtttaccaattgcagctatcgtggatgagaagattttttgttgccacgggggtctgtcacccgacttacagtccatggagcagatccgccgaatcatgcgtccaactgacgtgcctgaccagggcttactctgtgatttgctgtggagtgatccggacaaggacgtacagggttggggagagaatgaccggggtgtttcctttaccttcggcgcagaagtggtggctaaatttcttcacaagcatgatctagacctgatttgccgggctcatcaggttgtggaggacgggtacgaatttttcgctaaacgccagctggtgactcttttttcagctccgaactattgcggagagtttgataatgccggagccatgatgtccgttgacgagactttgatgtgctctttccagatcctgaaaccagccgacaagaataaggggaaatacggccagttttccggtctgaaccccggtggcaggtag

SEQ ID NO: 131219 - DNA, 1476 bp, Artificial Sequence
  derived and/or modified sequence
gcggggcgggcccgggaggcctggaggcggggccgcgggccgggggcggactggggcgggcggaaggagagccaggccggaaggaggctgccggagggcgggaggcaggagcgggccaggagctgctgggctggagcggcggcgccgccatgtccgacagcgagaagctcaacctggactcgatcatcgggcgcctgctggaagtgcagggctcgcggcctggcaagaatgtacagctgacagagaacgagatccgcggtctgtgcctgaaatcccgggagatttttctgagccagcccattcttctggagctggaggcacccctcaagatctgcggtgacatacacggccagtactacgaccttctgcgactatttgagtatggcggtttccctcccgagagcaactacctctttctgggggactatgtggacaggggcaagcagtccttggagaccatctgcctgctgctggcctataagatcaagtaccccgagaacttcttcctgctccgtgggaaccacgagtgtgccagcatcaaccgcatctatggtttctacgatgagtgcaagagacgctacaacatcaaactgtggaaaaccttcactgactgcttcaactgcctgcccatcgcggccatagtggacgaaaagatcttctgctgccacggaggcctgtccccggacctgcagtctatggagcagattcggcggatcatgcggcccacagatgtgcctgaccagggcctgctgtgtgacctgctgtggtctgaccctgacaaggacgtgcagggctggggcgagaacgaccgtggcgtctcttttacctttggagccgaggtggtggccaagttcctccacaagcacgacttggacctcatctgccgagcacaccaggtggtagaagacggctacgagttctttgccaagcggcagctggtgacacttttctcagctcccaactactgtggcgagtttgacaatgctggcgccatgatgagtgtggacgagaccctcatgtgctctttccagatcctcaagcccgccgacaagaacaaggggaagtacgggcagttcagtggcctgaaccctggaggccgacccatcaccccaccccgcaattccgccaaagccaagaaatagcccccgcacaccaccctgtgccccagatgatggattgattgtacagaaatcatgctgccatgctgggggggggtcaccccgacccctcaggcccacctgtcacggggaacatggagccttggtgtatttttcttttctttttttaatgaatcaatagcagcgtccagtcccccagggctgcttcctgcctgcacctgcggtgactgtgagcaggatcctggggccgaggctgcagctcagggcaacggcaggccaggtcgtgggtctccagccgtgcttggcctcagggctggcagccggatcctggggcaacccatctggtctcttgaataaa

SEQ ID NO: 131220 - DNA, 1685 bp, Artificial Sequence
  derived and/or modified sequence
cttcttgctgacgccgccagcgccgaccaccagcagctgttttccctccatgaggcagcgcgccgaccgccgaagcatggtctccaccagcggcgccgccaccgcctcgtcggccgccggccccagccgcggcgcggcccacagcccctccagcgcgccgcacgcctccagacacaggccgccgttcagctccagggccactgggcttctccagcagcgccagcactgtgtccaccactgcacccagctctgcccgcgggtgcagacgccatgcctgccgcccccgccagcgccagccactgagcttcacagctacctgcagcaaggaggggaaaggggcctcctggacaccaccccaggtactgcagggtggggcacttccgccacaggagccgtgcagggctcgcggcctggcaagaatgtacagctgacagagaacgagatccgcggtctgtgcctgaaatcccgggagatttttctgagccagcccattcttctggagctggaggcacccctcaagatctgcggtgacatacacggccagtactacgaccttctgcgactatttgagtatggcggtttccctcccgagagcaactacctctttctgggggactatgtggacaggggcaagcagtccttggagaccatctgcctgctgctggcctataagatcaagtaccccgagaacttcttcctgctccgtgggaaccacgagtgtgccagcatcaaccgcatctatggtttctacgatgagtgcaagagacgctacaacatcaaactgtggaaaaccttcactgactgcttcaactgcctgcccatcgcggccatagtggacgaaaagatcttctgctgccacggaggcctgtccccggacctgcagtctatggagcagattcggcggatcatgcggcccacagatgtgcctgaccagggcctgctgtgtgacctgctgtggtctgaccctgacaaggacgtgcagggctggggcgagaacgaccgtggcgtctcttttacctttggagccgaggtggtggccaagttcctccacaagcacgacttggacctcatctgccgagcacaccaggtggtagaagacggctacgagttctttgccaagcggcagctggtgacacttttctcagctcccaactactgtggcgagtttgacaatgctggcgccatgatgagtgtggacgagaccctcatgtgctctttccagatcctcaagcccgccgacaagaacaaggggaagtacgggcagttcagtggcctgaaccctggaggccgacccatcaccccaccccgcaattccgccaaagccaagaaatagcccccgcacaccaccctgtgccccagatgatggattgattgtacagaaatcatgctgccatgctgggggggggtcaccccgacccctcaggcccacctgtcacggggaacatggagccttggtgtatttttcttttctttttttaatgaatcaatagcagcgtccagtcccccagggctgcttcctgcctgcacctgcggtgactgtgagcaggatcctggggccgaggctgcagctcagggcaacggcaggccaggtcgtgggtctccagccgtgcttggcctcagggctggcagccggatcctggggcaacccatctggtctcttgaataaaggtcaaagctggattctc

SEQ ID NO: 131221 - DNA, 993 bp, Artificial Sequence
  derived and/or modified sequence
atgagcgacagcgagaagctgaacctggacagcatcatcggcagactgctggaggtgcagggcagcagacccggcaagaacgtgcagctgaccgagaacgagatcagaggcctgtgcctgaagagcagagagatcttcctgagccagcccatcctgctggagctggaggcccccctgaagatctgcggcgacatccacggccagtactacgacctgctgagactgttcgagtacggcggcttcccccccgagagcaactacctgttcctgggcgactacgtggacagaggcaagcagagcctggagaccatctgcctgctgctggcctacaagatcaagtaccccgagaacttcttcctgctgagaggcaaccacgagtgcgccagcatcaacagaatctacggcttctacgacgagtgcaagagaagatacaacatcaagctgtggaagaccttcaccgactgcttcaactgcctgcccatcgccgccatcgtggacgagaagatcttctgctgccacggcggcctgagccccgacctgcagagcatggagcagatcagaagaatcatgagacccaccgacgtgcccgaccagggcctgctgtgcgacctgctgtggagcgaccccgacaaggacgtgcagggctggggcgagaacgacagaggcgtgagcttcaccttcggcgccgaggtggtggccaagttcctgcacaagcacgacctggacctgatctgcagagcccaccaggtggtggaggacggctacgagttcttcgccaagagacagctggtgaccctgttcagcgcccccaactactgcggcgagttcgacaacgccggcgccatgatgagcgtggacgagaccctgatgtgcagcttccagatcctgaagcccgccgacaagaacaagggcaagtacggccagttcagcggcctgaaccccggcggcagacccatcaccccccccagaaacagcgccaaggccaagaagtag

SEQ ID NO: 131222 - DNA, 1245 bp, Artificial Sequence
  derived and/or modified sequence
atgagacagagagccgacagaagaagcatggtgagcaccagcggcgccgccaccgccagcagcgccgccggccccagcagaggcgccgcccacagccccagcagcgccccccacgccagcagacacagaccccccttcagcagcagagccaccggcctgctgcagcagagacagcactgcgtgcaccactgcacccagctgtgccccagagtgcagaccccctgcctgccccccccccccgcccccgccaccgagctgcacagctacctgcagcagggcggcgagagaggcctgctggacaccacccccggcaccgccggctggggcaccagcgccaccggcgccgtgcagggcagcagacccggcaagaacgtgcagctgaccgagaacgagatcagaggcctgtgcctgaagagcagagagatcttcctgagccagcccatcctgctggagctggaggcccccctgaagatctgcggcgacatccacggccagtactacgacctgctgagactgttcgagtacggcggcttcccccccgagagcaactacctgttcctgggcgactacgtggacagaggcaagcagagcctggagaccatctgcctgctgctggcctacaagatcaagtaccccgagaacttcttcctgctgagaggcaaccacgagtgcgccagcatcaacagaatctacggcttctacgacgagtgcaagagaagatacaacatcaagctgtggaagaccttcaccgactgcttcaactgcctgcccatcgccgccatcgtggacgagaagatcttctgctgccacggcggcctgagccccgacctgcagagcatggagcagatcagaagaatcatgagacccaccgacgtgcccgaccagggcctgctgtgcgacctgctgtggagcgaccccgacaaggacgtgcagggctggggcgagaacgacagaggcgtgagcttcaccttcggcgccgaggtggtggccaagttcctgcacaagcacgacctggacctgatctgcagagcccaccaggtggtggaggacggctacgagttcttcgccaagagacagctggtgaccctgttcagcgcccccaactactgcggcgagttcgacaacgccggcgccatgatgagcgtggacgagaccctgatgtgcagcttccagatcctgaagcccgccgacaagaacaagggcaagtacggccagttcagcggcctgaaccccggcggcagatag

SEQ ID NO: 131223 - protein, 323 aa, Artificial Sequence
  derived and/or modified sequence
MADLDKLNIDSIIQRLLEVRGSKPGKNVQLQENEIRGLCLKSREIFLSQPILLELEAPLKICGDIHGQYYDLLRLFEYGGFPPESNYLFLGDYVDRGKQSLETICLLLAYKIKYPENFFLLRGNHECASINRIYGFYDECKRRYNIKLWKTFTDCFNCLPIAAIVDEKIFCCHGGLSPDLQSMEQIRRIMRPTDVPDQGLLCDLLWSDPDKDVLGWGENDRGVSFTFGAEVVAKFLHKHDLDLICRAHQVVEDGYEFFAKRQLVTLFSAPNYCGEFDNAGAMMSVDETLMCSFQILKPAEKKKPNATRPVTPPRGMITKQAKK

SEQ ID NO: 131224 - protein, 332 aa, Artificial Sequence
  derived and/or modified sequence
MFLPLYLNLVLYFVFWLHWTNCDFSLAVRGSKPGKNVQLQENEIRGLCLKSREIFLSQPILLELEAPLKICGDIHGQYYDLLRLFEYGGFPPESNYLFLGDYVDRGKQSLETICLLLAYKIKYPENFFLLRGNHECASINRIYGFYDECKRRYNIKLWKTFTDCFNCLPIAAIVDEKIFCCHGGLSPDLQSMEQIRRIMRPTDVPDQGLLCDLLWSDPDKDVLGWGENDRGVSFTFGAEVVAKFLHKHDLDLICRAHQVVEDGYEFFAKRQLVTLFSAPNYCGEFDNAGAMMSVDETLMCSFQILKPAEKKKPNATRPVTPPRGMITKQAKK

SEQ ID NO: 131225 - protein, 141 aa, Artificial Sequence
  derived and/or modified sequence
MEQIRRIMRPTDVPDQGLLCDLLWSDPDKDVLGWGENDRGVSFTFGAEVVAKFLHKHDLDLICRAHQVVEDGYEFFAKRQLVTLFSAPNYCGEFDNAGAMMSVDETLMCSFQILKPAEKKKPNATRPVTPPRGMITKQAKK

SEQ ID NO: 131226 - DNA, 972 bp, Artificial Sequence
  derived and/or modified sequence
atggctgatcttgacaagttgaacatcgatagcattatccaaaggttactagaggtccgcgggtccaaaccaggcaagaacgtgcagctccaggaaaacgagattagagggctgtgcctgaagagtagggaaatttttctatctcagcccatcctcctggagctcgaggctccgctgaagatttgtggagacattcatgggcagtactatgaccttttgcgcctctttgagtacggcggatttcctcctgagagtaattatttatttctgggggattacgtcgatcggggcaagcagtcccttgaaaccatatgtttgttattagcatacaaaatcaaatatcctgagaacttttttctcctgagaggaaaccacgaatgcgcctcaattaataggatttacggcttttatgatgagtgcaagagacgatacaatataaaactctggaagactttcacagactgtttcaattgcctgccaatagctgctattgtcgatgagaagatcttttgctgccacgggggactgagtcccgacctccagagcatggagcagatcagacgcataatgcgccccactgatgtgccagatcaagggctgctgtgtgatctattatggagtgatcccgataaggacgtgctcgggtggggagagaacgaccgcggagtctccttcacatttggagccgaggtggttgcgaaattccttcataagcacgatttggatcttatttgcagagcccatcaagtcgtggaagacgggtacgagttcttcgctaagaggcaactggtgacgttattttcagcaccaaattactgtggagaatttgacaacgccggtgccatgatgtctgttgatgagaccctcatgtgctcgttccagattctcaaacccgcagagaaaaagaaaccgaacgctacaagacccgtgactcctcctagagggatgattactaaacaggctaaaaagtag

SEQ ID NO: 131227 - DNA, 999 bp, Artificial Sequence
  derived and/or modified sequence
atgtttctgcccctatacctgaatcttgtactgtacttcgtcttttggttgcattggacaaattgtgatttctccctggctgtcagaggatctaagccgggaaaaaacgtacagctgcaggagaatgaaattagaggcctgtgtctcaaatctcgggaaatattcctatcacagccgatcctgctggagctggaagccccactgaaaatctgtggcgacatccatggtcagtattatgacctgttgaggctgttcgagtacggaggattcccacccgagtctaattatttattcctgggggactatgtggaccgcggaaaacagagcctcgaaacaatttgcctgctgctggcctataagattaaatacccggaaaacttcttcctgttacgaggcaaccacgaatgcgccagtataaatagaatttatggattttacgatgagtgtaagaggagatacaacatcaagctctggaaaacttttactgattgctttaactgtctccctatcgctgctattgtggacgagaagatcttctgttgccatggcggactttcacccgacctccaatccatggaacaaattcgccgtatcatgcggcccacagatgttcccgaccagggtcttctttgcgacttgctgtggtctgaccccgacaaggatgtcctgggatggggagagaatgataggggcgtgagctttacattcggagctgaggtggtggcgaaattcctccacaagcacgatctcgacctgatttgtagggcacaccaggtagtggaggacgggtacgaatttttcgcgaagcgccaactggtgactctgttcagcgcaccaaactactgtggagaatttgacaatgcaggggccatgatgtctgtggacgagacacttatgtgttcattccagatcctgaagcctgccgagaagaagaagcccaatgcgacccggcccgtaacacctcctcgaggaatgattactaaacaagctaagaaatag

SEQ ID NO: 131228 - DNA, 426 bp, Artificial Sequence
  derived and/or modified sequence
atggagcagatacgcagaatcatgcgcccaaccgatgtaccagaccagggccttttatgtgatctcctgtggtctgaccccgataaggatgtgctggggtggggggagaatgatcggggggtgtcgttcacctttggagcagaggtcgtggctaaattcctgcataaacacgatctggatctgatttgtcgggcacaccaggtcgtggaggatggttatgagtttttcgcaaagcgtcaattagtgaccctgttctctgcgcctaactattgtggagaattcgataacgccggtgccatgatgagcgttgacgagacactgatgtgtagcttccagattctgaaacccgccgaaaaaaagaagcccaatgctacgcgacccgtcactcctccccggggcatgatcacaaagcaggcgaaaaagtag

SEQ ID NO: 131229 - DNA, 972 bp, Artificial Sequence
  derived and/or modified sequence
atggctgacctggacaagctgaacatcgacagcatcatccagaggctgctggaggtgcggggcagcaagccaggcaagaatgtgcagctgcaggagaatgagatccggggcctgtgcctgaagagccgggagatcttcctgagccagcccatcctgctggagctggaggcccccctgaagatctgtggggacatccacggccagtactatgacctgctgcggctgtttgaatatggaggcttccccccagagagcaactacctgttcctgggggactatgtggaccggggcaagcagagcctggagaccatctgcctgctgctggcctacaagatcaagtacccagagaacttcttcctgctgcggggcaaccatgaatgtgccagcatcaaccgcatctacggcttctatgatgagtgcaagaggcgctacaacatcaagctgtggaagaccttcacagactgcttcaactgcctgcccatcgccgccatcgtggatgagaagatcttctgctgccacggcggcctgagcccagacctgcagagcatggagcagatccgccgcatcatgaggcccacagatgtgcctgaccagggcctgctgtgtgacctgctgtggagcgaccctgacaaggatgtgctgggctggggagaaaatgaccggggcgtgtccttcacctttggagctgaggtggtggccaagttcctgcacaagcatgacctggacctgatctgccgggcccaccaggtggtggaggatggctatgagttctttgccaagaggcagctggtgaccctcttcagcgcccccaactactgtggggagtttgacaatgctggggccatgatgtctgtggatgagaccctgatgtgcagcttccagatcctgaagccagctgagaagaagaagcccaatgccaccaggcctgtgaccccaccccggggcatgatcaccaagcaggccaagaagtag

SEQ ID NO: 131230 - DNA, 999 bp, Artificial Sequence
  derived and/or modified sequence
atgttcctgcccctgtacctgaacctggtgctgtactttgtgttctggctgcactggaccaactgtgacttcagcctggccgtgcggggcagcaagccaggcaagaatgtgcagctgcaggagaatgagatccggggcctgtgcctgaagagccgggagatcttcctgagccagcccatcctgctggagctggaggcccccctgaagatctgtggggacatccacggccagtactatgacctgctgcggctgtttgaatatggaggcttccccccagagagcaactacctgttcctgggggactatgtggaccggggcaagcagagcctggagaccatctgcctgctgctggcctacaagatcaagtacccagagaacttcttcctgctgcggggcaaccatgaatgtgccagcatcaaccgcatctacggcttctatgatgagtgcaagaggcgctacaacatcaagctgtggaagaccttcacagactgcttcaactgcctgcccatcgccgccatcgtggatgagaagatcttctgctgccacggcggcctgagcccagacctgcagagcatggagcagatccgccgcatcatgaggcccacagatgtgcctgaccagggcctgctgtgtgacctgctgtggagcgaccctgacaaggatgtgctgggctggggagaaaatgacagaggagtgtccttcaccttcggggctgaggtggtggccaagttcctgcacaagcatgacctggacctgatctgccgggcccaccaggtggtggaggatggctatgagttctttgccaagaggcagctggtgaccctcttcagcgcccccaactactgtggggagtttgacaatgctggggccatgatgtctgtggatgagaccctgatgtgcagcttccagatcctgaagccagctgagaagaagaagcccaatgccaccaggcctgtgaccccaccccggggcatgatcaccaagcaggccaagaagtag

SEQ ID NO: 131231 - DNA, 426 bp, Artificial Sequence
  derived and/or modified sequence
atggagcagatccgccgcatcatgaggcccacagatgtgcctgaccagggcctgctgtgtgacctgctgtggagcgaccctgacaaggatgtgctgggctggggagaaaatgaccggggcgtgtccttcacctttggagctgaggtggtggccaagttcctgcacaagcatgacctggacctgatctgccgggcccaccaggtggtggaggatggctatgagttctttgccaagaggcagctggtgaccctcttcagcgcccccaactactgtggggagtttgacaatgctggggccatgatgtctgtggatgagaccctgatgtgcagcttccagatcctgaagccagctgagaagaagaagcccaatgccaccaggcctgtgaccccaccccggggcatgatcaccaagcaggccaagaagtag

SEQ ID NO: 131232 - DNA, 972 bp, Artificial Sequence
  derived and/or modified sequence
atggccgacctggacaagctgaacatcgacagcatcatccagcggctgctcgaggttcgaggatctaagccaggcaagaatgtgcagttgcaggaaaatgaaatacggggcctttgtctgaaatcccgggagatatttctgtcccagccgatccttctggagctggaggcgcctttaaagatctgcggggatatccacggccagtactacgatctcctccgcctgtttgagtacggggggtttcctcctgagtcaaactacctgttcttaggtgactatgtggataggggaaaacaaagcctcgaaacgatttgtcttctcttggcctacaagattaaatatcctgagaacttctttttgctgagggggaatcacgagtgtgcaagcatcaacagaatctatggtttctatgacgagtgcaaacgaaggtacaatattaagctgtggaaaacattcactgattgctttaattgtctgccaattgccgctattgtggatgaaaagatattttgctgccatggcgggctgagccccgatctccagtcaatggaacagattagacgcatcatgaggcccacggacgtccccgatcagggcttgctctgcgacctattatggtccgatccagataaagacgtgctgggatggggggaaaatgataggggcgtgtcttttacgtttggcgctgaggttgtggcgaaattccttcataaacacgatctggatcttatttgtcgggcccatcaggtggtggaagatggttatgagttttttgccaaacggcagctggttacgttgttttccgcacctaattactgtggtgaattcgataatgcaggcgccatgatgtctgtcgatgagacacttatgtgcagtttccagattcttaagcccgccgagaagaaaaaaccaaatgccacccggcctgtcactcccccacggggaatgatcacaaagcaggctaaaaagtag

SEQ ID NO: 131233 - DNA, 999 bp, Artificial Sequence
  derived and/or modified sequence
atgttcctgcccctgtacctgaacctggtgctgtacttcgtgttctggctgcactggactaactgcgacttttcgctggccgtgagaggcagcaagcctggaaaaaatgtacagttgcaggaaaatgagattaggggtctttgcctaaaaagccgggagatcttcctgtctcaacctattctgctggagctggaggcccccctcaaaatctgtggtgacatacatgggcagtattacgatctattgaggctcttcgagtatgggggattcccaccagagagcaactacttgtttcttggcgactacgtcgatcgcggcaaacaaagcttggagactatctgtctccttctcgcatacaagatcaagtatccggaaaacttctttctgcttaggggcaatcacgagtgcgcctccattaaccgcatatacgggttctacgatgaatgcaaacgccgctacaacataaagctgtggaagacttttactgattgtttcaactgtctgccaattgctgccattgtggatgagaagatattctgctgtcacggcggcctgagtcctgatcttcagtcgatggagcagatccggagaattatgagaccaaccgatgtgcctgatcagggacttttgtgcgatttgctgtggtctgatcctgacaaagatgtgctcggctggggcgaaaacgaccgtggtgtatccttcacctttggtgcagaagtggtggcaaaatttctgcataaacatgatctagatctgatctgtcgggcccaccaggtagtggaagacggatacgagtttttcgctaaacgccagctggtgactctgttctccgctccaaattactgcggcgagtttgataacgcaggagcaatgatgtctgtagacgagaccctgatgtgcagctttcagatacttaagcccgctgaaaagaaaaaacccaatgccacccgaccagtgaccccgcctcgtggtatgatcactaaacaggcaaaaaagtag

SEQ ID NO: 131234 - DNA, 426 bp, Artificial Sequence
  derived and/or modified sequence
atggagcagatccggcggatcatgcggcccaccgacgtgcccgaccagggactcctgtgcgatctgctatggagtgacccagacaaagacgtgctagggtggggagaaaacgacagaggcgtctcatttacttttggagcagaagtcgtggcaaagttcctgcataaacatgacctcgacctaatctgtcgggcgcatcaagtggtcgaggatggatacgaattctttgctaagcggcagttagtgacgctttttagcgccccaaactattgtggcgagtttgacaatgccggagctatgatgtccgtcgatgaaaccttgatgtgtagttttcaaattttgaaaccagctgagaagaagaagcctaacgcaactcgccccgtcactcctccccggggaatgatcacaaaacaggccaaaaaatag

SEQ ID NO: 131235 - DNA, 972 bp, Artificial Sequence
  derived and/or modified sequence
atggccgacctcgacaaattgaacattgatagcatcattcagaggctgttggaggtgcgtggctccaaacccggtaagaatgtgcagctgcaggaaaacgagattaggggactctgccttaaaagtcgcgagatcttcctgtcacaaccaatcttgctcgagctagaggctcccctgaagatctgtggagacattcatggccaatattacgacttactgcgcttgtttgagtacggagggttcccccctgaaagcaattacctgttcctgggtgactatgttgacagaggaaaacagtcactggagactatctgtcttctgcttgcctataaaatcaaataccccgagaatttcttcctcctcaggggtaaccatgaatgcgcgtcgatcaacagaatctacggcttttacgatgagtgtaaacggaggtacaacatcaaactgtggaagaccttcaccgattgtttcaactgtctacccatcgcagcaattgtggacgagaagatcttctgttgccacggaggactgagcccagatctccagtcaatggaacaaataaggcggattatgcgtccaacagacgttccagaccaaggcctgttgtgtgacctgctgtggtccgaccctgacaaggacgttctgggatggggcgaaaatgatcgtggggtcagctttacctttggcgctgaggttgttgccaaatttctccacaagcatgacttagatctcatttgtcgcgcacatcaagtagtggaagatggctacgagttcttcgctaaaagacagctggttactctgttttccgcacccaattactgtggcgaatttgacaacgccggtgctatgatgtcagtagatgagacgctcatgtgtagcttccagatcttgaaaccagcagaaaagaaaaagccaaatgcgactcggcctgtgactcccccacgaggcatgatcaccaaacaagctaaaaagtag

SEQ ID NO: 131236 - DNA, 999 bp, Artificial Sequence
  derived and/or modified sequence
atgttcctccccctgtatctcaacctggtgctatattttgtattctggctccactggacaaactgcgacttctcattagcggtgcggggttctaaacccggaaaaaatgtgcaactgcaggagaatgagatccgaggcctctgtttgaaaagcagagagatattccttagccagccaatcctgctggagctcgaagctcctctcaaaatatgtggggacatccacgggcagtactacgacctgctaagattgttcgagtacggagggttcccccctgagagcaattatctgtttctgggggattatgtagacagaggtaagcaatccctggagacgatttgtctgctcctcgcctacaagatcaagtatccagagaattttttccttcttcggggaaaccacgaatgtgccagcatcaaccgaatctacggcttctacgatgagtgtaagcgccgttataacatcaagttatggaagacattcactgactgcttcaactgtctcccaattgcagccatcgtggacgagaaaatcttttgctgccacggagggctgtctcctgatctgcagtcaatggaacagatcaggcgaattatgcgcccaactgacgtgcccgatcaaggtctgctttgtgatttattgtggtcagatcccgacaaggacgtgctcgggtggggggagaacgacagaggggtgagcttcaccttcggcgctgaggttgtcgcaaaattcctgcataagcacgacttggacctgatctgccgagcccaccaggtggtagaggacggctacgagttttttgccaaaaggcagctcgtgacactgttcagcgctcccaattattgtggggagtttgacaacgctggcgcaatgatgtctgtagacgagactctgatgtgtagcttccaaatcctgaaacccgcagagaagaagaagcctaacgccacccggccagtgacgccccctaggggtatgattacgaagcaagctaaaaagtag

SEQ ID NO: 131237 - DNA, 426 bp, Artificial Sequence
  derived and/or modified sequence
atggagcaaatccgaagaatcatgagaccaacagatgtgcctgatcaggggttactctgtgacctcctgtggtctgaccctgacaaggatgtccttggttggggagaaaatgataggggcgtgagctttaccttcggggcagaagtggtagcaaagttcctccataaacacgacttagacttgatatgccgtgctcaccaggtcgttgaagatggatacgagtttttcgcgaaacgtcagttggtcacacttttctccgccccaaattactgtggtgagttcgataacgccggagcaatgatgtcagtggacgagacattaatgtgctccttccagatactcaaacccgcagagaagaagaagcccaacgctaccaggccggtgacaccccctagagggatgattactaagcaggccaagaagtag

SEQ ID NO: 131238 - DNA, 2559 bp, Artificial Sequence
  derived and/or modified sequence
ttttgttcttctcgtggttccagtggggagagaaggaggaagtagggagcggggtggcaggggggggacccgccgcggctgctgccaccgccgccaccaccgcctctgctcgtggcgtgggaaaggaggtgtgagtcccgggcgcgagccggcggcggcgccgctgcgggagggtcggcggtgggaaggcgatggcggatttagataaactcaacatcgacagcattatccaacggctgctggaagtgagagggtccaagcctggtaagaatgtccagcttcaggagaatgaaatcagaggactgtgcttaaagtctcgtgaaatctttctcagtcagcctatcctactagaacttgaagcaccactcaaaatatgtggtgacatccatggacaatactatgatttgctgcgactttttgagtacggtggtttcccaccagaaagcaactacctgtttcttggggactatgtggacaggggaaagcagtcattggagacgatctgcctcttactggcctacaaaataaaatatcctgagaatttttttcttctcagagggaaccatgaatgtgccagcatcaacagaatttatggattttatgatgaatgtaaaagaagatacaacattaaactatggaaaactttcacagactgttttaactgtttaccgatagcagccatcgtggatgagaagatattctgctgtcatggaggtttatcaccagatcttcaatctatggagcagattcggcgaattatgcgaccaactgatgtaccagatcaaggtcttctttgtgatcttttgtggtctgaccccgataaagatgtcttaggctggggtgaaaatgacagaggagtgtccttcacatttggtgcagaagtggttgcaaaatttctccataagcatgatttggatcttatatgtagagcccatcaggtggttgaagatggatatgaattttttgcaaagaggcagttggtcactctgttttctgcgcccaattattgcggagagtttgacaatgcaggtgccatgatgagtgtggatgaaacactaatgtgttcttttcagattttaaagcctgcagagaaaaagaagccaaatgccacgagacctgtaacgcctccaaggggtatgatcacaaagcaagcaaagaaatagatgtcgttttgacactgcctagtcgggacttgtaacatagagtatataaccttcatttttaagactgtaatgtgtactggtcagcttgctcagatagatctgtgtttgtgggggcccttccttccatttttgatttagtgaatggcatttgctggttataacagcaaatgaaagactcttcactccaaaaagaaaagtgttttgttttttaattctctgttccttttgcaaacaattttaatgatggtgttaaagctgtacaccccaggacagtttatcctgtctgaggagtaagtgtacaattgatcttttttaattcagtacaacccataatcatgtaaatgctcattttctttaggacataaagagagccctagggtgctctgaatctgtacatgttcttgtcataaaatgcatactgttgatacaaaccactgtgaacattttttatttgagaattttgtttcaaagggattgctttttcctctcattgtcttgttatgtacaaactagtttttatagctatcaacattaggagtaactttcaaccttgccagcatcactggtatgatgtatatttaattaaagcacacttttccccgaccgtatacttaaaatgacaaagccattcttttaaatatttgtgactctttcctaaagccaaagtttctgttgaattatgttttgacacacccctaagtacaaggtggtatggttgtatacacatgctgccttcttggggattcaaaaacaggtttttgattttgaatagcaattagtgatatagtgctgtttaagctactaacgataaaaggtaataacattttatacaatttccatatagtctattcattaagtaatctttttacagttgcatcaggcctgaacccgtccattcagaaagcttcaaattatagaaacaatactgttctatacgagtgaccgattatgctttctttggcctacattctttattctgcggtgaagttgaggcttataagttaaaacaaaggaactaacttactgtccaccagtttatacagaactcacagtacctatgacttttttaaactaagatctgttaaaaaagaaatctgtttcaacagatgaccgtgtacaataccgtgtggtgaaaatgaattcagacttattaaatgatgaacttgttaaatcttctcagtgtctatttatcagcacaatacacacaggagaactgttgatggcatattgaatagattttcctgaataaattgctctggaaaccacacggttgcattttggttttgcttctttcaaatagtctgttttccaaagatggattataatacagatactaatactctttgagttgtaacctggagacatctatttgtgtaatagagtgatgaggtggaac

SEQ ID NO: 131239 - DNA, 2154 bp, Artificial Sequence
  derived and/or modified sequence
atcagaacgagacttagttacatattttggggtccaaaagtgaactttataactgtaaaattaaggtacatttagcagttccgtgctactttatctgtatctaatgactatccagtctgttacaactggaaccaaaacaaaatttctttcccacaactacctacgtgctgacaagtgagttctgttgcaaagtttgtactttgatagaagaaccctaagtgctctggtggtgtggatgccccatgctgtgcaatgatttctttctcccattattatcttatctgttcaaattattagggaacgtgctttcttacagtatagcacatgactgacatcctttgccctatatagacatgagcataaacacaaatgcaggcccagaaaatgcatggcaaaataagtacaatgaaccaacattttcttaatgaaatgaaaacaacactaacattttttcataggtaaattaaatcagagatcctcaggaggagatacccatggtcctctggaaaacactgatgggggagggttctgagtatttccaatcctgtttcttttcttttcttttctttccttttcttttttttttttgagacggagtctcgctgtgttgccaggctggagtgcagtggcgcgatcttggctcactgcaacctccgcctcccgggtgcaggcgattctcctgagtagctgggattacaggtgcacgccatgttggcgaggatggtctggatctcttgacctcatcatgatctgcccgcctcaccctcccaaagtgctgggattacaagcgtgagccattgcatctggcctgcagtcctgtttctaacagcattcgcacagacaggatggctccttttttggaatactataaaagaagtcttacttggtatcgaagatgcaattaagtcttgtctaagattttaagattctaattagacattaaaaccatgtttattataagtgtcctgaaaatgaagccactcagaaagctagttaaaccatgtttttgcccctttatctaaatctcgtattgtattttgtattttggcttcattggactaattgcgatttttctcttgcagtgagagggtccaagcctggtaagaatgtccagcttcaggagaatgaaatcagaggactgtgcttaaagtctcgtgaaatctttctcagtcagcctatcctactagaacttgaagcaccactcaaaatatgtggtgacatccatggacaatactatgatttgctgcgactttttgagtacggtggtttcccaccagaaagcaactacctgtttcttggggactatgtggacaggggaaagcagtcattggagacgatctgcctcttactggcctacaaaataaaatatcctgagaatttttttcttctcagagggaaccatgaatgtgccagcatcaacagaatttatggattttatgatgaatgtaaaagaagatacaacattaaactatggaaaactttcacagactgttttaactgtttaccgatagcagccatcgtggatgagaagatattctgctgtcatggaggtttatcaccagatcttcaatctatggagcagattcggcgaattatgcgaccaactgatgtaccagatcaaggtcttctttgtgatcttttgtggtctgaccccgataaagatgtcttaggctggggtgaaaatgacagaggagtgtccttcacatttggtgcagaagtggttgcaaaatttctccataagcatgatttggatcttatatgtagagcccatcaggtggttgaagatggatatgaattttttgcaaagaggcagttggtcactctgttttctgcgcccaattattgcggagagtttgacaatgcaggtgccatgatgagtgtggatgaaacactaatgtgttcttttcagattttaaagcctgcagagaaaaagaagccaaatgccacgagacctgtaacgcctccaaggggtatgatcacaaagcaagcaaagaaatagatgtcgttttgacactgcctagtcgggacttgtaacatagagtatataaccttcatttttaagactgtaatgtgtactggtcagcttgctcagatagatctgtgtttgtgggggcccttccttccatttttgatttagtgaatggcatttgctgg

SEQ ID NO: 131240 - DNA, 2797 bp, Artificial Sequence
  derived and/or modified sequence
aattttggagcatcttggattaaggatactcatcctgtggtggtagtagtagtagtattgctgttggaaatgggagttggtggtttttggagattgcccttcagcctttcgtaagaaggagtttgcttttttttgagacggagtttcactcttgttgcccatgctggagtgcaatggtgcgatcttggcttactgcaacctctgcctcccaggttcaagcaattttccttcctcagcctggcgggagaagtttgttaaactttccgaaccccctagtgaaggacctctaaagaaatatgcaacagggtgaaccatagtcagtgttagacccagtcattgagaaaccagaaattattaggagaaaagataacactcctctgcagagagaaggcaaacatttgttgaatttacatttcatttcaagccctgtggtaaactccctaagctgcttgatttgcattacagggtgggaggtgtggttcaggtcagttgcttgggctggctctaactctcaaaggagaggtataggtttaaacctttagatgtccctgtattccccaggaaaagagactaaggacaaactcttggtttgttttgtttgttttgttttgttttttgagacggagtttcgctcttgttgcccaagccggagtgcaatggcacaatcaaggctcaccgcaacctccgcctcccaggttcaagtgactcttctgccttagcctcccaagtagctgggattacaggcatgcgccaccacgcccagctaatttttatatttttagtagagacgggatttcttcatgttggtcaggctggtctcaaactcccaacctcagatggtctgcccgcctcggcctcccaaagtgctgggattacaggtgtgagccaccgcgcctggccaaactcctggtttttaaagattgtgcttagtatagtaagtacaggaaacaaaggcatctggacaattggacaatcctcaaccaatccagagaaatttgttcttgcaaggtatgtgactaggttttaaactcagaacatcagtttcctgtagaaacagtgcatagaggcatatttctgtcagaactgcactctgactccagaatgtgtggatgcctgtgctgttgagggaacatgaccatcctgtgacatcaggcctgtgggagcatgtggagtctgtgcagtgttggaaacaaatgccctgtagtgcctgtgagaggcagccactgccgtgtgatcattgtgcctcctgctagagtactgagggctggggatcctctggtgtcagtaggttattgaggggcatatatgggggatgggtgctaactctcaggtttcctcagaaggaaggtcataacgccacatgtgtaagttcgtaattgaattcagaagtaggggactagctgcggtgagattggacagagcagacaatttcaaacagaattgatgctcccagataattcctgggatttgatggcagtccttaatcattatcaaatctggaattctggtttcatgcttctgtggaatttaaaaagatttcatgtgaaaatgtaagtcattgcttttagatcagatatgtgtctctcctaaaccccttccctctaggagagtctttctttaaagagatggggtctcactatgttgcccaagatggtcttgaactcctgggctcaagccatcctcctacctcagcctcccgaagtgctgggattacaggtctgacccaccacgcccagctcttattttaaaagagccttaaaataagatggttttattaagattcttaataaaaacatagtttcatttgcttaaaaggcacccagaatcttgctttgggggaagttaatcctgagagaatgagcctacggaacagtaatactctctttttaatgtaatactctctttttaatcacaggtaaaagaagatacaacattaaactatggaaaactttcacagactgttttaactgtttaccgatagcagccatcgtggatgagaagatattctgctgtcatggaggtttatcaccagatcttcaatctatggagcagattcggcgaattatgcgaccaactgatgtaccagatcaaggtcttctttgtgatcttttgtggtctgaccccgataaagatgtcttaggctggggtgaaaatgacagaggagtgtccttcacatttggtgcagaagtggttgcaaaatttctccataagcatgatttggatcttatatgtagagcccatcaggtggttgaagatggatatgaattttttgcaaagaggcagttggtcactctgttttctgcgcccaattattgcggagagtttgacaatgcaggtgccatgatgagtgtggatgaaacactaatgtgttcttttcagattttaaagcctgcagagaaaaagaagccaaatgccacgagacctgtaacgcctccaaggggtatgatcacaaagcaagcaaagaaatagatgtcgttttgacactgcctagtcgggacttgtaacatagagtatataaccttcatttttaagactgtaatgtgtactggtcagcttgctcagatagatctgtgtttgtgggggcccttccttccatttttgatttagtgaatggcatttgctggttataacagcaaatgaaagactcttcactccaaaaagaaaagtgttttgttttttaattctctgttccttttgcaaacaattttaatgatggtgttaaagctgtacaccccaggacagtttatcctgtctgaggagtaagtgtacaattgatcttttttaattcagtacaacc

SEQ ID NO: 131241 - DNA, 972 bp, Artificial Sequence
  derived and/or modified sequence
atggccgacctggacaagctgaacatcgacagcatcatccagagactgctggaggtgagaggcagcaagcccggcaagaacgtgcagctgcaggagaacgagatcagaggcctgtgcctgaagagcagagagatcttcctgagccagcccatcctgctggagctggaggcccccctgaagatctgcggcgacatccacggccagtactacgacctgctgagactgttcgagtacggcggcttcccccccgagagcaactacctgttcctgggcgactacgtggacagaggcaagcagagcctggagaccatctgcctgctgctggcctacaagatcaagtaccccgagaacttcttcctgctgagaggcaaccacgagtgcgccagcatcaacagaatctacggcttctacgacgagtgcaagagaagatacaacatcaagctgtggaagaccttcaccgactgcttcaactgcctgcccatcgccgccatcgtggacgagaagatcttctgctgccacggcggcctgagccccgacctgcagagcatggagcagatcagaagaatcatgagacccaccgacgtgcccgaccagggcctgctgtgcgacctgctgtggagcgaccccgacaaggacgtgctgggctggggcgagaacgacagaggcgtgagcttcaccttcggcgccgaggtggtggccaagttcctgcacaagcacgacctggacctgatctgcagagcccaccaggtggtggaggacggctacgagttcttcgccaagagacagctggtgaccctgttcagcgcccccaactactgcggcgagttcgacaacgccggcgccatgatgagcgtggacgagaccctgatgtgcagcttccagatcctgaagcccgccgagaagaagaagcccaacgccaccagacccgtgaccccccccagaggcatgatcaccaagcaggccaagaagtag

SEQ ID NO: 131242 - DNA, 999 bp, Artificial Sequence
  derived and/or modified sequence
atgttcctgcccctgtacctgaacctggtgctgtacttcgtgttctggctgcactggaccaactgcgacttcagcctggccgtgagaggcagcaagcccggcaagaacgtgcagctgcaggagaacgagatcagaggcctgtgcctgaagagcagagagatcttcctgagccagcccatcctgctggagctggaggcccccctgaagatctgcggcgacatccacggccagtactacgacctgctgagactgttcgagtacggcggcttcccccccgagagcaactacctgttcctgggcgactacgtggacagaggcaagcagagcctggagaccatctgcctgctgctggcctacaagatcaagtaccccgagaacttcttcctgctgagaggcaaccacgagtgcgccagcatcaacagaatctacggcttctacgacgagtgcaagagaagatacaacatcaagctgtggaagaccttcaccgactgcttcaactgcctgcccatcgccgccatcgtggacgagaagatcttctgctgccacggcggcctgagccccgacctgcagagcatggagcagatcagaagaatcatgagacccaccgacgtgcccgaccagggcctgctgtgcgacctgctgtggagcgaccccgacaaggacgtgctgggctggggcgagaacgacagaggcgtgagcttcaccttcggcgccgaggtggtggccaagttcctgcacaagcacgacctggacctgatctgcagagcccaccaggtggtggaggacggctacgagttcttcgccaagagacagctggtgaccctgttcagcgcccccaactactgcggcgagttcgacaacgccggcgccatgatgagcgtggacgagaccctgatgtgcagcttccagatcctgaagcccgccgagaagaagaagcccaacgccaccagacccgtgaccccccccagaggcatgatcaccaagcaggccaagaagtag

SEQ ID NO: 131243 - DNA, 426 bp, Artificial Sequence
  derived and/or modified sequence
atggagcagatcagaagaatcatgagacccaccgacgtgcccgaccagggcctgctgtgcgacctgctgtggagcgaccccgacaaggacgtgctgggctggggcgagaacgacagaggcgtgagcttcaccttcggcgccgaggtggtggccaagttcctgcacaagcacgacctggacctgatctgcagagcccaccaggtggtggaggacggctacgagttcttcgccaagagacagctggtgaccctgttcagcgcccccaactactgcggcgagttcgacaacgccggcgccatgatgagcgtggacgagaccctgatgtgcagcttccagatcctgaagcccgccgagaagaagaagcccaacgccaccagacccgtgaccccccccagaggcatgatcaccaagcaggccaagaagtag

SEQ ID NO: 131244 - protein, 1122 aa, Artificial Sequence
  derived and/or modified sequence
MEPSEVPSQISKDNFLEVPNLSDSLCEDEEVTFQPGFSPQPSRRGSDSSEDIYLDTPSSGTRRVSFADSFGFNLVSVKEFDCWELPSASTTFDLGTDIFHTEEYVLAPLFDLPSSKEDLMQQLQIQKAILESTESLLGSTSIKGIIRVLNVSFEKLVYVRMSLDDWQTHYDILAEYVPNSCDGETDQFSFKIVLVPPYQKDGSKVEFCIRYETSVGTFWSNNNGTNYTFICQKKEQEPEPVKPWKEVPNRQIKGCLKVKSSKEESSVTSEENNFENPKNTDTYIPTIICSHEDKEDLEASNRNVKDVNREHDEHNEKELELMINQHLIRTRSTASRDERNTFSTDPVNFPNKAEGLEKKQIHGEICTDLFQRSLSPSSSAESSVKGDFYCNEKYSSGDDCTHQPSEETTSNMGEIKPSLGDTSSDELVQLHTGSKEVLDDNANPAHGNGTVQIPCPSSDQLMAGNLNKKHEGGAKNIEVKDLGCLRRDFHSDTSACLKESTEEGSSKEDYYGNGKDDEEQRIYLGVNEKQRKNFQTILHDQERKMGNPKISVAGIGASNRDLATLLSEHTAIPTRAITADVSHSPRTNLSWEEAVLTPEHHHLTSEGSALGGITGQVCSSRTGNVLRNDYLFQVEEKSGGINSEDQDNSPQHKQSWNVLESQGKSRENKTNITEHIKGQTDCEDVWGKRDNTRSLKATTEELFTCQETVCCELSSLADHGITEKAEAGTAYIIKTTSESTPESMSAREKAIIAKLPQETARSDRPIEVKETAFDPHEGRNDDSHYTLCQRDTVGVIYDNDFEKESRLGICNVRVDEMEKEETMSMYNPRKTHDREKCGTGNITSVEESSWVITEYQKATSKLDLQLGMLPTDKTVFSENRDLRQVQELSKKTDSDAIVHSAFNSDTNRAPQNSSPFSKHHTEISVSTNEQAIAVENAVTTMASQPISTKSENICNSTREIQGIEKHPYPESKPEEVSRSSGIVTSGSRKERCIGQIFQTEEYSVEKSLGPMILINKPLENMEEARHENEGLVSSGQSLYTSGEKESDSSASTSLPVEESQAQGNESLFSKYTNSKIPYFLLFLIFLITVYHYDLMIGLTFYVLSLSWLSWEEGRQKESVKKK

SEQ ID NO: 131245 - DNA, 3369 bp, Artificial Sequence
  derived and/or modified sequence
atggaacctagcgaagtgccttcgcagattagtaaagacaactttttagaggtgcctaatttgtccgattccttatgtgaggacgaggaagtcacctttcagcctggcttctctccccagcccagtaggcggggctccgatagctcagaggacatctaccttgataccccgtcctctggcacaaggcgcgtaagtttcgccgactcctttgggtttaatctggttagcgtgaaggaatttgactgctgggagctgccatctgcctcaacaacttttgacctgggcacggacattttccacacggaagagtacgtcctggctccattattcgacctgccgagctctaaggaagatctgatgcagcagcttcagatacaaaaggcaattctggaaagcaccgaaagcctgctcggcagtacctccataaaaggaatcattagggtgctgaatgtcagctttgagaagctcgtgtacgtgcggatgtcactcgacgactggcagacccattatgatatcctggctgagtacgtgcctaattcatgtgatggtgagaccgaccagtttagctttaaaatcgttctggtgccaccataccagaaggatggatccaaggtcgagttctgcatccggtacgaaaccagtgtggggactttttggtccaacaataacggcacaaactacactttcatctgtcagaagaaggagcaggagccagagccggttaaaccctggaaggaagtgccaaaccggcagatcaaggggtgtttgaaagttaaaagctccaaagaggagagctctgtcacatctgaagagaacaacttcgagaacccaaagaatactgacacttacatccctacaattatttgcagccacgaggacaaggaggatctggaggcctcaaataggaatgtgaaagatgtgaatagagagcacgacgaacataatgagaaggaactggagctgatgattaatcagcatcttattcgaacccgttccactgccagcagggatgaacgcaataccttttctaccgatccagtgaactttccgaacaaagccgagggcctggaaaagaagcagattcacggggagatatgcactgacctgttccaaaggagtctgtcccctagcagttctgcagaatcgagcgttaagggcgacttctattgcaacgagaagtacagctccggagacgattgtacacaccaacctagcgaagaaacaactagcaatatgggtgaaattaaaccctctctcggcgacacatcaagtgacgagcttgtgcaattgcacactggatctaaggaagtcctggacgataacgcaaaccctgctcatgggaacggcactgttcagatcccttgtccctcaagcgaccagctgatggccggcaacctgaataaaaaacacgaaggcggcgccaagaatatagaagtaaaggatctaggctgcctgcgccgcgacttccattccgacaccagtgcgtgtctgaaggagtctactgaggagggctcttccaaggaagattattacggaaacggaaaggatgacgaagagcaacgaatctatctgggcgtgaacgaaaagcaacgcaagaacttccagaccattctgcacgatcaggaaaggaagatgggtaacccaaaaataagtgtagctggtatcggggcgagcaacagggacctggccactctgctttctgagcacaccgcaatccccactagagccattaccgccgatgtgtcacacagcccacgtactaatctgagttgggaggaggccgtactgacacctgaacatcatcatctgacttcagaaggaagtgcccttggaggaattacaggacaagtgtgctcctcccgcacggggaacgtgcttcgcaacgattacctctttcaggtagaagaaaagagcggcggaatcaatagcgaagaccaggataacagccctcaacacaaacagagttggaacgtcctggaatctcagggaaagtcccgcgagaacaagacaaacatcacagagcacattaaagggcagaccgattgtgaagatgtctggggcaaacgcgacaatacccggagcctgaaggctactaccgaggagctcttcacctgccaagagactgtgtgctgcgaattaagttcactcgcggaccacggcataacagagaaagctgaggccggaacagcctatatcattaagacaacgtctgagagtacgcctgagagtatgtcagccagagaaaaggcaattattgcaaaactgcctcaggagaccgcccgctccgacaggccaattgaggtgaaggaaacagcttttgatccgcacgaagggagaaacgatgatagccactatacactttgccaaagagacaccgtaggggtaatctacgataacgatttcgaaaaggaatcacgtctcggaatctgcaacgtcagggtagacgagatggaaaaagaggagaccatgtccatgtataacccaagaaaaacacacgaccgcgagaagtgcggcactgggaacatcacttctgtcgaagagagcagttgggtaataaccgaatatcaaaaggccaccagcaagctggacctgcagctcggcatgctacccactgacaaaactgtgttttcggaaaacagagacttacggcaagtgcaggagctctcgaagaaaactgatagcgatgccattgtgcactccgcttttaatagtgataccaatcgtgctccgcagaatagctccccattttctaagcatcacaccgagatctctgtcagtactaacgagcaggcaattgcagttgagaacgcggtgaccaccatggcgagccaaccaatctccacaaagagcgagaacatctgcaattccacccgcgagatccaaggaatagaaaagcacccgtacccggaaagcaagcctgaggaggttagcaggagttccgggattgtgacttccggcagcagaaaggaacgatgcatcgggcaaatattccaaactgaagaatatagtgtggagaagagccttggccccatgatcctaatcaacaagcctctcgaaaatatggaagaggcacgacacgaaaatgagggtctggtgtcttcaggccagtctctgtacacctcaggagagaaagagtcggattcgtccgcctcaaccagtctgcccgtggaagaaagccaggcgcagggcaacgagagcctgttcagcaaatacaccaacagcaaaattccatacttcctgttattcttgatttttctgatcacagtataccactatgatttgatgataggcttgaccttttatgtattaagcctgtcctggttgtcttgggaagagggtcggcaaaaagagagtgtgaagaagaaatag

SEQ ID NO: 131246 - DNA, 3369 bp, Artificial Sequence
  derived and/or modified sequence
atggagcccagcgaggtgcccagccagatcagcaaggacaacttcctggaggtgcccaacctgagtgacagcctgtgtgaagatgaggaggtgaccttccagcccggcttcagcccccagcccagcagaagaggaagtgacagcagcgaggacatctacctggacacccccagcagcggcacccggcgggtgtcctttgctgacagctttggcttcaacctggtgtctgtgaaggagtttgactgctgggagctgcccagcgccagcaccacctttgacctgggcacagacatcttccacacagaggagtatgtgctggcccccctgtttgacctgcccagcagcaaagaagacctgatgcagcagctgcagatccagaaggccatcctggagagcacagagagcctgctgggcagcaccagcatcaagggcatcatccgggtgctgaatgtgtcctttgagaagctggtgtatgtgaggatgagcctggatgactggcagacccactatgacatcctggccgagtatgtgcccaacagctgtgatggagaaacagaccagttctccttcaagatcgtgctggtgcccccctaccagaaggatggcagcaaggtggagttctgcatccgctatgagacctctgtgggcaccttctggagcaacaacaacggcaccaactacaccttcatctgccagaagaaggagcaggagcctgagcctgtgaagccctggaaggaggtgcccaaccggcagatcaagggctgcctgaaggtgaagagcagcaaggaggagagctctgtgaccagcgaggagaacaactttgagaaccccaagaacacagacacctacatccccaccatcatctgcagccatgaggacaaggaggacctggaggccagcaacagaaatgtgaaggatgtgaaccgggagcatgatgagcacaatgagaaggagctggagctgatgatcaaccagcacctgatccgcaccaggagcacagccagcagagatgaaagaaacaccttcagcacagatcctgtgaacttccccaacaaggccgagggcctggagaagaagcagatccacggggagatctgcacagacctcttccagaggagcctgagccccagcagcagcgctgagagctctgtgaagggggacttctactgcaatgagaagtacagcagtggagatgactgcacccaccagcccagcgaggagaccaccagcaacatgggagagatcaagcccagcctgggggacaccagcagtgatgagctggtgcagctgcacacaggcagcaaggaggtgctggatgacaatgccaacccagcccacggcaatggcaccgtgcagatcccctgccccagcagtgaccagctgatggccggcaacctgaacaagaagcatgagggcggggccaagaacatcgaggtgaaggacctgggctgcctgcggcgggacttccacagcgacaccagcgcctgcctgaaggagagcacagaggagggcagcagcaaggaggactactatggaaatggcaaggatgatgaggagcagaggatctacctgggcgtgaatgagaagcagaggaagaacttccagaccatcctgcatgaccaggagaggaagatgggcaaccccaagatctctgtggccggcattggagccagcaacagagacctggccaccctgctgtctgagcacacagccatccccacccgggccatcacagcagatgtgagccacagccccaggaccaacctgtcctgggaggaggccgtgctgaccccagagcaccaccacctgaccagcgagggcagcgccctgggcggcatcaccggccaggtgtgcagcagcaggactggaaatgtgctgagaaatgactacctgttccaggtggaggagaagagcggcggcatcaacagcgaggaccaggacaacagcccccagcacaagcagagctggaatgtgctggagagccagggcaagagccgggagaacaagaccaacatcacagagcacatcaagggccagacagactgtgaagatgtgtggggcaagagggacaacaccaggagcctgaaggccaccacagaggagctgttcacctgccaggagaccgtgtgctgtgagctgagcagcctggccgaccacggcatcacagagaaggccgaggccggcacagcctacatcatcaagaccaccagcgagagcaccccagagagcatgtctgcccgggagaaggccatcatcgccaagctgccccaggagacagcccggagtgaccggcccatcgaggtgaaggagacagcctttgacccccatgagggcagaaatgatgacagccactacaccctgtgccagagggacacagtgggcgtcatctatgacaatgactttgagaaggagagccggctgggcatctgcaatgtgcgggtggatgagatggagaaggaggagaccatgtccatgtacaaccccaggaagacccatgaccgggagaagtgtggcactggaaacatcacctctgtggaggagagctcctgggtgatcacagagtaccagaaggccaccagcaagctggacctgcagctgggcatgctgcccacagacaagacagtgttttctgagaacagagacctgcggcaggtgcaggagctgagcaagaagacagacagtgatgccatcgtgcacagcgccttcaacagcgacaccaacagagccccccagaacagcagccccttcagcaagcaccacacagagatctctgtgtccaccaatgagcaggccatcgctgtggagaatgctgtgaccaccatggccagccagcccatcagcaccaagtctgagaacatctgcaacagcacccgggagatccagggcatcgagaagcacccctacccagagagcaagccagaggaggtgagccgcagcagcggcatcgtgaccagcggcagcaggaaggagcgctgcatcggccagatcttccagacagaggagtacagcgtggagaagagcctgggccccatgatcctgatcaacaagcccctggagaacatggaggaggcccggcatgaaaatgaaggcctggtgagcagcggccagagcctgtacaccagcggggagaaggagagtgacagcagcgccagcaccagcctgcctgtggaggagagccaggcccagggcaatgaaagcctcttcagcaagtacaccaacagcaagatcccctacttcctgctcttcctgatcttcctgatcaccgtgtaccactatgacctgatgattggcctgaccttctacgtgctgagcctgtcctggctgtcctgggaggagggccggcagaaggagagcgtgaagaagaagtag

SEQ ID NO: 131247 - DNA, 3369 bp, Artificial Sequence
  derived and/or modified sequence
atggagcccagcgaggtgcccagccagatcagcaaggacaacttcctcgaggtgcccaacctctccgattccctgtgcgaagatgaagaagtgacgttccaacccggattcagcccccaaccatcacggagggggtccgactcaagcgaagacatctacctcgatacgccctcgtccggcacacgcagggtgtctttcgctgactcttttggctttaatttagtgtcagttaaggaattcgattgttgggagttgccatcagcaagcacaaccttcgatttgggcacggacatctttcatacggaagaatacgtgctcgccccactgttcgatcttccctcaagtaaggaagacctgatgcagcagcttcagattcagaaagccatccttgaatctactgagtccttgctgggatccacgagcatcaagggtatcatccgggtcctgaatgtgagtttcgagaaactcgtgtacgtgcgtatgtccctcgatgactggcaaacccattatgacatcttagcagaatatgtcccgaactcctgcgatggagaaactgatcagtttagcttcaagatcgttttggttcccccataccagaaagatggatcaaaggtggagttttgcattaggtatgagacctccgtggggactttctggtctaacaacaacgggaccaactacacattcatttgccagaagaaggaacaggagccagaaccggtgaaaccttggaaggaagttcccaatcgccagataaaaggttgtctcaaggttaaatccagtaaggaggagtctagcgtcacttccgaggagaacaatttcgaaaacccgaaaaacaccgacacctacatacctactattatatgctctcacgaggacaaggaagatttggaggcttccaaccggaacgtgaaagatgtgaaccgggagcatgacgaacacaatgaaaaagagcttgagcttatgatcaatcagcacttaatcaggactagaagtaccgcttcccgagatgagagaaatacttttagtaccgatcctgtgaacttccccaacaaggctgagggcctggaaaagaagcagatccacggcgagatatgcactgatctcttccaacgttctctgtctccgagctcatctgcagagtcctcagtaaaaggtgacttttattgcaatgagaagtacagctctggagacgattgcacccatcagccttccgaagagaccactagcaatatgggtgaaattaaaccctctcttggcgataccagtagtgacgaactcgtgcagttacataccggctccaaagaggtgctcgatgataatgccaatcctgcacacggaaatgggaccgtccagatcccctgcccctccagcgatcaattgatggctgggaaccttaacaaaaagcacgaaggtggagcaaaaaacatcgaggtgaaggatctaggatgcctgcgccgtgactttcacagcgacacgtctgcttgtttaaaggaaagcacagaggaaggctcttccaaggaagactactatgggaacggcaaggacgacgaggaacaaaggatttacctgggagtcaatgagaagcaacgcaaaaactttcagacgattctgcacgatcaggagcgaaagatgggaaatcctaagataagtgtggctgggattggggctagcaatcgcgatctcgccacactcctaagcgaacacaccgcaatccccacccgcgcaataacggcagacgtgtcacatagtccacggacaaatctgtcctgggaagaggcggtccttacgccagaacaccaccacttgacgtccgaaggttctgctttaggtggtattacaggtcaggtttgctcctcccgaaccggtaatgtcctgcggaatgactatctgttccaggtagaggagaaaagcgggggcatcaacagtgaggaccaagacaattctccccagcacaagcagagctggaacgtgttggaatcccagggcaaaagccgggagaacaagacaaacataaccgagcatatcaaaggacagacagattgtgaggatgtatggggtaagcgggacaataccagatctcttaaagcaacaactgaggagctttttacatgccaagagacagtttgttgcgagctgtccagtctggcggatcatggcatcactgaaaaagccgaagcagggacagcctacataattaaaaccacttcggaatccacccccgagtccatgtcagcccgagagaaggccattatcgcgaaactgccgcaggaaacagccaggagtgatagaccaatagaagttaaagagactgcgttcgatccacacgagggccgtaatgatgattcgcactatacattgtgtcagagagacacggttggagtaatctatgataacgatttcgaaaaagaaagcaggctcggcatctgcaacgtgagggtggatgaaatggaaaaggaggagacgatgtcgatgtacaaccccaggaaaacgcatgacagagagaagtgcggcacaggcaacatcacatcagtggaggagtcctcatgggtaatcaccgaatatcagaaggctacctccaagcttgaccttcagctaggaatgctaccaaccgacaaaaccgttttcagtgaaaaccgtgacctgcggcaagttcaagagttaagcaaaaaaaccgattctgacgcgatcgtgcactctgcgttcaattcagataccaatagagctccacagaactcatcccccttcagcaagcatcacacagaaatctcggtttctacgaacgaacaggctattgcggttgaaaatgctgttaccactatggccagtcagcctatttccaccaagagcgagaatatttgcaactcaaccagggagatccaggggattgagaaacacccgtatcctgaatctaaacctgaagaggtatccagatcctccgggatcgtcacatctggctcacgcaaggagaggtgtatcggccagatttttcagacagaagagtattccgtggaaaagagtttgggccccatgattctgattaacaaacccctggaaaatatggaggaggctagacacgaaaacgaaggcctggtgagctctggccagagcctgtatacaagtggcgaaaaggaatctgacagctctgcttcgactagtctcccagtggaggaatcccaggcccagggtaatgaatcccttttttccaagtatactaacagcaaaataccctattttcttcttttcctgatatttcttatcactgtgtaccactacgatctgatgattggactcacattttatgtgctgtcactatcctggctgtcatgggaagaaggccggcaaaaggaaagtgtgaagaagaaatag

SEQ ID NO: 131248 - DNA, 3369 bp, Artificial Sequence
  derived and/or modified sequence
atggagcctagcgaggtgccgtcacagattagcaaggataacttcctagaggtgcccaacctttccgactccctgtgcgaggatgaagaagtgacatttcagccgggtttcagcccacaaccttccagacgcggttccgattcttccgaggatatatatctggacacgccctctagcggtacccgccgagtgtcgtttgcagattcttttggttttaacctggtatccgtcaaggagttcgactgttgggagcttccatctgccagcacaacttttgaccttggaacggatatattccacactgaggagtatgttctggctccactttttgatctgccctcctctaaggaagatctgatgcagcagttacagattcagaaggctattctggaatccaccgagtccctgttgggctcaacgtcgattaagggtattataagggtgcttaacgtgtcattcgaaaagctcgtatatgttcgcatgagcctggacgactggcagacccattacgatatcctggctgaatatgtccccaacagttgcgacggagagacagaccagtttagttttaaaattgtgttggtccctccatatcaaaaggacgggtccaaggttgagttttgtattcgctacgaaacatccgttggcaccttctggtcaaacaacaacggaaccaattacacattcatttgccagaagaaagagcaagagcctgagcccgtaaaaccatggaaggaagtcccaaaccgacaaatcaaaggatgccttaaggtgaagagctcaaaagaggagtcctctgtcacttcggaggaaaacaactttgaaaatccaaagaacacagacacctacattccaacaatcatttgcagccacgaagacaaggaggatctcgaagccagtaaccgcaatgtgaaggatgtgaacagggagcacgacgagcacaatgaaaaggagttagagctgatgattaatcagcaccttattcggacgcgcagcacagctagtagagatgagcgcaataccttttctaccgatcctgtcaacttccccaacaaggccgaggggctggaaaaaaaacagatccatggtgaaatctgcacggacctctttcagagaagtttaagtccctcatcaagtgctgagtccagtgttaaaggagacttttactgcaatgagaaatattctagtggggacgactgcacccaccagccttccgaggagactacctctaacatgggggaaataaagccaagtctgggcgacacaagctccgatgagcttgtgcaactgcacacgggctcgaaggaagtgctcgatgacaacgccaatcctgctcatgggaatggcacagtacagataccttgccctagttcagatcagcttatggccggaaacctcaacaagaagcatgaaggaggggcaaaaaacatcgaagtcaaggaccttggctgtctgcggagagatttccacagtgatacctccgcttgcctaaaggaaagcacagaggagggcagttcaaaagaagattactatggaaatggcaaggatgatgaagagcagcggatctatctaggggtgaatgagaaacagcggaaaaacttccagaccatcctgcatgatcaggagaggaaaatggggaatccaaaaatatcagtcgccggaataggggcttcaaatcgggatcttgctacccttctgagcgagcacactgctatccccactcgggcaataacggccgatgtctcgcactcgccccgaaccaacctctcatgggaagaagccgtgttaacacccgaacatcaccacctcactagcgaggggagcgccctgggtggcataacggggcaggtctgtagctctcgtacaggaaacgtccttcgcaatgattaccttttccaggttgaagagaagtccgggggtatcaacagtgaggatcaggacaattcaccccagcacaaacagagttggaatgtgctggaaagccagggcaagtctagggaaaataagactaatataaccgaacatattaaaggccagaccgattgcgaggatgtctgggggaagcgggataacacgagatctctgaaagccactaccgaggagttgtttacctgccaggagactgtctgctgtgaacttagcagcctcgctgaccatgggattacagagaaagccgaggccggtacagcatatattattaagaccacctccgaaagcactcctgaaagtatgtcagctcgagaaaaggccatcatcgcaaagcttccccaagagaccgcacgctccgacaggccgatcgaggtcaaggaaaccgcctttgatcctcatgagggacggaacgacgatagccactacaccctctgccagagggacaccgtgggggtcatatacgacaacgactttgaaaaagaatcgcgcctcggcatttgcaacgtgagggttgatgagatggaaaaggaggagactatgtctatgtataatccacggaagactcacgacagagagaaatgtggcaccggaaatatcaccagtgtcgaggaatcgtcttgggtaatcaccgagtatcagaaggctaccagcaagctggatctgcagttagggatgttgcccacggataagaccgtcttctcagagaaccgggaccttcgtcaggtccaggagcttagtaaaaaaactgattcagacgccatagtgcattccgcattcaacagcgacaccaaccgagctccgcagaacagcagccccttctctaagcaccatactgaaattagcgtgagcacaaacgaacaggctatagcggtggagaacgcggtgaccacaatggcaagccagcccattagtactaagagcgagaatatatgcaacagcacgcgagagatccagggaattgaaaaacacccttacccagagtcgaaacccgaagaggtatccagatcatctggcatcgtgacttctgggagtagaaaagaaaggtgcatcggccaaatattccagacggaagaatactcggtagagaagtcactggggcctatgatcctcataaataagcccctggaaaacatggaagaagccagacacgaaaacgaggggctcgtttctagtggccagtccctttatacttcgggcgaaaaagaatccgactccagtgcaagcacatccctgcctgtggaggaaagccaggcgcagggtaacgagtctttgttttccaaatatacaaactccaaaattccctacttcttactcttcctgatcttcttgataacagtgtatcattacgacctcatgatcggattgactttttacgttctgtccctctcatggctgtcatgggaagaagggaggcaaaaggaaagtgtgaaaaaaaaatag

SEQ ID NO: 131249 - DNA, 4384 bp, Artificial Sequence
  derived and/or modified sequence
gcctcagtatctcaaatgtcagcctctactagtcgtacagttctctcttatttgatatcagagagcccaatggagccttctgaagtacctagtcagattagcaaagataattttttagaagttcctaatttatctgactctctttgtgaagatgaagaagttactttccaacctggtttctcccctcaaccaagtagacgaggttctgattcttctgaagacatatacctggataccccatcttcaggtactagaagagtttcatttgctgattcctttggattcaatcttgtgtctgttaaagaatttgattgctgggaattaccgagtgcttcaaccacttttgacttagggacggacattttccacacagaagaatatgttttagccccactgtttgacttgccttcttcaaaagaagatcttatgcaacaactccaaatacagaaagcaatactggagtcaactgagtctcttcttgggtctacaagtatcaagggtattattcgagttttgaatgtttcttttgagaagttagtatatgtaagaatgtctttagatgactggcagacacattatgacattttagcagaatatgttcctaattcatgtgatggtgaaactgaccagttctcctttaagattgtattggttcctccttatcaaaaagatggcagtaaagttgagttttgtatacgttatgaaacttctgttggtacattttggtcaaataataatggcacaaattatacattcatttgtcaaaagaaagaacaagagccggagcctgtaaaaccatggaaagaagttcctaacagacaaataaaaggctgcttaaaggtaaaatcaagtaaagaagaatcatcagtaacatcagaagaaaataactttgagaatccaaagaatacagatacctatatcccaacaatcatttgttctcatgaggacaaggaagatttggaagccagtaatcgaaatgtaaaagatgtaaacagggaacatgatgaacataatgaaaaagaattagagttgatgataaatcaacacttaataagaaccagaagtactgcttccagagatgaaaggaatacattttcaacagatccagtcaattttccaaataaagcagaggggttagagaagaagcaaatccatggtgaaatatgtactgacttgttccaaaggtctctgtctccaagttcatcagcagaaagctccgtaaagggagatttttactgcaatgaaaaatattcctcaggagatgactgtacacatcaaccttcagaggaaactacttcaaatatgggagaaatcaagccatcattgggagatactagtagtgatgaactagtgcaattacatactggcagcaaagaagtcctggatgataatgctaatccagcccatggcaatggcacagtgcaaataccttgcccctcttcagatcaactaatggcaggaaaccttaataaaaaacatgaaggaggagctaaaaatattgaagtaaaagatttgggatgtttacgaagagatttccattcagatacgtcggcatgtctcaaagaatcaacagaagaaggatcttctaaggaagattattatggcaatggtaaggatgatgaagaacaaagaatatatttaggtgttaatgaaaaacaaagaaaaaatttccaaacaatcttacatgaccaagaaaggaagatgggtaaccctaaaataagtgtggcagggattggagctagtaacagagacctggctactctgctgagcgaacataccgcaatccccacccgggcaatcacagcagatgtgtctcattcaccaaggacaaatttaagttgggaagaagctgtgttaaccccagagcatcatcatttgactagtgaaggcagcgctttaggagggataactggtcaagtttgttcatcaagaactggaaatgttttgaggaatgattatcttttccaagttgaagaaaaatcaggtgggattaattctgaagatcaggataatagcccacagcataaacaaagttggaatgttctggaaagtcagggaaaatcaagagagaataagacaaacataacagagcatatcaaaggacaaacagattgtgaagacgtgtggggaaaaagagataatacgaggagtttgaaagctactacagaagaattgtttacctgccaagaaacagtgtgctgtgaactgtcttctctagctgatcatggcattactgagaaagcagaagctggtacagcctatataattaagacaacatcagaaagtactccagaaagcatgtctgctagagaaaaagcaataattgctaagctacctcaagagacagcacgaagtgacaggcccatcgaggtaaaggaaacagcgtttgatccacatgaagggagaaatgatgattcacattataccctttgtcaacgagatacagtaggtgtaatctatgacaatgattttgaaaaggaatcacgtttaggtatttgtaatgtacgtgtagatgaaatggagaaggaagaaaccatgtctatgtacaatcctaggaagacacatgacagggagaaatgtggcactggaaatataacatctgtggaagaatcctcatgggtcattacagaatatcaaaaagcaacttcaaaactggatttacagttgggaatgttaccaacagacaaaactgtattttcagaaaacagagatcttaggcaggttcaagaattatcaaagaaaacagactcggatgccattgtgcattctgcttttaactcagacactaatagagctcctcagaatagctctcctttttccaaacatcatactgaaatttcagtgtcaactaatgagcaggcaattgctgtagagaatgcagttactaccatggctagccaacctatttctacgaaatcagaaaatatttgtaattcaacaagagaaatccagggtattgagaagcacccttatcctgagtctaaacctgaagaagtttccagaagttcaggaatagtgacatcaggtagtagaaaagaaagatgcataggccagattttccaaacagaagagtatagtgtggaaaaatctctagggccaatgattttaatcaacaaacctcttgagaatatggaagaagcaaggcatgaaaatgaaggattagtaagctctgggcaatcactatacacttcaggtgaaaaggaatctgacagctctgcttctactagtcttcctgttgaggaaagtcaagctcaaggcaacgaatctttgttttcaaaatataccaactctaaaataccttatttccttttgtttctgatatttcttataactgtctaccattatgacttaatgattggcttgacattctacgttttgtcattgtcctggctatcctgggaagagggtagacaaaaagagtctgtcaaaaagaagtaacctcagcactactattctctcttaaaagataagctatttaaccccaaacatttggattggtgaatgggactattcattgttcaaagatccagtgcagtttttctcttgaaggatcatttaaaaagggacgcgaataagtttgctccttcatataagtaattattctatataggaccattatgtttggatcattaaatacctatatgaatatgagatctgaagcacgtcaagttgaaattaggtacagctgttgctccttagcaggctatgaagttgcaatgcttcacatctcttcactacttaaagtgctatttcttgcattcatttctcttgcaataaagcttcatttttttttccccttgagagtatatattttcccctacggttttaaaaaacagataaaacatggacaatggcagaggacttttttggtcttttagtattgaacatgaaatttgttcaatttatcatttatcaggattcattgatcaaatatttcaacctttcatatttttaagaaaacacccatatatattgaaatgcaaacttaaacatattctgttcacttgagtgtaatacttgatgcatgcacacacacacacacataccttctttatagctacaaagtcagggcgttcataggcaaaatctgacaagactgaaacaattgggagattatctttcaattctgaaaaattctgtgggtggcctgtctttaagcaatgcttttctcttgtgagggaagactgtaacacagctgaactatttcagtgtcaactattcagaattgaaaatgtaaattaaaatttccacaagcattgcttcagaatgaatttgtacctataaagcataaggcattaaatgacaataaaaattccaaatggactatttgttccacattgtatttttgtcttcaaatattttctaagagaatgaattatccccc

SEQ ID NO: 131250 - DNA, 3369 bp, Artificial Sequence
  derived and/or modified sequence
atggagcccagcgaggtgcccagccagatcagcaaggacaacttcctggaggtgcccaacctgagcgacagcctgtgcgaggacgaggaggtgaccttccagcccggcttcagcccccagcccagcagaagaggcagcgacagcagcgaggacatctacctggacacccccagcagcggcaccagaagagtgagcttcgccgacagcttcggcttcaacctggtgagcgtgaaggagttcgactgctgggagctgcccagcgccagcaccaccttcgacctgggcaccgacatcttccacaccgaggagtacgtgctggcccccctgttcgacctgcccagcagcaaggaggacctgatgcagcagctgcagatccagaaggccatcctggagagcaccgagagcctgctgggcagcaccagcatcaagggcatcatcagagtgctgaacgtgagcttcgagaagctggtgtacgtgagaatgagcctggacgactggcagacccactacgacatcctggccgagtacgtgcccaacagctgcgacggcgagaccgaccagttcagcttcaagatcgtgctggtgcccccctaccagaaggacggcagcaaggtggagttctgcatcagatacgagaccagcgtgggcaccttctggagcaacaacaacggcaccaactacaccttcatctgccagaagaaggagcaggagcccgagcccgtgaagccctggaaggaggtgcccaacagacagatcaagggctgcctgaaggtgaagagcagcaaggaggagagcagcgtgaccagcgaggagaacaacttcgagaaccccaagaacaccgacacctacatccccaccatcatctgcagccacgaggacaaggaggacctggaggccagcaacagaaacgtgaaggacgtgaacagagagcacgacgagcacaacgagaaggagctggagctgatgatcaaccagcacctgatcagaaccagaagcaccgccagcagagacgagagaaacaccttcagcaccgaccccgtgaacttccccaacaaggccgagggcctggagaagaagcagatccacggcgagatctgcaccgacctgttccagagaagcctgagccccagcagcagcgccgagagcagcgtgaagggcgacttctactgcaacgagaagtacagcagcggcgacgactgcacccaccagcccagcgaggagaccaccagcaacatgggcgagatcaagcccagcctgggcgacaccagcagcgacgagctggtgcagctgcacaccggcagcaaggaggtgctggacgacaacgccaaccccgcccacggcaacggcaccgtgcagatcccctgccccagcagcgaccagctgatggccggcaacctgaacaagaagcacgagggcggcgccaagaacatcgaggtgaaggacctgggctgcctgagaagagacttccacagcgacaccagcgcctgcctgaaggagagcaccgaggagggcagcagcaaggaggactactacggcaacggcaaggacgacgaggagcagagaatctacctgggcgtgaacgagaagcagagaaagaacttccagaccatcctgcacgaccaggagagaaagatgggcaaccccaagatcagcgtggccggcatcggcgccagcaacagagacctggccaccctgctgagcgagcacaccgccatccccaccagagccatcaccgccgacgtgagccacagccccagaaccaacctgagctgggaggaggccgtgctgacccccgagcaccaccacctgaccagcgagggcagcgccctgggcggcatcaccggccaggtgtgcagcagcagaaccggcaacgtgctgagaaacgactacctgttccaggtggaggagaagagcggcggcatcaacagcgaggaccaggacaacagcccccagcacaagcagagctggaacgtgctggagagccagggcaagagcagagagaacaagaccaacatcaccgagcacatcaagggccagaccgactgcgaggacgtgtggggcaagagagacaacaccagaagcctgaaggccaccaccgaggagctgttcacctgccaggagaccgtgtgctgcgagctgagcagcctggccgaccacggcatcaccgagaaggccgaggccggcaccgcctacatcatcaagaccaccagcgagagcacccccgagagcatgagcgccagagagaaggccatcatcgccaagctgccccaggagaccgccagaagcgacagacccatcgaggtgaaggagaccgccttcgacccccacgagggcagaaacgacgacagccactacaccctgtgccagagagacaccgtgggcgtgatctacgacaacgacttcgagaaggagagcagactgggcatctgcaacgtgagagtggacgagatggagaaggaggagaccatgagcatgtacaaccccagaaagacccacgacagagagaagtgcggcaccggcaacatcaccagcgtggaggagagcagctgggtgatcaccgagtaccagaaggccaccagcaagctggacctgcagctgggcatgctgcccaccgacaagaccgtgttcagcgagaacagagacctgagacaggtgcaggagctgagcaagaagaccgacagcgacgccatcgtgcacagcgccttcaacagcgacaccaacagagccccccagaacagcagccccttcagcaagcaccacaccgagatcagcgtgagcaccaacgagcaggccatcgccgtggagaacgccgtgaccaccatggccagccagcccatcagcaccaagagcgagaacatctgcaacagcaccagagagatccagggcatcgagaagcacccctaccccgagagcaagcccgaggaggtgagcagaagcagcggcatcgtgaccagcggcagcagaaaggagagatgcatcggccagatcttccagaccgaggagtacagcgtggagaagagcctgggccccatgatcctgatcaacaagcccctggagaacatggaggaggccagacacgagaacgagggcctggtgagcagcggccagagcctgtacaccagcggcgagaaggagagcgacagcagcgccagcaccagcctgcccgtggaggagagccaggcccagggcaacgagagcctgttcagcaagtacaccaacagcaagatcccctacttcctgctgttcctgatcttcctgatcaccgtgtaccactacgacctgatgatcggcctgaccttctacgtgctgagcctgagctggctgagctgggaggagggcagacagaaggagagcgtgaagaagaagtag

SEQ ID NO: 131251 - protein, 360 aa, Artificial Sequence
  derived and/or modified sequence
MAAERGAGQQQSQEMMEVDRRVESEESGDEEGKKHSSGIVADLSEQSLKDGEERGEEDPEEEHELPVDMETINLDRDAEDVDLNHYRIGKIEGFEVLKKVKTLCLRQNLIKCIENLEELQSLRELDLYDNQIKKIENLEALTELEILDISFNLLRNIEGVDKLTRLKKLFLVNNKISKIENLSNLHQLQMLELGSNRIRAIENIDTLTNLESLFLGKNKITKLQNLDALTNLTVLSMQSNRLTKIEGLQNLVNLRELYLSHNGIEVIEGLENNNKLTMLDIASNRIKKIENISHLTELQEFWMNDNLLESWSDLDELKGARSLETVYLERNPLQKDPQYRRKVMLALPSVRQIDATFVRF

SEQ ID NO: 131252 - DNA, 1083 bp, Artificial Sequence
  derived and/or modified sequence
atggctgcggaacgtggtgcagggcagcaacagtcccaggaaatgatggaggtggacagaagagtggagtccgaagaaagtggggatgaagaagggaaaaaacacagcagtggcatcgtcgccgatttgagtgagcagagccttaaagacggcgaagaaagaggcgaagaagatccagaggaagaacacgagctccccgtcgatatggagactatcaacctggaccgcgacgctgaggacgtggatctgaatcattatcgcattggcaagatcgaagggtttgaagttctcaagaaagtcaagacgctctgtctgcggcagaacctcatcaagtgcatcgagaacctggaggagcttcagtctttgcgagaacttgatctgtacgacaatcagatcaagaagatcgagaacctcgaggctctgacagagctcgagatcttggatattagcttcaatctcttacggaatattgagggcgtggacaaattgaccaggctcaagaagctgttcctcgttaacaataagatctccaaaatcgaaaatctgtcaaacctgcaccagcttcagatgctggagctgggcagcaaccgcattagggccatcgagaatatcgacacactgaccaacttagagtccctatttttgggtaagaataagatcactaagttacagaacttagacgccctcacaaacttgaccgttctgtcaatgcagtccaataggttgaccaagattgagggacttcagaaccttgtcaacctccgcgagctgtacctgagccacaatgggatcgaagtgatcgagggtctggagaacaacaataaattaacaatgctcgacattgcaagtaaccgaatcaaaaaaatcgaaaacatatcgcatctgaccgaactccaggaattttggatgaacgataacctcctcgagtcctggtccgatttagatgagctcaagggcgcccgctctctcgagacagtctaccttgaacgaaacccactgcagaaggaccctcagtatcgccggaaggtgatgttggcattaccaagtgtgcgccagatcgacgcaacatttgtgcgcttttag

SEQ ID NO: 131253 - DNA, 1083 bp, Artificial Sequence
  derived and/or modified sequence
atggctgcagagcgaggtgctggtcagcagcagtcacaggagatgatggaagtggatcgcagggtggaatccgaagagtccggggacgaggaaggtaagaagcattcctctgggatcgttgccgacctctcagaacagagtctcaaggatggagaagagaggggagaggaggacccggaggaggaacatgaattgcccgtggacatggagactatcaacctggatcgggatgccgaggatgtggacctcaaccattacagaatagggaagatcgagggctttgaggtactgaaaaaggtgaagaccctgtgcctgcgtcagaacctcatcaaatgcatagagaatttggaggagctccagagcctgcgcgagctggacctgtatgacaatcagataaaaaagattgaaaatctggaggccctcaccgaactagagattttggatattagctttaacttattacgaaatattgagggagtcgataagctcacacggctgaagaagctctttttagttaataacaaaatatccaaaatcgagaacctctcgaacctccaccaactccagatgttggaacttggaagcaaccggattagggcgatagaaaacatcgacacgctcacaaacctggagagcctgtttctgggcaagaataagatcacaaagttgcagaatctggatgctctgaccaatctgaccgtgttaagtatgcagagtaatcgcttgacgaaaatcgagggtctccaaaacctcgtgaacctgagggagctatacctgagccacaatggcattgaagtgattgagggcctagagaacaacaacaagttaaccatgctggatattgcctcaaacagaattaaaaagatagagaatattagccatttgactgagcttcaggagttctggatgaatgacaatttgcttgagtcttggtcagacttggatgaattgaaaggcgccagatccctggagactgtatatctcgagaggaaccccctgcagaaggaccctcagtaccgccgcaaggtcatgctggcactcccttccgtccggcagattgatgctacattcgtgcgattctag

SEQ ID NO: 131254 - DNA, 1083 bp, Artificial Sequence
  derived and/or modified sequence
atggctgctgagagaggagctggccagcagcagagccaggagatgatggaggtggaccggcgggtggagagcgaggagagcggagatgaggagggcaagaagcacagcagcggcatcgtggccgacctgtctgagcagagcctgaaggatggagaggagcggggggaggaggaccctgaggaggagcacgagctgcctgtggacatggagaccatcaacctggacagagatgctgaagatgtggacctgaaccactaccgcatcggcaagattgagggctttgaggtgctgaagaaggtgaagaccctgtgcctgcggcagaacctgatcaagtgcatcgagaacctggaggagctgcagagcctgcgggagctggacctgtatgacaaccagatcaagaagattgagaacctggaggccctgacagagctggagatcctggacatctccttcaacctgctgagaaatattgaaggagtggacaagctgacccggctgaagaagctgttcctggtgaacaacaagatcagcaagattgagaacctgagcaacctgcaccagctgcagatgctggagctgggcagcaaccgcatccgggccatcgagaacatcgacaccctgaccaacctggagagcctcttcctgggcaagaacaagatcaccaagctgcagaacctggatgccctgaccaacctgactgtgctgtccatgcagagcaaccggctgaccaagattgagggcctgcagaacctggtgaacctgcgggagctgtacctgagccacaacggcatcgaggtgattgagggcctggagaacaacaacaagctgaccatgctggacatcgccagcaaccgcatcaagaagattgagaacatcagccacctgacagagctgcaggagttctggatgaatgacaacctgctggagagctggagcgacctggatgagctgaagggggcccggagcctggagaccgtgtacctggagaggaaccccctgcagaaggacccccagtacagaaggaaggtgatgctggccctgcccagcgtgcggcagattgatgccacctttgtgcgcttctag

SEQ ID NO: 131255 - DNA, 1083 bp, Artificial Sequence
  derived and/or modified sequence
atggccgccgagcggggcgccggccagcagcagagccaggagatgatggaagttgacaggagagtggaatccgaagagtctggtgatgaggagggaaaaaagcatagctcgggcattgtggccgatctttctgagcaaagtctgaaggatggcgaggagcgaggggaggaggatccggaagaggaacatgaactccctgtcgacatggagactattaatctggaccgggatgccgaagatgtggacctgaatcactaccgcatcggaaagattgagggctttgaggttctgaagaaggttaagactctctgtcttcgccagaatctcatcaaatgcattgagaacctggaagagctgcaatctctgcgcgagctcgacttgtatgataaccagattaaaaaaattgagaacttggaggctctgaccgaactcgagattcttgacatctctttcaatctgctgcgcaatattgagggtgtcgacaaactgacgagactcaagaagctctttctggttaacaataagatctcgaaaattgaaaatttgtccaacttacaccagctccagatgcttgaacttggatctaaccggatcagggcgatagaaaatattgataccttgacaaacctggagtcgctgtttttggggaaaaacaaaattacaaagctgcagaatctcgacgcactgacaaaccttacagtgttatccatgcagtctaatcgcttgaccaagatagaagggttgcaaaacctggttaaccttcgcgaattgtacctcagccataacggcatcgaggtcattgaggggctggagaataataacaaactgaccatgctcgatatcgccagcaacaggatcaagaaaattgagaacatcagccacctgacagagctccaggagttctggatgaacgataatctgctggagagctggtctgatctggacgagctgaaaggagccagatccctggagaccgtctacttagaaagaaacccgctgcaaaaggatccccaatatcgccgtaaggtcatgcttgccctcccgtcagtcagacaaatagacgcaacattcgtgcggttttag

SEQ ID NO: 131256 - DNA, 1083 bp, Artificial Sequence
  derived and/or modified sequence
atggccgccgagcggggcgccggccagcagcagagccaggagatgatggaggtggatagaagagtggaatcagaggagtctggggacgaagagggcaagaaacattcctcaggtatcgtcgccgacctttctgaacagagtctgaaagacggcgaagaacgaggagaggaggaccccgaggaggagcacgaactgcctgttgatatggagacaatcaatctggaccgcgatgcggaagacgtggatttaaatcactaccggattgggaagattgaaggcttcgaggtccttaagaaggttaagaccttatgcttgagacaaaatctcattaaatgtatcgaaaacctggaggagctccaaagtcttagggagttggacctttacgataaccaaattaagaagatagagaatctcgaggcactaacagagctcgagattctggacataagcttcaatctgctgagaaatatagaaggagtggataagcttacccggcttaagaagttgttcctcgtgaacaataaaatctccaaaattgaaaatctgtccaatctgcaccagcttcagatgctggagctcgggtccaatcggatcagagcaatcgaaaacatcgacaccctcacaaatttggagagtctgtttctgggaaagaacaagattacaaagttacagaacttggacgccctgactaatctgacagttctcagcatgcagagcaataggttgaccaaaattgaaggactgcagaatctcgtcaacttgcgggaactgtacctctcacacaacggtatcgaggtcatcgagggacttgagaacaataataaacttacaatgctcgacatcgcatccaaccggattaaaaagatcgaaaacatcagtcacctgacagagcttcaggagttctggatgaatgataatctattagagagctggtccgatctggacgagctgaagggcgctcgcagcctggaaactgtgtacctcgagaggaacccactccagaaggatccccagtatcgccggaaagtgatgttggctctgccctccgtcagacagatcgacgcaacgttcgtcagattctag

SEQ ID NO: 131257 - DNA, 1083 bp, Artificial Sequence
  derived and/or modified sequence
atggccgcagagagaggtgccggtcaacagcagagccaggagatgatggaagtcgatcgacgggtcgagtccgaagagagtggggatgaggagggcaagaagcatagctcgggaattgtagctgatttgtcagaacagtccctcaaggatggggaggagcgaggagaggaagacccagaagaggagcacgagctgcccgttgacatggagacgatcaatctcgacagagacgccgaggatgtggacctgaaccattaccggatcggaaagatcgagggctttgaggtactcaaaaaggtgaaaactctttgtctgagacagaatctgataaaatgcattgaaaatctcgaggagctgcaatcccttcgagagctcgatttatacgacaaccaaataaagaaaatcgagaatctcgaagctctgaccgagctggaaattttggatatctcttttaatctgcttaggaatatagaaggagtggataagctaacaaggctgaaaaagttattcttagtgaataacaagatctcaaagattgagaatctttcaaacctacaccagctgcagatgctggagttgggcagcaatcggatcagagctatcgagaacattgacacactgaccaacctggaatctctcttcctcggcaaaaataagattacaaagctccagaacctggacgcactgaccaatctgaccgtactgtccatgcagagcaaccggctgacaaagatcgagggtctgcagaatttagttaaccttcgcgaactgtacctgagccacaatggtattgaagtcatcgagggccttgagaataataataagctgactatgctggacatcgccagtaaccgcatcaagaagatcgagaacatcagccacctgacggaactacaggaattctggatgaatgacaacctcctggagagctggtccgatcttgatgaactcaagggggctaggagtctggagacagtgtatctggagcgaaatccactccagaaggatcctcagtataggaggaaggtcatgctcgctctaccaagcgtaagacagatagatgccacctttgttcgcttctag

SEQ ID NO: 131258 - DNA, 1083 bp, Artificial Sequence
  derived and/or modified sequence
atggccgcagagcgtggtgcaggccaacaacagtctcaagaaatgatggaagtggaccgtagggtggaatcagaggagagtggcgacgaagaaggcaagaagcatagttcaggcatcgtggcggacctttccgagcagtctctgaaagacggtgaagaacgtggagaggaggaccccgaggaggagcacgagctgcctgtggatatggaaacaatcaacctggacagggatgcagaggatgtggacctgaaccactatcggattgggaagatcgaagggttcgaggtgcttaagaaggtgaagaccttatgcctacggcagaatctgattaagtgtatagagaatcttgaggaactgcagagcctgcgagaattggacctgtacgacaatcagatcaagaagatcgagaacctagaagccctgaccgagcttgaaatcctcgatatcagcttcaatctccttcggaatatcgagggcgtagacaagttaacccgcctcaaaaaactgtttctggttaataacaagatttccaaaatcgagaacctcagtaatttacatcaacttcagatgctggaacttggttctaatagaatccgagccatcgagaatatcgacacactgactaacctagagagtctcttcctcggtaaaaacaagattactaagctgcagaatctggatgccttgacgaacctgaccgtgttaagcatgcaatccaaccgcttaactaaaatcgagggtctgcaaaatttggtgaacctgcgagagctgtacctcagccacaatggaatcgaagtgatcgaggggttggaaaacaataataaattgactatgctcgatattgctagtaataggattaaaaaaatcgaaaatatctcgcacctgacagagctgcaggaattttggatgaacgataacttgctggaaagctggtccgatctggatgagcttaagggggcacgctcacttgagacagtttacctggagcgaaacccgcttcagaaggatccccagtatcgacgcaaagtcatgctcgccctgccctcagtgaggcagattgatgcgacctttgtcaggttctag

SEQ ID NO: 131259 - DNA, 2386 bp, Artificial Sequence
  derived and/or modified sequence
agacgcagccagcgaggctcgcagaggtcagggatgcacgtaggactggcccgcaccttgcagccacggaaagatccgcctggcccgcggcccctccacgcctccgaggtcgagacagtgacataagtcaactctcaagcccagggcgtctctccactctgcctagacgtccactccgtctgcctgcagctacggctctgtgcgtcccgcttcgactccctctgctttccttcccagcttctcgcctccagactgttccggctccgccgcctgaaattacctgctctgggggaggcgcggcgcgcggcctcatgacggaactacaactcccatgaggcgctgggcccacgcaggcgcggcgcggctgaagtcgccgcgccggaatcccattggcagggccggctctgaggcgggagccctgattggctgaggggtctgaggcgacagattccggaaaggggaagagcagccaacatggcggcggaacgcggcgcggggcagcaacagtcgcaggagatgatggaggttgacaggcgggtcgagtctgaagaatccggcgatgaagaagggaagaaacacagcagtggcatcgtggccgacctcagtgaacagagcctgaaggatggggaggagcggggggaggaggacccagaagaagaacatgagctgcctgtggacatggaaaccatcaacctggacagagatgcagaggatgttgatttgaatcactatcgcatagggaagattgaaggatttgaggtactgaagaaagtgaagactctctgcctccgccaaaatttaattaaatgcattgagaatctggaggagctacagagtcttcgagagctggatctttacgacaaccagatcaagaagattgagaatctggaggcgctaacagagctggagattctagatatttcttttaatctgctgagaaacatcgaaggggttgacaagttgacacgactgaaaaaactcttcttggtcaacaataaaatcagtaaaattgagaacttaagcaacttacatcaactacagatgctagagctgggatctaaccgcatccgggcaatcgaaaatatcgacaccttaaccaacctggagagtttgtttttggggaaaaacaaaattactaaacttcagaacctggatgcgctcaccaacctgacagtcctcagtatgcagagcaaccggctgaccaagatcgagggtctgcagaacctggtgaacctgcgggagctgtaccttagccacaatggcatcgaggtcatcgagggcctggagaacaataacaaactcacgatgttggacattgcatcaaatagaatcaaaaagattgaaaatatcagccatctaacagagctgcaagagttctggatgaacgacaatctccttgagagctggagcgacctcgacgagctgaagggagccaggagcctggagacagtgtacctggagcggaaccccttgcagaaggacccccagtaccggcggaaggtcatgctcgccctcccctccgtgcggcagatcgatgccacgttcgtcaggttctgagtccttcttggctcctcatgtggtccctctcctcggaagaactgcccagccacgggtttttaacccacctgttgctcctgaggtcgtcactatatcaacagtcacaaacccaatggcaataaaggcactgacgatagctggcgcgcgcgacgtcacacaccattttcagatgccgttgcaattaaatcttgccacactgtcctcctgggtgattgttgacagttattgtagccacagagagaacataagacacgttgcgttcattcgctagaaatccctgtttccttctctcagaaggcagtcacagtccctacctgagtcgtgtgaaacacagggcctgagagtgctttacaggcattcacgtgctgtccgagtggcattcgggggctggcctagctggccctagtcctggtgtgcagggttcaggcagtcttgacctgcaacaaccgaggttttttagtcttttaacccagccattttcaattttttaaaaattaggtaagttaaaaaagctgggtaaaagctgactcagccctgtgtgcttgtgttccttagagctctccttcaaagagcgccgggcagggctgactgttttcacgtgtgcccgtcagttctcgccacatcccttgcctgtgggtgaaagctcaggtgtggggagggtgtcctgtgtcccacacggtgctgtgctgctgccagaatacgagtcccattgagcctctccaaagacggcctccaaggatctgaactcttggccactggtatagtggcctcctgttctcaccccattgttattttggcttttttaatataaaatgtacattgacagaca

SEQ ID NO: 131260 - DNA, 1592 bp, Artificial Sequence
  derived and/or modified sequence
aaaggaataatgggcgcctccgcccccgggccgggcagatgcggtttcctcccgactcgcgatcaaaatggcttctcgcctccagactgttccggctccgccgcctgaaattacctgctctgggggaggcgcggcgcgcggcctcatgacggaactacaactcccatgaggcgctgggcccacgcaggcgcggcgcggctgaagtcgccgcgccggaatcccattggcagggccggctctgaggcgggagccctgattggctgaggggtctgaggcgacagattccggaaaggggaagagcagccaacatggcggcggaacgcggcgcggggcagcaacagtcgcaggagatgatggaggttgacaggcgggtcgagtctgaagaatccggcgatgaagaagggaagaaacacagcagtggcatcgtggccgacctcagtgaacagagcctgaaggatggggaggagcggggggaggaggacccagaagaagaacatgagctgcctgtggacatggaaaccatcaacctggacagagatgcagaggatgttgatttgaatcactatcgcatagggaagattgaaggatttgaggtactgaagaaagtgaagactctctgcctccgccaaaatttaattaaatgcattgagaatctggaggagctacagagtcttcgagagctggatctttacgacaaccagatcaagaagattgagaatctggaggcgctaacagagctggagattctagatatttcttttaatctgctgagaaacatcgaaggggttgacaagttgacacgactgaaaaaactcttcttggtcaacaataaaatcagtaaaattgagaacttaagcaacttacatcaactacagatgctagagctgggatctaaccgcatccgggcaatcgaaaatatcgacaccttaaccaacctggagagtttgtttttggggaaaaacaaaattactaaacttcagaacctggatgcgctcaccaacctgacagtcctcagtatgcagagcaaccggctgaccaagatcgagggtctgcagaacctggtgaacctgcgggagctgtaccttagccacaatggcatcgaggtcatcgagggcctggagaacaataacaaactcacgatgttggacattgcatcaaatagaatcaaaaagattgaaaatatcagccatctaacagagctgcaagagttctggatgaacgacaatctccttgagagctggagcgacctcgacgagctgaagggagccaggagcctggagacagtgtacctggagcggaaccccttgcagaaggacccccagtaccggcggaaggtcatgctcgccctcccctccgtgcggcagatcgatgccacgttcgtcaggttctgagtccttcttggctcctcatgtggtccctctcctcggaagaactgcccagccacgggtttttaacccacctgttgctcctgaggtcgtcactatatcaacagtcacaaacccaatggcaataaaggcactgacgatagctggcgcgcgcgacgtcacacaccattttcagatgccgttgcaattaaatcttgccacactgtc

SEQ ID NO: 131261 - DNA, 1083 bp, Artificial Sequence
  derived and/or modified sequence
atggccgccgagagaggcgccggccagcagcagagccaggagatgatggaggtggacagaagagtggagagcgaggagagcggcgacgaggagggcaagaagcacagcagcggcatcgtggccgacctgagcgagcagagcctgaaggacggcgaggagagaggcgaggaggaccccgaggaggagcacgagctgcccgtggacatggagaccatcaacctggacagagacgccgaggacgtggacctgaaccactacagaatcggcaagatcgagggcttcgaggtgctgaagaaggtgaagaccctgtgcctgagacagaacctgatcaagtgcatcgagaacctggaggagctgcagagcctgagagagctggacctgtacgacaaccagatcaagaagatcgagaacctggaggccctgaccgagctggagatcctggacatcagcttcaacctgctgagaaacatcgagggcgtggacaagctgaccagactgaagaagctgttcctggtgaacaacaagatcagcaagatcgagaacctgagcaacctgcaccagctgcagatgctggagctgggcagcaacagaatcagagccatcgagaacatcgacaccctgaccaacctggagagcctgttcctgggcaagaacaagatcaccaagctgcagaacctggacgccctgaccaacctgaccgtgctgagcatgcagagcaacagactgaccaagatcgagggcctgcagaacctggtgaacctgagagagctgtacctgagccacaacggcatcgaggtgatcgagggcctggagaacaacaacaagctgaccatgctggacatcgccagcaacagaatcaagaagatcgagaacatcagccacctgaccgagctgcaggagttctggatgaacgacaacctgctggagagctggagcgacctggacgagctgaagggcgccagaagcctggagaccgtgtacctggagagaaaccccctgcagaaggacccccagtacagaagaaaggtgatgctggccctgcccagcgtgagacagatcgacgccaccttcgtgagattctag

SEQ ID NO: 131262 - protein, 940 aa, Artificial Sequence
  derived and/or modified sequence
MGSGPIDPKELLKGLDSFLNRDGEVKSVDGISKIFSLMKEARKMVSRCTYLNILLQTRSPEILVKFIDVGGYKLLNNWLTYSKTTNNIPLLQQILLTLQHLPLTVDHLKQNNTAKLVKQLSKSSEDEELRKLASVLVSDWMAVIRSQSSTQPAEKDKKKRKDEGKSRTTLPERPLTEVKAETRAEEAPEKKREKPKSLRTTAPSHAKFRSTGLELETPSLVPVKKNASTVVVSDKYNLKPIPLKRQSNVAAPGDATPPAEKKYKPLNTTPNATKEIKVKIIPPQPMEGLGFLDALNSAPVPGIKIKKKKKVLSPTAAKPSPFEGKTSTEPSTAKPSSPEPAPPSEAMDADRPGTPVPPVEVPELMDTASLEPGALDAKPVESPGDPNQLTRKGRKRKSVTWPEEGKLREYFYFELDETERVNVNKIKDFGEAAKREILSDRHAFETARRLSHDNMEEKVPWVCPRPLVLPSPLVTPGSNSQERYIQAEREKGILQELFLNKESPHEPDPEPYEPIPPKLIPLDEECSMDETPYVETLEPGGSGGSPDGAGGSKLPPVLANLMGSMGAGKGPQGPGGGGINVQEILTSIMGSPNSHPSEELLKQPDYSDKIKQMLVPHGLLGPGPIANGFPPGGPGGPKGMQHFPPGPGGPMPGPHGGPGGPVGPRLLGPPPPPRGGDPFWDGPGDPMRGGPMRGGPGPGPGPYHRGRGGRGGNEPPPPPPPFRGARGGRSGGGPPNGRGGPGGGMVGGGGHRPHEGPGGGMGNSSGHRPHEGPGGGMGSGHRPHEGPGGSMGGGGGHRPHEGPGGGISGGSGHRPHEGPGGGMGAGGGHRPHEGPGGSMGGSGGHRPHEGPGHGGPHGHRPHDVPGHRGHDHRGPPPHEHRGHDGPGHGGGGHRGHDGGHSHGGDMSNRPVCRHFMMKGNCRYENNCAFYHPGVNGPPLP

SEQ ID NO: 131263 - protein, 312 aa, Artificial Sequence
  derived and/or modified sequence
MGSGPIDPKELLKGLDSFLNRDGEVKSVDGISKIFSLMKEARKMVSRCTYLNILLQTRSPEILVKFIDVGGYKLLNNWLTYSKTTNNIPLLQQILLTLQHLPLTVDHLKQNNTAKLVKQLSKSSEDEELRKLASVLVSDWMAVIRSQSSTQPAEKDKKKRKDEGKSRTTLPERPLTEVKAETRAEEAPEKKREKPKSLRTTAPSHAKFRSTGLELETPSLVPVKKNASTVVVSDKYNLKPIPLKRQSNVAAPGDATPPAEKKYKPLNTTPNATKEIKVKIIPPQPMEGLGFLDALNSAPVPGIKIKKKKKKK

SEQ ID NO: 131264 - DNA, 2823 bp, Artificial Sequence
  derived and/or modified sequence
atgggcagcggcccaatcgatcctaaagagcttcttaaaggtctggatagcttcttgaaccgggacggagaggtgaaatccgtcgatggtatctcgaagatcttttccctgatgaaagaggcccgaaaaatggtgtcccgctgcacttatctcaatattctgctgcagacacgttcacccgagatcctcgtgaagttcatcgacgtgggaggatataaattgttgaacaattggcttacgtacagcaaaaccactaacaatattcccttactgcagcagatattgctaactttacagcatctgcccctaaccgtcgatcatctgaagcaaaacaatacagccaaattggtaaagcagttgtcgaagtcaagtgaagacgaggaactgaggaagctggcaagcgtgctagtcagtgactggatggcggtcatccgttctcagtcatctacgcagccggcagaaaaggacaagaaaaagcggaaggacgaaggtaagtcaagaactacactcccagagcgtccattgactgaggttaaggctgaaacccgagctgaggaagcacccgagaagaaacgggagaagcccaaaagtctgagaaccaccgctccatctcatgcaaagttcagatcgactggtttggagcttgagacgccctcactcgtccccgtgaaaaagaatgctagcacagtcgtggtgtccgataaatacaacctgaaacctatccccttgaaaagacaaagcaacgttgctgcacctggagacgccacacctccagctgagaaaaagtacaaacccctgaataccacacccaatgcaactaaagaaatcaaggttaagataatccctccacagcctatggaaggcttaggattcctggatgcattgaatagtgctcccgtgcctgggatcaagatcaagaaaaaaaaaaaggtgcttagcccaaccgccgcaaagccaagtcctttcgagggtaaaacatccaccgagccctctaccgccaaaccatcctcccctgagccagcccctccctctgaggccatggacgcggatcggccaggaacacctgtacctccggtagaggtaccggaactgatggacactgcctctcttgagccaggcgctctggatgccaagccagtcgagtctccaggggaccctaaccagttaacaaggaagggtagaaaacgtaaaagtgtcacttggcccgaggaggggaaattacgggagtatttctattttgaattggatgaaacagagcgagttaacgttaataaaattaaggacttcggcgaagccgccaaacgggagatcctatccgaccggcacgccttcgaaacagcccggcgtctgagccacgacaatatggaggaaaaggtgccctgggtgtgtccccgaccccttgtgctcccatccccacttgtgacaccagggagtaattcacaagagaggtatatccaggcagaacgcgagaagggaatccttcaggaactattcctcaacaaagagagtccacacgaacctgaccctgaaccgtacgaacctatccctcctaagctgatccctctagatgaagaatgcagtatggatgaaacaccctatgtcgagactctcgaaccaggtggcagcggcgggagccccgacggggccggaggcagtaaattgccgcccgtgctggccaatctgatgggcagcatgggggcaggaaaaggaccgcaaggccccggtggggggggaataaacgttcaagagattttaacatctataatggggtcaccgaatagtcatccatccgaggagttactcaagcagccagactattcagacaagatcaagcagatgctcgtacctcacgggctcctgggcccaggccccatagcgaatgggtttccccctgggggacctggcgggcccaaaggcatgcaacatttccctcccggaccggggggacccatgcctggcccgcacggaggtccaggtggacccgtaggtccgagactcctcggcccgccccctccgccaagagggggtgatcccttttgggacggacccggcgaccctatgcgcgggggtccaatgcgcggagggcctgggcccggccctggcccctaccacagaggacggggcggaagaggaggcaacgaacctccacccccgcccccaccctttcggggggcccgagggggtcgaagcggtggagggccacccaacggaaggggcgggcccggtggaggaatggttggaggaggcggacatagaccgcatgagggccctgggggcgggatgggaaactccagcgggcacaggccacatgagggcccgggcggtggtatggggagcgggcatcgcccgcatgagggtcctggcggatcaatgggtggcggcggaggacatagaccccacgaagggccgggcggaggcataagtggaggatccgggcatcggccgcacgaggggcccggggggggtatgggcgcaggaggtgggcacagacctcacgaaggacctggcggcagtatgggtggcagtggtggccaccgaccccacgagggacccgggcacggcggaccccacgggcatcgaccgcacgatgtgcctgggcataggggacatgaccacaggggaccacctccacatgagcacagaggccacgatggtcctggccatggtggcggcggccaccggggtcatgacggtggtcattcccacggaggtgatatgtccaaccggccggtatgccgccactttatgatgaagggcaattgtcgatatgagaacaattgtgcattttaccatcccggcgtcaacgggcctcctctgccatag

SEQ ID NO: 131265 - DNA, 2823 bp, Artificial Sequence
  derived and/or modified sequence
atggggtcaggcccgatcgaccctaaagaattactgaaaggattggattcatttttgaacagagacggggaagtcaagagtgtcgatgggatctctaaaatcttttcactcatgaaggaggccagaaaaatggtcagtagatgcacatatctcaacatcctcctgcagacaagaagccctgagattctagtaaagtttatcgacgttggtgggtataagttgctgaacaattggcttacttacagtaaaactaccaataacattcctctcttacagcagatccttctgactttgcagcatctcccactcaccgtggaccatcttaagcagaacaacaccgcaaaactcgttaagcagctgtcaaagagttcggaagacgaggaactacgcaaactagcctctgtgttagtctccgactggatggccgtgatccgatcccagtcctctactcagcccgctgagaaagataaaaagaagcgaaaagacgaagggaagtcgagaaccactctgcccgaaagacccttgactgaggttaaggccgagactagggcagaggaagccccggaaaaaaaacgggagaagcccaagtctctgaggactacagccccatctcacgccaagttccggagcaccggcctggaactagaaactccatctctggtgcccgtcaaaaagaacgcctcgactgttgtcgtcagcgataaatataatctcaaacctatacctctaaagcggcagtccaacgtcgcagccccaggcgatgccactcccccggcagaaaaaaaatacaaacctctgaacacaacccccaatgccacgaaggagattaaggtgaaaattattcccccgcagcctatggaggggctcggcttcctggatgccctgaacagcgcaccagtccctggcatcaagatcaagaagaagaagaaagtcctgtcaccaaccgccgccaaaccctccccctttgaagggaagacgtccaccgagccttcaacggcaaaaccgtcgagcccagagcccgctcctcccagtgaagccatggatgcggaccgccccggtacacccgttccgcccgttgaggtcccagagttgatggatactgccagcctggagcctggagccctcgacgccaagcccgtcgaaagcccgggagatcctaatcaattgactagaaaaggaagaaagagaaagagcgtaacttggcccgaagaagggaaactgcgggaatacttctactttgagttagatgagaccgagagggtaaatgtcaacaaaatcaaagactttggcgaggctgcaaagcgcgagattctttcggacagacatgctttcgagaccgcccggcgcctgtcgcacgacaatatggaggagaaggtcccttgggtgtgtccgagaccgttggttcttcctagccccttggtaacgcccggctctaattcacaggaaagatatattcaggccgaaagggaaaaggggatactccaggagctgttcctaaataaagaatccccccacgagcctgaccctgaaccgtacgagccgatacctcctaagctgatccccctcgatgaggagtgttccatggacgaaacaccatacgttgagactctggagccagggggtagcggtggatccccggacggcgccggagggtctaagcttccgcccgtgcttgcaaacctgatgggctccatgggggccggcaagggtcctcaaggccccggtggtggcggtatcaatgtgcaggaaattctaacatccatcatgggcagcccaaacagccacccaagcgaggagctgctgaaacagcccgactacagtgacaagattaagcagatgctggtgccacatgggcttctaggaccaggccccatcgcaaacggatttcctcccggcggtcccgggggccccaagggcatgcagcactttccacccggtcctggaggccccatgccaggtccgcacggtgggccaggcggcccagtcggccctagactgctgggcccccctccaccgcctagaggtggggaccccttctgggatgggcccggagacccaatgcggggtggtcctatgcggggcgggcctggtccaggccccggcccctaccataggggacgcggtggccgcggtggcaatgagccacctccgcccccacctcccttccgcggagcaagaggcggacggagtgggggcggccctccaaatgggaggggcggaccaggtggcggcatggtggggggaggaggccataggccacacgaggggcccgggggcggcatggggaactcttccgggcaccggcctcatgaaggaccaggtggtggcatgggatcgggccatcgaccacatgaggggcctggagggtccatggggggcggaggtggccacagaccccatgagggtcccggaggaggtataagtggaggcagcgggcacaggccccacgaaggacccgggggagggatgggcgcgggggggggccataggccacatgaaggccctggcggctccatgggtgggtctggggggcataggccacatgagggtcctggacatggaggccctcacggtcatagacctcacgatgtcccgggccacaggggacatgatcatcgcggacctccgccccatgaacacagaggacatgacggtccaggacatggagggggggggcatcgggggcatgacggcggccatagccacggtggcgacatgtctaatcggccggtttgtagacacttcatgatgaaaggtaactgtcgatatgagaacaattgtgccttctaccatcctggggtcaacggaccccctctcccctag

SEQ ID NO: 131266 - DNA, 2823 bp, Artificial Sequence
  derived and/or modified sequence
atgggaagtggacccattgacccaaaggaacttcttaagggactggattccttcctgaacagggacggggaggtgaaatcggtggacgggatcagtaaaatcttttcgctcatgaaggaggctcgcaaaatggtatctcgttgtacctacctgaatatactcctgcagacacggtctccagaaatcctggtcaagtttatagacgtagggggctacaaactacttaacaattggcttacttatagtaagacaacaaacaacatccccctactacagcagatcctcttaactttacaacacttacccttgactgtagaccatttgaagcaaaacaacaccgccaagcttgtgaagcagttaagtaaatcaagtgaggacgaagagttgaggaagctcgcctcagttctcgtttctgactggatggcagtcattcgctcacagtcttcaacccagccggctgagaaggacaagaagaagcgtaaggatgaggggaaatctaggacaaccctcccggagagaccacttaccgaagtgaaggccgagactcgcgcagaagaggctcccgaaaaaaagagagagaagccgaagagcttaagaaccacagctccgtctcatgctaagttcagatctacaggtttagagctcgaaacccccagtttggtgcccgtcaagaaaaacgccagtaccgtcgttgtgagcgacaagtacaaccttaaaccgattcccctgaaaagacagtccaacgtggccgcaccaggcgatgccaccccacccgccgaaaaaaaatataagccactgaataccaccccaaacgccacaaaagaaattaaggtcaaaatcattccccctcaaccaatggaaggactggggtttctggacgctcttaactctgcaccagtgcccgggataaaaatcaaaaaaaaaaaaaaggtactgagccctactgctgctaagcccagcccgttcgaaggcaaaacttctaccgagccttccactgccaagcccagctcccccgagcctgctccacctagcgaggctatggacgcggatcgacctggaacacccgtgccaccagtcgaagtgcctgaactgatggacaccgcgtccctggagcccggagccctagatgcaaagcccgtggaaagtcctggggatcccaaccagctgacccgcaaaggccggaaacggaagtccgtgacctggcccgaggagggtaaactgagagaatacttctactttgaattggatgagacggagcgggtgaacgtgaataaaattaaggatttcggtgaggctgcaaaacgggaaattttatctgacagacacgccttcgaaacagccaggcggctgtcccatgacaacatggaagaaaaggtaccatgggtctgtccgagacccctggttctgccctccccgcttgtgactcctgggagtaatagccaggagagatacatccaggcagaaagggagaaaggtatcctgcaagagctgtttctgaacaaagagtccccccatgaacctgaccctgagccctatgagccaataccacctaagctcattcctttggacgaggagtgctcgatggatgaaaccccatacgttgaaactttggagcctggaggctctggcggtagtccggacggggcaggagggagcaaattaccacctgtcctggccaatctgatgggctccatgggggccgggaaggggccccaggggcccgggggcgggggtattaacgttcaggagattttaacctcaatcatgggcagcccgaactcccatccgtctgaagagctgctgaagcaacctgactattcggataagattaagcagatgctcgtgcctcacggactgttaggaccaggccctatcgccaatgggttcccccccgggggtcctggtggccctaagggcatgcagcactttccgcctggccctggcggaccaatgccaggcccccatggggggcccgggggaccggtaggacctagactgttgggaccaccacctcctccgcgcggaggcgaccccttttgggatggacccggcgacccaatgagggggggcccaatgagaggcggacccggtcccgggccaggcccttaccaccggggcagaggcggaaggggcgggaacgaacctccccctcctcctcccccattcaggggcgctcgcggtgggcggtcaggcggaggccctcccaatggccgggggggccctggcggtggcatggtcggagggggcgggcacagacctcatgagggtccaggtggtggtatgggcaactctagtggtcatcggccacatgaagggcctggtggtggaatgggctccggacatcggccccatgaagggccaggtggttcaatgggaggaggcgggggtcaccgcccccacgagggaccaggcggtgggattagcggaggaagcggacaccggcctcacgaaggacctggcggcggtatgggggctggggggggccacaggccgcacgaagggcctggcggttccatgggtggcagtggtggccaccgcccccatgagggtcctggccatggggggcctcacgggcaccggcctcatgacgttcctggacacagaggccacgaccaccgtggacctcctccacatgagcacagaggacacgacgggcccggccacggaggcggcggccatagaggacatgacggcggccactctcatgggggcgacatgtccaataggcccgtttgtcgtcactttatgatgaaggggaattgcaggtacgaaaataactgtgctttctatcacccaggcgtaaatggtccccccctaccttag

SEQ ID NO: 131267 - DNA, 2823 bp, Artificial Sequence
  derived and/or modified sequence
atggggtccggacccatcgatcccaaagagctgctgaaaggcctggacagctttctcaatcgagacggcgaggtgaagagcgttgacgggatcagcaaaatattttcactgatgaaggaggctaggaaaatggtgtctagatgtacataccttaatatcctcctgcagaccaggtcccctgagattctcgtcaaatttattgacgttggcggatataaactgttaaacaattggctcacctactccaagaccaccaacaacattccgctcttacagcagattttactcacactgcaacacctgcctctgactgtggatcacctcaagcagaacaacaccgctaaacttgtaaagcagctgtccaaatcttctgaagatgaggagttgaggaaactggcaagcgttctcgtgagcgactggatggcggttattcgttctcagagcagtacacagcctgctgagaaagataaaaaaaagaggaaggatgagggtaaaagcagaaccacccttcccgaaagacccctgactgaagtgaaggcagaaacacgcgccgaggaagcaccggagaagaaacgtgagaagccgaaatcattacgcactacagcgcccagccatgcaaagtttagaagcacaggattggaactggaaaccccctccctggtgcctgtaaagaaaaatgcttctactgtggtggtctcagataagtacaacctgaagcccatccccctgaaaaggcagagcaacgtggccgcccctggagatgctacaccccccgcggagaagaaatataaacccctaaacacaactcccaacgctacaaaagaaatcaaggttaagattatcccacctcagcccatggaggggctgggatttctcgatgccttgaatagtgcccccgtacctgggatcaagattaaaaagaaaaaaaaggtgctttcccctaccgccgcaaaaccctcaccgttcgaagggaagaccagtaccgaacccagtacagctaaaccaagtagccccgagcctgccccaccaagcgaagcaatggacgcagacaggcccggtacccctgtgcccccagttgaggttcctgagctcatggataccgccagccttgaaccgggcgccttggacgcgaagcccgtggagagccccggcgacccaaatcagctgaccagaaagggtcgtaaacggaagagtgtaacttggcctgaggaaggtaagctgagggagtacttctacttcgagcttgatgaaaccgaacgggtgaacgttaacaaaatcaaggatttcggtgaagctgccaagagagaaattctttcagacaggcacgcattcgagactgcgagaaggctgagtcatgacaatatggaagaaaaagttccatgggtgtgccctaggcctctggtacttcccagccctctggtaacccccggcagtaattctcaggaacgctatatacaggccgaaagggagaaagggatcctgcaggagctgttcttgaataaggagtcgccacatgagcccgatccggagccctacgagcctatccccccgaagttgatccccctggatgaggagtgttctatggatgagactccctatgtcgaaacattggagcctggcgggagcggcggcagccctgacggggccgggggctcaaagctccctcctgtgctggccaacctgatggggtctatgggtgcagggaaaggcccccaggggcctggcggtggcggcattaatgttcaggagatcttgacgtccattatgggctctccaaactctcatccaagcgaggagctcctgaagcaacctgattactctgacaagatcaagcagatgctggtgcctcacggcctcctcggacctggcccaatcgccaacggcttcccaccaggaggcccgggggggcctaaaggcatgcagcattttccacccggccctggagggccgatgcctgggccacacgggggtcctggcggacccgtagggcctagactgctcggtccaccgccacccccgcgaggaggtgatccattctgggatggccccggagacccaatgcgcggtggtccaatgaggggcgggcctggtccagggccgggcccttatcacaggggtcggggcgggcgagggggtaacgagccgccacctcccccccctccctttagaggggctagaggagggagaagtggtggaggacctcctaatgggagaggtgggcccgggggcggtatggtcggtggcggcgggcataggcctcatgagggacctggcgggggcatggggaattcttccggccaccgtcctcacgagggccctgggggcggcatgggatccggacacagacctcacgagggaccgggcggctccatggggggggggggcgggcacagaccccatgaagggcccggtggcgggatctcaggcggctccgggcacaggccccacgaaggcccggggggagggatgggtgcaggcggcggacatcgcccacatgaaggcccaggtggatccatgggtggatcaggtggccacaggccacacgagggacccggtcacggggggccccacgggcatcgaccacacgacgtgcctgggcatagggggcatgaccatcgcggtcctccaccacacgagcaccgtgggcatgacggccctggccacggcggcggtggccaccggggccacgatggcggtcactcccacggcggggacatgtcaaatcgccctgtgtgccggcactttatgatgaaagggaactgccgctatgaaaacaattgtgcgttctaccatcccggcgtcaatgggcctccgcttccttag

SEQ ID NO: 131268 - DNA, 2823 bp, Artificial Sequence
  derived and/or modified sequence
atgggttcaggccccattgacccaaaggaactgctgaaggggttggactccttcctgaatagggatggcgaagttaaaagtgtagatggcattagcaagatctttagtttgatgaaggaggctagaaaaatggtgagccgctgtacctatttaaacattttattgcagactaggtcaccggaaatcttggtgaagtttattgatgtgggtggctataaactgttgaacaattggctgacctactctaaaaccaccaacaatattcctttgttgcagcagattctgctcacccttcagcatctgccccttaccgtggaccatctcaaacagaataacactgctaaacttgtcaaacaactgtccaaatcgagcgaagacgaggaactccggaagctcgcctctgttctggtttctgattggatggccgttattagatcccaatcctctacccaaccggctgaaaaagacaagaaaaaacgaaaggacgaagggaaatcaaggaccacgttacctgagcgacccttaacagaggtgaaagcggaaacccgggcagaggaggctcccgagaagaaacgtgagaagcccaagtctttgaggaccaccgctcctagtcacgctaaatttcggagcacggggctggagctggagactccaagtttggtccccgtgaagaagaatgcctccacagttgtagtctcagacaaatacaatcttaagcccatccctctaaagcgccagagcaacgtcgcggcacccggcgatgcgacaccccctgcggaaaaaaaatataaaccactcaacacaacccccaacgcaaccaaggaaatcaaggttaagattattcccccccaaccaatggaaggactgggttttttggacgcactcaacagcgctccagtacctggaattaaaattaaaaagaaaaaaaaggttctatcaccaaccgccgccaaaccatcccctttcgaaggcaagacctcaacagaaccgtcgacggcaaaaccctctagcccagaacctgccccaccatcagaggccatggatgccgaccggcctggaacaccagtgccccccgtggaggtgcccgaactgatggatactgcatcactcgaacctggagccctagatgccaagccagtggaatcgcccggggaccctaatcaattgacacgcaaaggaaggaagcgcaaaagtgttacatggcctgaagaaggaaagctcagagaatatttctactttgagttagacgaaaccgaaagggtgaatgtaaataaaatcaaagacttcggggaggcagcaaagcgcgaaattttatcggacagacacgctttcgagaccgctcgtaggctctcacacgataacatggaagaaaaagtgccgtgggtttgtccacgccctctcgtcctgccatctcccttggtcactccaggatcaaactcgcaagagcgatacatccaggcagaacgagagaagggcattctacaagagctcttcctgaataaagagagcccacatgagcccgacccagaaccatatgaaccaatcccgccaaaactgatcccgttggacgaggaatgcagcatggatgaaacaccgtacgtagagaccctggaacctggagggtccggtggatctcccgacggtgctggcgggtctaaacttccccccgtgctggccaacctgatgggatcaatgggggcgggtaagggcccacaaggccccggaggaggaggcatcaacgtccaagagatcctgacctcgatcatgggctctccgaattcgcaccctagtgaggaacttcttaagcagccagattattccgataaaattaagcagatgctcgtaccacacggacttctgggacctggcccgatcgcaaacgggttccctccgggtggccctgggggcccaaaaggaatgcagcactttcctccaggccctggcgggcccatgcccggaccccacgggggacccgggggaccagtcggcccacgattgctcgggccaccacctccaccacggggaggtgaccctttctgggatggacccggggatccaatgcggggaggtcctatgagagggggcccggggccaggacctggtccgtatcatcggggacgtggcggaaggggaggcaacgaacccccacccccgccacccccatttcgcggtgcaagggggggcagaagcggcggtggtcccccaaacgggaggggcggtcccggcggcggcatggtgggggggggtggacacaggccccacgagggccctggaggcggtatgggtaattcgagtggtcatcgaccgcacgaggggcccggtggaggcatggggagcggccaccgaccacacgagggccctgggggctccatgggaggcgggggcggccataggccgcatgaaggccctggcggtggcatcagtggtgggtccggccaccgccctcacgagggcccagggggcggtatgggcgccggcggcggccaccgaccccacgaggggccgggaggctctatgggtggctcgggcgggcacaggcctcacgaaggacccggacacggggggccacacggccaccgcccacatgacgtgcccgggcacagagggcacgatcatcggggccctcctccccacgagcatcggggtcacgatgggcctgggcacggtggagggggtcacagaggccatgatggtggccattcgcacggaggtgacatgtcaaataggcccgtctgtcgccattttatgatgaagggaaactgtagatacgagaacaattgcgctttttaccaccccggggtcaatggaccccctctgccttag

SEQ ID NO: 131269 - DNA, 2823 bp, Artificial Sequence
  derived and/or modified sequence
atgggatccgggcctatcgatcccaaggaactactcaagggattggactcgttcctgaacagagatggcgaagtcaagtccgttgatgggatcagtaaaatattctcgttgatgaaggaggccaggaaaatggtgagtcggtgcacatacctcaatatcctcttgcagacgcggtcaccagaaatcctggtgaagtttatcgatgtcgggggatacaaactgctgaacaactggcttacatattcaaagacaactaacaacattcctctgctccaacagatattactgaccttgcaacatctgcccctgaccgtagaccacttgaagcagaataacacggctaaactagttaagcaattatcaaaatcttcagaggacgaagaactaagaaagctggcttcagtacttgttagcgattggatggccgttatccgcagccagagctccacacagcctgctgagaaggacaagaagaaacggaaggatgaagggaagtcccggacaaccttgccagagagacctctaactgaagttaaggccgaaactcgggctgaagaggccccagaaaagaaaagagaaaagccaaagtctttgaggactactgcaccatcacacgcaaagtttcggtcaactggtctggaactggaaaccccatcgcttgtccctgttaaaaaaaacgctagtacggtagtcgtaagcgacaaatataacctcaagccgattccactcaaacgtcaatctaacgtggctgcaccaggggacgctacacctcccgctgaaaagaagtataaacccctcaacacaacaccgaatgcaaccaaggagattaaggtgaagatcattcctccccagcctatggaagggctaggattcctcgacgccctgaatagcgctccagtcccaggcatcaagattaaaaagaagaaaaaagtgctaagccctactgcagctaagccgtcccccttcgaggggaaaacatccacggagccttctactgccaagccatcttctcccgagcccgcgcctccttccgaagccatggacgcagatcgccccgggacgccagtaccacctgttgaagtgccagagctgatggacactgcctctttggagcccggcgcgctggatgcaaagccggtcgaatctccaggtgacccaaaccaactaaccaggaaaggccgtaaacggaaaagcgtgacctggccagaagaaggaaaactcagagagtatttctactttgaacttgacgaaaccgaacgggtaaacgtgaataaaattaaggacttcggcgaggctgcaaaacgcgaaatactttcagacagacacgctttcgagacagctaggcggctctcacacgacaacatggaagaaaaggtgccgtgggtgtgtccaaggccacttgttctgccgagcccgctcgttactcctggatccaattctcaagaacggtatattcaagccgagagggaaaaaggtatactgcaagagctgtttctgaataaagagagcccccatgaacccgatcctgagccttatgaacctattccccctaaattgattcctctggacgaggaatgtagtatggacgaaactccttatgttgagactctcgagccagggggcagcgggggcagccccgacggggcagggggctcaaaactgccaccagtattggccaacctaatgggatcaatgggtgcaggaaaaggacctcagggccccggaggtggaggcattaatgtccaggagattctgacatcaatcatgggaagtcctaacagccacccctcggaggagctgctcaaacagccagattattcagataagataaagcagatgctcgtgcctcatggcttgcttgggccaggcccgatcgcgaatggctttccacctgggggccctggtggtccaaaagggatgcagcacttccccccaggtccaggcgggcctatgcctggcccgcatggcggccctgggggcccagttggtccacgcctgctgggcccaccacccccccctagggggggcgatcccttctgggatggcccaggcgacccaatgaggggcggccctatgcgaggcggcccaggccctggacccgggccttaccaccgaggaagaggtggcagaggtggcaatgaaccaccgccacctccacccccattccgaggggcgcgcggaggcaggagtggcggcggccctccaaacggccggggaggtccaggaggaggcatggtcggaggcggaggacacagaccccatgaaggacccggcggtggcatggggaacagttcaggacaccgtccacacgaaggaccagggggcggcatggggagcggtcacagaccccatgaggggcccggcggcagtatgggggggggtgggggtcatagacctcacgaaggaccaggaggcggcatttcaggaggtagcgggcacaggcctcacgaaggacctggggggggcatgggtgctggaggaggacaccgaccccacgaagggcccgggggctctatggggggatctgggggacacagacctcacgaaggaccgggtcatgggggccctcatggccacaggccacatgacgtccctgggcatcgggggcacgaccacagaggacctccaccccacgagcatcgaggccacgacggaccaggccacggggggggtggccacaggggccacgatggaggacactcgcatggtggggatatgagcaacaggccggtatgccgacacttcatgatgaagggcaactgtaggtacgagaacaactgcgctttttaccacccgggagttaacggaccacccctgccatag

SEQ ID NO: 131270 - DNA, 2823 bp, Artificial Sequence
  derived and/or modified sequence
atgggaagcggaccaatcgatcctaaggaactgctcaaggggctggattcattccttaatcgggacggcgaggtgaagtctgtggacggtattagcaagattttcagcttgatgaaggaagcacgtaaaatggttagcagatgcacttacctaaatattttattacagaccaggagccctgaaattttagtcaagttcatcgacgtgggcggatacaaactcttgaataattggttgacttattctaagaccactaataacattcctctactgcagcagattttgttaaccctgcagcatcttccactcaccgtggaccatctcaagcaaaacaataccgctaagcttgttaagcagttgagcaaaagctcggaagatgaggaactgaggaagctcgctagtgtactagtgagtgattggatggcagtcattcgctctcagtcttccacacaaccagctgaaaaagataaaaagaagaggaaggatgaaggcaaaagcagaaccactcttcccgaacggccattgacggaggtgaaagctgaaacaagggccgaagaggcccccgagaaaaaaagagagaagcctaagtcactaagaactacggcccccagtcatgcaaagtttagaagcacgggcctggaactggaaaccccgtccttggtacctgtcaagaaaaacgcatcgacggtggtggtctctgacaagtacaatctcaaaccaatcccactgaaaaggcagtccaatgtcgcagctcctggagatgccactcctccggcagagaaaaaatataagccgctaaacactacccctaatgcaaccaaggagatcaaagtgaaaattatcccgccccagccaatggagggcttgggcttcttggacgccctcaacagcgccccagtgcctggaatcaaaatcaaaaaaaagaaaaaagtattgtcacctaccgcggcgaaacccagtccttttgaagggaaaacctccactgaaccatccaccgccaagcccagttcccctgagccagccccgcccagcgaagcaatggatgctgatcggccaggcacgccagtgcccccggttgaggtacctgaattaatggataccgcatccctggagccaggcgccctagacgccaagcccgtcgagtctcctggagaccccaatcagctgactcggaagggaaggaagcgcaaatccgttacttggccagaggagggaaagctcagagagtatttctattttgagttggatgagacagaacgcgtgaatgttaataagataaaggactttggcgaggccgctaaacgggagattctgagcgatcggcatgcatttgaaacggcccgcagactttcccacgataacatggaggaaaaggtgccgtgggtgtgccctcgccctctcgtactgccctccccacttgttactcctgggtcaaatagccaagagaggtacatccaggccgaaagggagaaaggtattctacaggagctgttcctaaataaagaaagcccccatgaacctgaccccgaaccttacgaacctatcccacctaagctgatcccacttgatgaagaatgttcaatggacgagacaccatatgtcgagaccctggaaccagggggctccggagggtcccccgatggagccgggggtagcaaactgcctccagttttagccaacctgatgggctccatgggcgctggtaaaggtcctcaggggccgggcgggggcggcatcaatgtccaggagattttaacatcaatcatgggatctcccaacagccacccatccgaggagctccttaagcagcccgattacagcgataaaatcaaacagatgctggtccctcacggcctccttgggcccggtccgatagcaaatgggttcccaccaggtggacctggcggaccaaaagggatgcagcactttcccccggggcctggaggtccgatgcccgggccgcatggaggccctggcggccctgtcgggcctcggttactggggcctcctcccccaccccgcggcggcgacccattctgggacggccccggtgacccgatgcgaggaggtccaatgcgcggcggccctgggcctggccccgggccataccaccgtgggcgggggggacgcggcggcaatgagccacctcccccaccgccacccttcaggggggcgagaggcggacggagcggcggtggcccacccaacggcagagggggcccaggcggagggatggtcgggggtggcggccaccgacctcacgagggaccgggggggggtatggggaactctagcggacaccggccccatgaagggcccggcggaggcatgggtagtggccaccggccccatgaaggacccggggggtctatgggaggtggcggtggccatcgaccacacgagggaccgggaggcggtatcagcggcggctcaggccaccgcccccacgaggggcctggcggcgggatgggcgccggggggggccataggccacatgaaggaccgggcggcagtatgggcggatcggggggacacagacctcacgaggggccgggccatggcggaccccatggacataggccccatgatgtccctggtcatcgcggacatgatcaccgaggaccacctccacacgagcacaggggacacgacggccccggccacggtggaggcggccatcgcgggcatgacggcggtcactcgcatggcggggatatgtccaatagacctgtttgtcgtcatttcatgatgaagggtaattgtcggtacgaaaacaactgcgccttctatcaccctggggtaaatggaccacctctaccatag

SEQ ID NO: 131271 - DNA, 939 bp, Artificial Sequence
  derived and/or modified sequence
atgggttctggccccatcgacccaaaggagcttctgaaggggcttgattccttcctgaacagggacggtgaggtcaaatcagtggatgggatatctaaaatcttttcattgatgaaggaggctcgtaagatggtcagccggtgtacttacctgaacattctgctccagacaagatccccagagatcttggtgaagtttattgacgtgggagggtataaattgctgaacaattggctgacctattccaagactaccaacaacattccattgttgcagcagattctgctaactctgcagcatcttcctctaaccgtggatcacttgaagcaaaataacactgcaaaattggtcaagcagctgtctaagtcttcagaagacgaagagttacggaagctggcgagtgtactggtgagcgattggatggcagtcattcggagccagagctccacacaacctgccgagaaggataagaaaaaacgcaaggatgaggggaagagtcggacaactctgcctgagaggcccctaacagaggtaaaggctgaaacacgggccgaggaggctccagagaaaaaaagggagaagccgaaaagtttgcgcacaacagccccgagtcacgccaagttcaggagtactggcctggagctggagacccctagcttagtgcccgtcaagaaaaatgctagcaccgttgtggtatctgacaagtacaacctcaaaccgatcccactaaagagacagagcaatgtggcggcccccggcgatgcaacaccaccggccgagaagaagtataagcccctgaataccactcccaacgcaacaaaagaaataaaagttaagatcataccgccccaacctatggaaggcctgggattcctcgatgcactcaattcagccccggtgcctgggattaaaatcaaaaaaaaaaagaagaagaagtag

SEQ ID NO: 131272 - DNA, 939 bp, Artificial Sequence
  derived and/or modified sequence
atggggagcggcccaattgatccgaaggagttactcaagggactggacagcttcttaaaccgggacggtgaagtaaaatcagtcgatggcataagtaagatcttttctctgatgaaggaggcccgcaaaatggtaagtcgttgcacgtacctgaatattcttttgcagacaaggtctccagagatcttagtaaaatttatcgatgtgggcgggtataaactactcaataattggttgacctactccaagacaactaacaatatccccctgctgcagcagattttgttgacgcttcaacatttgcccctgacagtggatcacctcaaacagaacaataccgcaaaactggtgaagcagctcagcaagtccagcgaggacgaagagttacgcaaacttgcctcggtactggtttcggactggatggccgtaatccgcagtcagagctccactcagccggctgagaaagacaaaaaaaaaaggaaagacgagggtaagtccaggacgacgttgcctgagcggcctctgaccgaggtgaaggcagaaacgagagccgaagaggctcccgaaaagaagagagaaaaaccaaagtcgttgcggaccacagcaccctctcacgccaaatttcggtccaccggcctcgagctcgagaccccgagcctcgtaccagtgaagaaaaacgcttcaacagtggtggtgtcagataagtacaacctgaaaccaatacctctgaaacggcagagcaatgtggccgcccctggagacgcgacgccaccagcggagaagaagtataagcctcttaatacaaccccgaatgccacgaaagaaattaaagtgaagatcattcctccccaaccaatggaggggctgggctttctagacgcactgaatagtgcaccagtgcccgggatcaaaattaaaaaaaagaagaaaaagaagtag

SEQ ID NO: 131273 - DNA, 939 bp, Artificial Sequence
  derived and/or modified sequence
atgggctccggccccattgatcccaaggaactgctgaaagggctggactctttcctgaacagagatggtgaggtaaagtccgtagatgggatatctaaaatcttcagcctgatgaaagaggcccggaagatggtgagccggtgtacatacttgaacatcttactccagacccggagccctgaaattctggtgaaatttatcgacgtgggcggatataagttgctaaacaattggctcacctatagtaaaaccactaataacatccccctgctgcaacaaattctgctgaccctgcagcatcttcccttaaccgtggatcacctgaagcagaacaatacagccaagctggtgaaacagttgtcgaaaagctctgaagatgaggaacttcggaagctggcatccgtgctggtctcagattggatggctgtgatacggtctcagtcctctacacagccagcagagaaagataagaaaaaaagaaaagatgagggtaaatcacgcacgactctgcctgagagacctttgactgaggtgaaagccgaaacacgggctgaggaggctcctgagaaaaaacgggagaaaccgaaaagcctgcgcaccacggccccatcgcacgcgaaattccggtctaccggtttagagcttgagacacccagtttggtcccggtcaagaaaaacgcctcgaccgttgtcgtgagcgacaagtataatctgaagcccatacctctaaaaaggcagagcaatgtagccgcccctggcgacgcgacccccccggcggaaaagaaatacaaacccctgaacactacaccaaatgccaccaaggagatcaaggtcaaaattatcccaccacagcccatggagggcctagggtttctggacgcacttaactctgctccggtgcccgggatcaagatcaaaaagaaaaagaaaaagaaatag

SEQ ID NO: 131274 - DNA, 939 bp, Artificial Sequence
  derived and/or modified sequence
atgggctctgggccaatcgaccctaaagagctgttgaaaggcttagattccttcctgaacagagatggagaggttaagtctgtcgacgggatctctaagattttttccctgatgaaagaggcacgtaaaatggtgtcgcgctgcacatacctgaacattcttctgcaaacccgttcacccgaaatcttggtgaaattcatcgacgtagggggctacaaactgctgaacaattggctgacatactcgaagacaactaataacatcccactgctccagcagattttgttgacgctgcagcacctgccgctgacggttgatcacctcaagcagaacaataccgccaaactggtcaagcagctgtctaagagctctgaagacgaagagttacgaaaactcgcaagcgtgctcgtgagcgattggatggcagtgatccggagtcaaagctcaacgcagcccgctgagaaggacaaaaaaaaaagaaaggatgagggcaagtcccgtacaacattgcccgagagacccctgactgaggtgaaggctgagacaagagctgaggaggcccctgagaagaaaagggaaaagcctaaaagcctacgcaccacagcacctagccacgccaagtttaggagcactggcttagagctcgagaccccaagtcttgtcccggtgaaaaagaacgcctctacggtggtggtttctgataagtataatctcaaaccaatccccttgaaaaggcagtcaaacgtcgcagctcccggagatgccaccccaccagctgaaaaaaagtacaagcctctgaatacaactccgaacgctacgaaggagatcaaggtgaagattatccccccacagccaatggaaggtttgggctttcttgatgctttgaactccgctcccgtgccaggaattaagatcaagaagaaaaagaaaaaaaaatag

SEQ ID NO: 131275 - DNA, 939 bp, Artificial Sequence
  derived and/or modified sequence
atgggttccggcccaatcgaccccaaggagctgctcaagggcctggactccttcctcaaccgtgatggggaggtgaaatcagtggacggcataagcaagatttttagtctgatgaaagaagcccggaaaatggtgtctcgctgtacatacttaaatattctgctacagactcggagccccgagattctcgtgaaatttattgatgttggcggatacaaattgctgaacaactggttgacttactctaagacaaccaacaacattccactgcttcaacaaatccttttaaccctgcagcaccttcccctgacggtggaccacctaaagcagaacaataccgcaaagctagtcaaacagctgtccaaaagttccgaagatgaagaactgcggaagctggctagcgtcctggtgtcagactggatggccgtgatacgctcacagagtagcacacaacctgcggagaaggataagaagaagaggaaagacgagggcaagagtcgcaccactctaccagaacgtcccctcacagaggtgaaggcagagacaagggccgaagaagcaccagagaagaaacgagaaaaaccaaagagcctccggacaacggctccatcacacgccaagttcagatcaactgggctggagttagaaaccccatcactggtacctgttaagaagaatgcatctactgtggtcgtgtcagacaaatacaatctcaaaccaattccgctgaagcgacagtcgaacgttgcagccccgggcgacgcgacccccccagccgagaagaagtacaaacccttaaacacaacgccaaacgcaaccaaggagatcaaggtcaaaataatccccccacaacccatggaaggattgggctttctggacgcactcaactcggcacccgtgcctggcatcaagattaaaaaaaaaaaaaagaagaaatag

SEQ ID NO: 131276 - DNA, 939 bp, Artificial Sequence
  derived and/or modified sequence
atgggctctggcccgattgatccgaaagagcttctcaagggattagactctttccttaatagggacggcgaagtaaagagcgtggatggcattagtaaaatcttttcattgatgaaggaggctcggaagatggtgagtcggtgtacatacctgaacatcctgttgcagactcgcagccccgagatattagtcaagtttattgacgtgggaggctacaaattacttaataattggctcacctattctaaaaccactaataacatacccttgcttcaacaaattctgctcaccctgcagcacctgccgcttactgtcgatcacctcaagcaaaataatacggccaaactcgtaaagcaactctccaagagcagcgaagacgaggaactaagaaagctagccagcgtccttgtaagcgactggatggctgtgattcgtagtcagagctctacccagcctgcagagaaggataaaaaaaagcgaaaagacgaggggaagtcaaggactaccttgcccgagagacccctgacggaagtcaaggcagagacacgagccgaagaggctcctgagaagaagcgcgagaaaccaaagtccctgagaaccaccgctccaagtcatgcaaagttcagatccacaggcctcgaacttgagacaccttccttggttcccgtgaagaaaaatgcctcaaccgtggtcgtctcagacaaatacaacttgaaacctatccccctaaagagacagagcaacgttgctgcccccggggacgcaacgcctcccgctgagaagaagtacaaacccctgaataccaccccaaacgcaacaaaggagatcaaggtgaagatcatacctccacagcccatggaaggcctcggctttctcgacgcactcaactctgcgcccgtccccggaatcaagattaagaaaaaaaagaagaaaaaatag

SEQ ID NO: 131277 - DNA, 939 bp, Artificial Sequence
  derived and/or modified sequence
atgggatctggcccaatcgacccgaaagaactgctaaagggccttgacagcttcctgaatagggatggagaagtgaaatcagtagatggcatatccaaaattttctcacttatgaaggaagcgcgcaagatggtttcccggtgcacctacctcaatatcctactccagacacggtctccagagatcctggtaaagtttatcgatgtcggggggtataagttactgaataattggctgacttattctaagaccactaacaacatacctcttctccagcagattctgcttaccctgcaacatctaccattgacagtggatcacttaaagcaaaacaatacagctaaactggtgaaacagctgtctaaatcaagcgaggacgaggagctgaggaaacttgcctccgtcctcgtgtctgactggatggctgtcattcgtagccagtcgtccacccagccggctgaaaaagacaagaaaaaaagaaaagacgaagggaaatcaaggacaacgctgcctgagcgcccgcttactgaggtgaaagcagaaacgcgcgcagaggaagccccggagaagaaaagagagaagcccaagtcattgaggacgactgcccctagccatgcaaaattccgctccaccggcctagaactcgagactccgagtctggtgccagttaagaagaatgcatccactgtggtagtctcagacaaatataacctgaaaccgataccccttaaacggcagagtaacgtcgctgcaccgggagatgctacaccgcctgcagagaagaagtataaacctttgaacaccaccccaaacgccacaaaggaaataaaagtcaagatcatcccaccccaacccatggagggtctgggtttcctcgatgcactaaattccgcccccgtgcctggcatcaagatcaagaaaaagaagaagaaaaagtag

SEQ ID NO: 131278 - DNA, 2823 bp, Artificial Sequence
  derived and/or modified sequence
atgggcagcggccccatcgaccccaaggagctgctgaagggcctggacagcttcctgaacagagatggagaggtgaagtctgtggatggcatcagcaagatcttcagcctgatgaaggaggccaggaagatggtgagccgctgcacctacctgaacatcctgctgcagaccaggagccctgagatcctggtgaagttcattgatgtgggcggctacaagctgctgaacaactggctgacctacagcaagaccaccaacaacatccccctgctgcagcagatcctgctgaccctgcagcacctgcccctgactgtggaccacctgaagcagaacaacacagccaagctggtgaagcagctgagcaagagcagtgaagatgaggagctgaggaagctggcctctgtgctggtgtctgactggatggccgtcatccgcagccagagcagcacccagcctgctgagaaggacaagaagaagaggaaggatgagggcaagagcaggaccaccctgcctgagcggcccctgacagaggtgaaggccgagaccagggctgaggaggcccctgagaagaagcgggagaagcccaagagcctgcggaccacagcccccagccacgccaagttccgcagcacaggcctggagctggagacccccagcctggtgcctgtgaagaagaatgccagcacagtggtggtgtctgacaagtacaacctgaagcccatccccctgaagaggcagagcaatgtggccgcccctggagatgccaccccacctgctgagaagaagtacaagcccctgaacaccaccccaaatgccaccaaggagatcaaggtgaagatcatccccccccagcccatggagggcctgggcttcctggatgccctgaacagcgcccctgtgcccggcatcaagatcaagaagaagaagaaggtgctgagccccacagctgccaagcccagcccctttgagggcaagaccagcacagagcccagcacagccaagcccagcagccctgagcccgccccacccagcgaggccatggatgctgaccggcccggcacccctgtgccccctgtggaggtgcctgagctgatggacacagccagcctggagcccggggccctggatgccaagcctgtggagagccctggggaccccaaccagctgaccaggaagggcaggaagaggaagtctgtgacctggccagaggagggcaagctgcgggagtacttctactttgagctggatgaaacagagcgggtgaatgtgaacaagatcaaggactttggagaggccgccaagcgggagatcctgagtgacagacatgcctttgaaacagcccggcggctgagccatgacaacatggaggagaaggtgccctgggtgtgcccccggcccctggtgctgcccagccccctggtgaccccaggcagcaacagccaggagcgctacatccaggccgagcgggagaagggcatcctgcaggagctgttcctgaacaaggagagcccccatgagccagaccctgagccctatgagcccatcccccccaagctgatccccctggatgaagaatgttccatggatgagaccccctacgtggagaccctggagcccggcggcagcggcggcagcccagatggagctgggggcagcaagctgccccctgtgctggccaacctgatgggctccatgggcgctgggaagggcccccagggccctgggggcggcggcatcaacgtgcaggagatcctgaccagcatcatgggcagccccaacagccaccccagcgaggagctgctgaagcagcctgactacagcgacaagatcaagcagatgctggtgccccacggcctgctgggccctggccccatcgccaacggcttccccccaggcggccctgggggccccaagggcatgcagcacttccccccaggccctgggggccccatgcctggcccccatggaggccctgggggccctgtgggcccccggctgctgggccccccacctccaccccggggcggggaccccttctgggatggccctggggaccccatgagaggaggccccatgaggggcggccctggccctggccctggcccctaccaccggggccggggcggccggggcggcaatgaacctcctcctcctcctccacccttccggggggcccggggcggccgcagcggcggcggcccccccaacggccggggcggccctgggggcggcatggtgggcggcggcggccaccggccccatgagggccctgggggcggcatgggcaacagcagcggccaccggccccatgagggccctgggggcggcatgggcagcggccaccggccccatgagggccctgggggctccatgggcggcggcggcggccaccggccccatgagggccctgggggcggcatcagcggcggcagcggccaccggccccatgagggccctgggggcggcatgggcgccggcggcggccaccggccccatgagggccctgggggctccatgggcggcagcggcggccaccggccccatgagggccctggccatggaggcccccacggccaccggccccatgatgtgcccggccaccggggccatgaccaccggggccccccacctcatgagcaccggggccatgatggccctggccacggcggcggcggccaccggggccatgatggcggccacagccacggcggggacatgagcaacagacctgtgtgccgccacttcatgatgaagggcaactgccgctatgagaacaactgtgccttctaccaccctggggtgaatggaccacccctgccctag

SEQ ID NO: 131279 - DNA, 939 bp, Artificial Sequence
  derived and/or modified sequence
atgggcagcggccccatcgaccccaaggagctgctgaagggcctggacagcttcctgaacagagatggagaggtgaagtctgtggatggcatcagcaagatcttcagcctgatgaaggaggccaggaagatggtgagccgctgcacctacctgaacatcctgctgcagaccaggagccctgagatcctggtgaagttcattgatgtgggcggctacaagctgctgaacaactggctgacctacagcaagaccaccaacaacatccccctgctgcagcagatcctgctgaccctgcagcacctgcccctgactgtggaccacctgaagcagaacaacacagccaagctggtgaagcagctgagcaagagcagtgaagatgaggagctgaggaagctggcctctgtgctggtgtctgactggatggccgtcatccgcagccagagcagcacccagcctgctgagaaggacaagaagaagaggaaggatgagggcaagagcaggaccaccctgcctgagcggcccctgacagaggtgaaggccgagaccagggctgaggaggcccctgagaagaagcgggagaagcccaagagcctgcggaccacagcccccagccacgccaagttccgcagcacaggcctggagctggagacccccagcctggtgcctgtgaagaagaatgccagcacagtggtggtgtctgacaagtacaacctgaagcccatccccctgaagaggcagagcaatgtggccgcccctggagatgccaccccacctgctgagaagaagtacaagcccctgaacaccaccccaaatgccaccaaggagatcaaggtgaagatcatccccccccagcccatggagggcctgggcttcctggatgccctgaacagcgcccctgtgcccggcatcaagatcaagaagaagaagaagaagaagtag

SEQ ID NO: 131280 - DNA, 4525 bp, Artificial Sequence
  derived and/or modified sequence
cattctggggttcgtttagaggtttgaattttctcggagaaagacaggccggccacgaggaaaacagaaacaagccgcagcaacatctaagcccttgaaaggatcctgagagaggggggaaagggaaaacagcagccaccagcccaaccacttgtgtcttctgccccttcccacctatcttgcccaccccaccagcccacgctgcttgggacttgaaatctgtggccgaaggaccgtcactacataacttcaaaaataatcaaccaccctcccttcccaaaccacccaaattcactcatccagcgtttacttttttgaatccactcagaacttttttctgcgacccccctccctaaatggagttgggtgggggggaaatgaatactgagttggcctttattttttaaaagactttttgatccaatgaggccccctaaataattgagttttgggtcctggttggttgttttattttttttcctccaaaattttaccccctcccccctgagcccgaggtgctgacgtcgcaaaaaaattggataaaaccaccatcatgggttcgggtcccatagaccccaaagaacttctcaagggcctggacagcttccttaaccgagatggggaagtcaaaagtgtggatgggatttccaagatcttcagtttgatgaaggaagcacgaaagatggtgagtcgatgcacttacttgaacattctcctgcagacccgttcaccagaaatattggtcaaatttattgacgttggcggctacaaacttcttaacaattggctgacgtattcaaagacaaccaacaacattcccctcctccagcaaattctactgaccctgcagcatctaccgctcactgtagaccatctcaagcagaacaacacagctaaactggtgaagcagctgagcaagtcaagtgaggatgaagagctccggaaattggcctcagtccttgtcagcgactggatggctgtcatccgctctcagagcagtacccagcctgctgagaaagataagaagaaacgtaaagatgaaggaaaaagtcgaactacccttcctgagcgacctttgacagaggtgaaggctgagacccgggctgaggaggccccagagaagaagagggagaagcccaagtctcttcgcaccacagcacccagtcatgccaagttccgttccactggactagagctggagacaccatccttggtgcctgtgaagaagaatgccagcacagtggtggtttctgacaagtacaaccttaaacccatccccctcaaacgtcagagcaacgtagctgctccaggagatgccactccccctgcagagaagaaatacaagccactcaacacaacacctaatgccaccaaagagatcaaagtgaagatcatcccgccacagcctatggagggcctgggctttctggatgctcttaattcagcccctgttccaggcatcaaaattaagaagaaaaaaaaagtactgtcacctacggctgccaagccaagcccctttgaagggaaaacgagcacagaaccaagcacagccaaaccttcttccccagaaccagcaccaccttctgaggcaatggacgcagaccgtccaggcaccccggttccccctgttgaagtcccggagctcatggatacagcctctttggagccaggagctctggatgccaagccagtggagagtcctggagatcctaaccaactgacccggaaaggcaggaagaggaaaagtgtgacatggcctgaggaaggcaaactgagagaatatttctattttgaattggatgaaactgaacgagtaaatgtgaataagatcaaggactttggtgaggcggctaagcgagagatactgtcagaccgacatgcatttgagacagcgcggcgtctgagccatgataacatggaggagaaggtgccctgggtgtgcccccggcccctggttctgccctcacctcttgtcacccctggaagcaatagtcaggagcgatatatccaggctgagcgggagaagggaatccttcaggagctcttcctgaacaaggagagtcctcatgagcctgatcctgagccctacgagcccataccccctaaactcatccccctagatgaggagtgttccatggatgagactccgtatgttgagactctggaacctggggggtcaggtggctcacctgatggggcaggaggctccaagttgcctccagttctggccaatcttatgggaagcatgggtgctggaaagggcccccaaggccctggaggaggaggcattaatgtccaagagatcctcacctccatcatgggtagcccaaacagtcatccttcagaggaactactgaaacaaccagactattcggacaagatcaagcagatgctggtgccacatggactcctaggccctggcccaatagccaatggtttcccaccagggggtcctgggggccccaagggcatgcagcactttccccctggacctgggggacctatgccaggtccccatggaggccctggtgggccagtgggtccacgtcttctgggtcctccaccccctccccggggaggtgatcccttctgggatggcccgggcgaccctatgcggggtggcccaatgcgggggggtccaggaccaggtcctggaccataccatagaggccgaggtggccgaggaggaaacgaacctcctcctcctcctcctccattccgaggcgccagaggaggtcgctctggaggaggacccccaaatggacgagggggccctggtgggggcatggttggaggtggtgggcatcgtcctcacgaaggccctggtgggggcatgggcaacagcagtggacatcgtccccacgaaggccctggcggtggcatgggaagtgggcatcgcccccatgaaggccctggtggtagcatgggtgggggtggaggacatcgtccccacgaaggccctggcggtggcatcagtggtggcagtggccatcgtccccatgaaggccctggcggaggaatgggtgccggtggtggacatcgcccccacgaaggccctggcggaagcatgggtggaagtggtggacatcgtccccatgaaggccctggacacggggggccccatggccaccggcctcatgatgtccctggtcaccgaggccatgaccatcgagggccgccacctcatgagcaccgtggccatgatggtcctggccacgggggagggggccaccgagggcacgatggaggccacagccatggaggagacatgtcaaaccgccctgtctgccgacatttcatgatgaagggcaactgccgctatgagaacaactgtgccttctaccacccgggtgtcaatgggccccccctgccctagggaccatttgcctgccctgttcacacaacccctgtggactgcagcctcgctctttccaccctgttatggcttctgtgaggcccattttcccttttccccagctgatgaggagccggccccctcagttcccacttgcttgggttcctgggggttttctgatcactggtgcgcattgatgtacatattttcctccagtctggggaggagagagactggaaacgttcctggactgctgaagaggagacccagttggcttcactttttgagaagattcgccctgtaccccaaacccctttccagtattacccttaatgcttgagaacctaaagctggttatcctggcgaacacccctacccttctattgcgggtccccacatgcacacagaactctgacacaggatcagctgcacttaagaaatcatcccagctaagttcattattcctcatggggtggggagatgctgaaaggggtattgtatatcccactgcactgagagggctcaatcagctggatttgagttctggaacacacatcatccccacccctcccccagcgtgggctcaccattcttagtcctttctcaagtgggaccttcaactttctgtgaacacccagtctgcgtcctgggtctgctaggttcgatgatggcgaactcgtatctgcatccggtgcaagttttagctggcagaggtgagaccggtggtgctggtctgcctttgccaactatagccagtctggagacttgataaaatacttcagtgagaccagcttctcatcaacttgggcccggcgtgctgggcctgaaagtcacactacatgcactgcctttgggagtcagctcactccctgctcccacctggaaccttgccagcgtgaaggaggcttccaggtacttcaccctgtcaaccacctctgaatccccaccaggcgccttcctgggtggattcaacaagatgattttgccctttcccagttctctccttcactttggcatcagttgttttctatgaaaacagtggattggttgggttttgtgcagggtcttgggttagagccaaaatggatttgaggatgagtatttttttttttggttttgtatattttgtacattaataataaacagtggaaagagaagcagcttatttaa

SEQ ID NO: 131281 - DNA, 1488 bp, Artificial Sequence
  derived and/or modified sequence
attctggggttcgtttagaggtttgaattttctcggagaaagacaggccggccacgaggaaaacagaaacaagccgcagcaacatctaagcccttgaaaggatcctgagagaggggggaaagggaaaacagcagccaccagcccaaccacttgtgtcttctgccccttcccacctatcttgcccaccccaccagcccacgctgcttgggacttgaaatctgtggccgaaggaccgtcactacataacttcaaaaataatcaaccaccctcccttcccaaaccacccaaattcactcatccagcgtttacttttttgaatccactcagaacttttttctgcgacccccctccctaaatggagttgggtgggggggaaatgaatactgagttggcctttattttttaaaagactttttgatccaatgaggccccctaaataattgagttttgggtcctggttggttgttttattttttttcctccaaaattttaccccctcccccctgagcccgaggtgctgacgtcgcaaaaaaattggataaaaccaccatcatgggttcgggtcccatagaccccaaagaacttctcaagggcctggacagcttccttaaccgagatggggaagtcaaaagtgtggatgggatttccaagatcttcagtttgatgaaggaagcacgaaagatggtgagtcgatgcacttacttgaacattctcctgcagacccgttcaccagaaatattggtcaaatttattgacgttggcggctacaaacttcttaacaattggctgacgtattcaaagacaaccaacaacattcccctcctccagcaaattctactgaccctgcagcatctaccgctcactgtagaccatctcaagcagaacaacacagctaaactggtgaagcagctgagcaagtcaagtgaggatgaagagctccggaaattggcctcagtccttgtcagcgactggatggctgtcatccgctctcagagcagtacccagcctgctgagaaagataagaagaaacgtaaagatgaaggaaaaagtcgaactacccttcctgagcgacctttgacagaggtgaaggctgagacccgggctgaggaggccccagagaagaagagggagaagcccaagtctcttcgcaccacagcacccagtcatgccaagttccgttccactggactagagctggagacaccatccttggtgcctgtgaagaagaatgccagcacagtggtggtttctgacaagtacaaccttaaacccatccccctcaaacgtcagagcaacgtagctgctccaggagatgccactccccctgcagagaagaaatacaagccactcaacacaacacctaatgccaccaaagagatcaaagtgaagatcatcccgccacagcctatggagggcctgggctttctggatgctcttaattcagcccctgttccaggcatcaaaattaagaagaaaaaaaaaaagaaa

SEQ ID NO: 131282 - DNA, 2823 bp, Artificial Sequence
  derived and/or modified sequence
atgggcagcggccccatcgaccccaaggagctgctgaagggcctggacagctttcttaaccgcgatggtgaagtgaaatccgttgatggcatcagcaaaatcttttccctgatgaaggaggctcgtaaaatggtcagccgttgcacgtacctgaatatacttctgcaaactagatcccctgagattttagtcaaattcattgacgtcggtggatacaagctcctaaacaactggctcacgtacagtaaaacgacgaacaatataccactcctccagcagattctcttaaccctgcagcacctgccattgacagtcgaccacctgaagcagaataacaccgccaagctggtcaaacaactttcaaagtcgagcgaagacgaggagttgaggaaacttgcaagcgtgcttgtgagcgattggatggcagtgattcggtctcagtcaagtacccagcccgctgagaaagacaaaaagaaacggaaagacgagggcaagagtagaacaacccttccagagagaccattaaccgaggtgaaagctgaaacccgagctgaagaggctcctgagaagaaacgagaaaaacccaagtccctaagaaccaccgcaccatcacacgccaaatttcgctccaccggcctggagctcgaaacgcctagcctggtccccgtgaagaaaaacgcaagcactgtcgttgtgtctgacaagtataacctaaagcctatcccactcaagcgacagagcaacgttgccgccccgggcgatgccactccccccgccgaaaaaaaatacaagcctctaaatactacccctaacgccaccaaggaaatcaaagtgaagatcatacccccacaacccatggaaggcctgggcttcctggatgccttgaattccgcaccagttcccgggatcaaaatcaaaaagaaaaaaaaagtgctatctcctaccgcagccaagcccagtcctttcgaagggaagacctcgactgaaccatctaccgctaagccttccagccccgaacccgcaccccccagcgaagccatggacgcggacagacccggtacgcctgtccctccagtggaggtacccgagttaatggacacggcatctctggagccgggagcactggacgctaaacctgttgaatccccaggggatccaaaccagttgactcgcaaaggtcgcaagcggaaatctgtgacttggcctgaggaagggaagctgagggagtacttctacttcgaactggacgagaccgagcgggtcaacgtaaataagattaaggatttcggcgaggcggccaaaagggaaatactgtcagatcgccacgcattcgaaaccgcgagacgcctctcgcacgacaatatggaagagaaggtgccctgggtttgcccaagaccacttgttctcccatccccacttgtcactcctggttccaacagccaggaaagatatattcaagcagagcgcgagaagggtattttgcaggagctcttcctgaataaagagtcaccgcacgagcccgatcctgagccctacgaacccataccaccgaagctcatcccactggatgaggaatgcagcatggacgaaacaccttacgtggaaaccttggagcctggaggctccgggggctctcccgatggggctgggggaagcaagctgccgccggtcttagctaatctgatgggtagcatgggcgcgggaaagggcccacaaggacccgggggcggcggcatcaatgtgcaggaaattttgacctccatcatgggatcccctaacagtcatccgagcgaagaactcttaaagcagcccgactactcagataagattaagcaaatgctcgtgccccacggattgctgggcccaggaccaatcgcaaacggattcccccccggcggacctggcgggcccaaaggcatgcagcactttccccccggccccggtggccccatgcccggcccccatggtggccctggcggcccggtgggtcccaggctgctgggcccacctccccctcctagggggggcgaccccttctgggacggtcctggcgaccccatgcgaggagggccaatgcggggagggccaggcccaggtccaggcccataccaccgagggagaggtgggcgcggtggtaatgaacctcctccccccccccccccatttagaggcgccaggggtggcaggtcaggaggcggcccaccaaatgggaggggtgggccgggcggtggaatggtgggcggcggaggccacagaccccacgaaggccccggtggcggcatgggcaatagcagtggacataggcctcacgaggggccggggggcgggatgggtagtggccaccgccctcacgagggacccggcggaagcatgggcggtggaggaggacaccggcctcacgagggacccggggggggcataagtggtggtagtggacacagaccccatgaaggtcccgggggcggcatgggggctggcgggggacaccggcctcacgaaggccctggtggctccatgggtgggtcaggcgggcatagaccccacgaggggccggggcacggtggcccacacggccacaggccacacgacgtgccaggacaccgcggccatgaccatcgtggcccaccgccacacgaacaccgggggcatgacggcccaggccatggcggaggaggtcaccgaggacatgacgggggacatagtcacggtggggatatgagcaatagacctgtgtgcagacactttatgatgaagggtaattgcagatacgagaacaactgtgctttttaccaccctggtgttaatggacccccgctgccctag

SEQ ID NO: 131283 - DNA, 2823 bp, Artificial Sequence
  derived and/or modified sequence
atgggcagcggccccatcgaccccaaggagctgctgaagggcctggacagtttcctcaaccgggatggcgaagttaaatctgtagacggaatctccaaaatcttttcactaatgaaggaggcccgtaagatggtgtcaaggtgcacatacttgaatatcctcctgcagacacgctcacccgagatattagttaagttcattgacgtgggcggatataaattacttaataactggcttacctacagtaagaccacaaacaacattcctctgttgcaacagatactgttgacactgcagcacctgccgttgactgtggatcaccttaagcagaacaatacagcaaaacttgtcaagcagttaagcaaatcttctgaggatgaagaacttagaaaattagcttccgtcctggttagcgactggatggccgtcatccggtcacagtcctctacacagcccgcagagaaagataagaagaagcgaaaagatgaggggaaatctagaaccacgctgcctgaacgccctcttactgaggtgaaggcagaaacacgagcagaggaggccccagagaagaaacgcgagaagcctaagtctctacgaacaaccgcgccaagccacgcaaagtttcgctctactggtttagaactcgaaacccccagtttggtgcccgtgaagaagaatgccagtaccgttgtcgtatcggataagtataacctgaagcccatcccgcttaagcgccagtccaatgtggcggcccctggtgatgctaccccccctgccgagaagaagtataagccactcaatacaacacctaatgccaccaaggagatcaaggttaagattatacctccacagccgatggagggtctaggctttctggatgctcttaacagcgcccccgtacccggtattaagataaagaaaaagaaaaaggtgctgagccccacagccgcaaagccatcccccttcgaggggaaaacgagtacagagccaagtactgcgaaaccgtcatccccagaacccgcacctccaagcgaagccatggatgctgatcgacccggtacccccgttccacctgtagaagtaccagagttgatggatacagccagtctagagccaggggcccttgacgctaagccagtggagtctcccggagatcccaaccagctgaccaggaaaggccgtaagaggaaatcagtgacttggcctgaggagggcaaacttagagaatatttctacttcgaactcgacgagaccgagagagtgaatgtcaataaaattaaggactttggagaggcagccaaaagggagatactgagcgacaggcacgcttttgagaccgcccggcgtctgagccacgacaacatggaggagaaagtgccatgggtttgcccccggccgttggttctgccatctcccctggtgactcccggaagcaactctcaggaacgatatatccaggcggagcgcgagaaaggaattttgcaggaattgttcttaaataaagaaagcccgcacgaaccggatcccgaaccctatgagcccatccctccaaaattaattcccctggatgaagaatgtagcatggatgaaactccttacgttgaaacattagaaccaggtgggtcaggcggctcaccggacggcgcaggcggctcaaagttaccccctgtcctagctaatctgatgggctctatgggcgcagggaaaggccctcagggaccaggtggcgggggtattaacgtccaggagatcttgacaagcattatgggcagtccaaactctcacccgagcgaggaactattgaagcaaccagactatagcgacaaaatcaagcagatgctggtacctcacgggttactcggccctgggcccattgctaatggcttccccccaggtggcccaggagggccaaagggcatgcagcacttcccccccggaccgggaggacctatgcctggtcctcatggcggcccaggtggccccgtaggaccgcgattactgggaccacctccccccccacgggggggcgacccgttttgggatggccctggcgaccccatgagaggaggaccaatgagaggcggacctggccctggccctgggccttatcataggggacggggagggcgggggggcaatgaaccaccacctcctcctcctccgtttcggggtgcgcgcggagggaggagtggcgggggaccaccaaacggcagaggcggccccggaggtggaatggttggtggaggcggccatcgaccccacgaggggcctggagggggtatgggaaatagttcagggcacagaccccatgaaggccccggcggcgggatgggctccggccatcggccacatgaagggcctggtggcagtatgggagggggtggcggccatcgccctcacgaaggccccggaggggggatctccggtggctccgggcaccgcccacacgaaggacccggtggaggtatgggcgccggaggaggacatcgcccccatgagggacccggaggatctatgggagggtcaggaggtcatagacctcatgagggaccaggacacggtggcccccacggccatcgtcctcatgatgtgcccgggcatcgcggacacgatcacagaggtccgccccctcacgaacaccgaggacacgacggacctggacacggcgggggcggacacagaggtcatgatggaggccattcgcacggaggcgatatgtcaaacagaccggtctgtagacactttatgatgaaagggaactgccggtatgaaaacaactgtgccttctatcaccccggggtgaacggacctccactgccttag

SEQ ID NO: 131284 - DNA, 2823 bp, Artificial Sequence
  derived and/or modified sequence
atgggcagcggccccatcgaccccaaggagctgctgaagggcctggacagcttcctcaatcgcgatggagaggtgaagtctgtggacggaattagtaagatcttctctctgatgaaggaagctagaaaaatggtctcacgctgcacctatcttaatattctgttgcaaaccaggagccccgaaattttggtgaagtttatcgatgtagggggatataagttacttaacaactggcttacatattcaaagacgacgaataacatcccactgttgcagcagatcctgctcaccttgcagcatttacctctgaccgtggatcaccttaagcaaaacaatactgctaaactcgtgaaacagctatccaaatcttccgaggacgaagagctgcgcaaactcgcctcagtgcttgtgagtgactggatggcagtgatcagatcacagtcttctacacagcccgctgagaaggacaaaaagaaaaggaaggatgagggcaagtctcgaaccacacttccagagaggcctctcacagaggtgaaggccgagacaagagccgaggaggctcctgaaaagaagcgcgagaagcctaagtcattgcgcaccacagccccttctcacgcaaaattccggtccaccggccttgaactagaaactccttcactggtgcctgtaaagaagaatgcttcaaccgtggtggtctccgacaagtacaaccttaaacctatcccgcttaagcgccaatctaacgtggctgctcctggtgatgccactccgcccgcagagaaaaaatacaaacccctgaataccaccccaaacgccaccaaggagatcaaagtcaaaatcattccgccacagcccatggaagggcttggctttctggatgcacttaacagcgcacctgtgcccgggataaagatcaaaaaaaaaaaaaaggttctgtctcccactgccgcgaagccttccccatttgaaggaaagacaagtacagagccttcaacagcaaagcccagctcgccggagccggctccaccaagtgaagcaatggacgcggatcggccaggcacacccgtgccccccgtagaagttccagaacttatggatacagcatcccttgagcccggcgcactggacgctaagcccgttgaaagccccggcgacccgaaccaacttactcggaaaggacgcaagcgcaagtccgtgacttggcccgaagaaggcaaactgagggaatacttctattttgagctggacgagacagagagggtgaacgtcaacaagatcaaggacttcggcgaagcggccaaacgagagatcctcagtgaccggcacgcctttgaaaccgccaggaggctgtcccacgacaacatggaggagaaagttccctgggtgtgcccacggcctcttgtgctaccatcgcccctcgtcacacctgggagcaacagtcaagaaaggtacatccaggctgagagggagaaagggatcctgcaggaactctttctcaacaaggaaagcccacatgagcctgacccagagccatacgagcccattcccccaaaactgatcccattggatgaggaatgtagtatggatgaaaccccctatgtcgaaaccctggagcctggaggctccgggggttcacccgatggtgccggtggctcaaagctgccccctgtgctggcaaacctgatgggctccatgggagccggtaaggggccacaaggcccaggtggaggagggattaacgttcaggaaatattgactagcatcatgggttcacccaacagccatccttccgaagagctcttgaagcagcccgactactctgataagataaagcagatgctcgttccccatggcctgctcgggcccgggcccatagcaaatggcttccctccaggggggccaggtggtccaaaaggaatgcaacattttcctcccggtcccggcggccctatgccgggtcctcatggcggacctggcgggcctgtgggtccaaggctgctcggaccgccaccacctcccaggggtggcgaccccttctgggacggacctggtgacccgatgcgaggagggcctatgcggggcggacccgggcccggcccgggcccctaccacagaggaaggggcggcagggggggcaacgagccccctccaccgccccctcctttcaggggagctcggggaggccgaagcggcggtggtcctcccaatggccgcggcggccccggcggaggcatggttgggggcggcggacatagaccacatgaaggacccggcggggggatggggaacagtagcggccataggccccatgagggtccggggggtgggatgggatcaggtcaccgcccccacgagggcccaggcgggagcatgggcggaggaggagggcacagaccgcacgagggtcctggtgggggcatttccggaggcagcggacataggccgcacgaaggtccaggcggagggatgggtgccggaggcggccacagacctcacgaagggcctggcggctcaatgggcggcagcggtggccacaggccacatgaggggcccggccacggcggaccccatggccaccgcccccatgacgttcccggccataggggccacgaccacaggggacctccccctcacgaacacaggggccacgacgggcctgggcacgggggaggaggccatcggggtcacgacggggggcactcacacggcggcgacatgtccaacagaccggtgtgcaggcacttcatgatgaaaggaaattgccgatacgagaataattgtgccttttaccaccctggggtcaacggaccgccattaccatag

SEQ ID NO: 131285 - DNA, 2823 bp, Artificial Sequence
  derived and/or modified sequence
atgggcagcggccccatcgaccccaaggagctgctgaagggcctggattcattcctcaaccgggatggggaagtcaagagcgtcgatggcatatccaagatcttctctctgatgaaggaggccaggaaaatggtgtcccgctgcacttacctgaatatcctcctccaaacccgatcccctgaaatcctcgtcaagtttatagatgttggggggtataagctcctcaataactggctgacgtactccaaaactactaataatataccactcctgcaacaaattctgttaactctccaacatctcccactgacagtggatcacctcaagcagaataataccgccaaacttgtcaaacaactgagcaaaagctcagaggacgaggaattgcgcaagcttgcctccgtgttggtttccgactggatggccgttatcagaagccagagctccactcaaccagcagaaaaagacaaaaagaaaaggaaggacgaggggaagtcgaggaccaccttgcctgagcggcccctcaccgaggttaaggcagaaacaagggccgaggaagctcccgaaaagaagagggagaagcctaagagtctccggactacggccccttcgcatgccaagttcaggtcaacaggcctggagctagaaaccccttctctcgtccctgttaaaaaaaacgcaagtactgtagtcgtctctgacaaatacaatttgaagcccatcccactgaaaagacagtccaatgtggccgctccgggcgacgcaacaccccctgctgaaaagaaatacaaacccctgaataccacgcccaatgcaacaaaggagatcaaggtgaaaataattccacctcagccaatggagggtttaggattcctggacgcgctcaacagcgcccccgtccctggtattaagataaagaaaaagaagaaggtgctctctccaaccgcagccaaacctagtcctttcgaaggcaaaacatcaacggagccctccacggcgaagccttcgtcccctgagcccgctccaccctccgaggctatggatgccgacagacccggcaccccggtccccccagtggaggtgcccgagttaatggataccgcatcactggaacctggagcccttgacgctaagcccgtcgagtctccgggggacccaaatcagttaactaggaagggccgaaaacgcaagagcgttacatggcctgaggaggggaaactgagagaatacttttattttgagctagatgagacagagcgcgttaatgtgaataaaattaaagattttggagaagcagccaagcgggaaatcctttccgacagacacgcatttgaaactgcccgacggctgagccacgataacatggaggagaaggtcccctgggtgtgccccagaccacttgtgctaccctccccacttgtgacccccgggtcaaattcacaggagaggtatattcaggctgaaagagagaaaggcatcctgcaagagctttttctgaacaaagaaagtcctcacgaacccgatcctgagccgtacgagccaattcccccaaaattaatcccgctggatgaggaatgttctatggatgagacaccatatgtggagactctagaaccaggcgggtcgggtggaagcccagatggagcaggtggatccaagttgccgccggttttagctaatctcatgggaagcatgggcgctggaaaggggcctcaagggccagggggagggggaatcaatgtgcaagaaattctcacgagtatcatgggttccccaaactctcaccccagtgaggagttgttgaagcaacctgattattcggacaagattaaacagatgctggttcctcatggtctgctgggccccggccctattgcgaacgggtttccccccgggggccctgggggacctaaggggatgcagcattttcctccaggacctggaggacccatgccaggaccacatggagggcccgggggaccagtaggacccaggctgctagggcccccccctcctcccagggggggggacccattttgggatggacctggggacccaatgagaggaggtcccatgcgagggggcccaggtcccggtcccggcccctaccacaggggacggggcggtcgcggcggtaacgagccccctcctcccccaccccccttccggggggctaggggaggacgcagcggcggcggtccgcctaacggcaggggaggccctggcggagggatggtgggaggaggcggccataggcctcacgaaggccccggcggcgggatgggaaattcttcaggccatagacctcacgaagggccaggtggaggcatgggcagtggccatcgccctcatgaaggccctggtggatcgatggggggcggcggaggccaccgcccccacgaggggcctggcggcggcatttccggcgggtccggccatcggcctcatgaagggccaggaggcgggatgggtgcaggagggggacacaggccgcatgagggtcctggcggcagtatggggggtagtgggggacatcgacctcatgagggtcctgggcacggaggtcctcatggccatcggcctcacgacgtcccaggacaccgtggacatgatcatcgaggtccacctccccatgaacatcggggacatgatggaccaggacatgggggcggcgggcaccgaggacacgacggtgggcactcacacggaggcgatatgtctaaccggcctgtatgcagacacttcatgatgaagggcaactgtagatacgagaacaactgcgccttctaccatcccggcgtgaatgggcctccattgccgtag

SEQ ID NO: 131286 - DNA, 2823 bp, Artificial Sequence
  derived and/or modified sequence
atgggcagcggccccatcgaccccaaggagctgctgaagggcctggactcattcctgaatcgcgatggggaggtgaaatctgtcgacggtattagtaagattttttccttaatgaaagaggcaaggaagatggtgtcgcgatgcacatacctcaatatcctactgcagactagaagcccagaaatccttgtgaaatttatcgacgttggagggtacaagctgctgaacaactggcttacctattctaaaacaacaaacaacatacccctgttgcagcagattctgcttactctgcagcacctccccctgaccgtggaccacctgaagcaaaataacaccgcgaaacttgtgaaacagctctccaagtccagtgaagacgaagagctccggaagctcgcctctgtgttggtcagtgactggatggcggtgatccgctcacagagctccacccagcctgctgaaaaagataaaaaaaagagaaaggatgaaggaaaaagccgcacaacgctgcccgaacgccctctcaccgaggtgaaggccgaaacccgggccgaagaggcacctgaaaaaaagagggagaaacctaagtctttgagaacgaccgccccatcccacgccaagttcagatcaaccggccttgaacttgagacccctagtctcgtcccagtgaagaagaacgcgtcaaccgttgtggtgtctgataagtacaaccttaagcctatccctctgaaacggcagtcaaatgtggccgctcccggcgatgcaaccccgccagcggagaagaagtataagcccctgaacaccacaccaaacgcaaccaaagagatcaaggttaagataattccccctcagcccatggaaggtttgggattcctagatgcactgaatagcgctcctgtccctggcattaagataaagaagaaaaaaaaagtcctctctcccacggccgcaaaaccctctccattcgagggcaagaccagtaccgaaccttctacggccaagccctcaagtccagagcccgcgccaccttctgaagcgatggacgcagatcggcccgggacccccgtgccccccgtggaggtgcccgaactgatggatacggccagcctggaacctggagctctggacgcgaaacctgtcgaatcccccggagaccccaaccaattgacacgaaaaggccgtaaacggaagtccgttacctggccagaagaagggaagctccgggagtacttctacttcgaactggatgaaactgagcgcgtcaacgtcaataagattaaagattttggcgaggcggctaaaagagagatcttgagtgacaggcatgccttcgaaactgccagaagactctcgcatgataatatggaagagaaagtcccctgggtgtgccctcgccccctcgtcctcccatcccccttagtgacccccggaagcaacagccaggagcgctacattcaagccgagcgagaaaaggggatcctccaggagctgtttctcaataaagagtctcctcacgagccggaccccgagccctacgagcccataccccccaagcttatcccccttgatgaggaatgtagcatggatgaaactccttatgtggagaccttggagcctgggggatccggcggatcccccgatggtgcaggaggctcaaagctgcctcctgtgcttgccaatctcatggggtctatgggggctggtaagggaccgcaaggtccagggggcggcggtataaacgtccaggaaattctcactagcattatggggagccctaacagccatcccagtgaggagctcttgaaacagcccgactacagcgacaagatcaaacagatgctggtgccacatggcttgctcggtccaggacccatcgctaacggatttccacccggaggacctggaggacctaagggcatgcaacactttccacctggccctggcggaccaatgcccgggccccatggcgggccagggggacctgtgggcccaagactcctgggcccacctcctccaccgagaggcggtgacccattttgggacggccccggtgatcctatgcgaggtgggccaatgcgcggcggacctggccccggccctggcccctaccatcgcggcagaggtggacgcggcgggaacgagccacctccccctcccccaccatttagaggggcccgggggggcagaagtggcggaggcccccctaacggtcggggaggaccgggtggagggatggtgggcggaggaggtcacagaccccacgaaggccccggtggcgggatgggaaacagttcagggcaccgcccccacgagggcccaggggggggcatgggtagcggccacagacctcatgagggccctggcggctcaatggggggcggagggggtcatcggccgcacgagggaccaggtggaggcatcagtggcggatctgggcatcggcctcacgagggtccaggaggcggtatgggtgcgggcggtggccatcggcctcacgagggacctggcgggagtatgggcggaagcggaggtcaccggcctcacgaaggccctggccacggcggaccacatggccatagaccacacgatgtccccggtcaccgggggcatgatcatcggggtcctcctccacacgagcataggggtcatgatggacccgggcatggcggagggggccatcggggacacgatgggggacattcacacggtggagacatgagtaacagacctgtgtgccggcattttatgatgaaggggaattgcagatacgagaataattgcgcattttatcaccctggcgttaacgggccaccattaccatag

SEQ ID NO: 131287 - DNA, 2823 bp, Artificial Sequence
  derived and/or modified sequence
atgggcagcggccccatcgaccccaaggagctgctgaagggcctggatagcttcctcaatagggacggcgaggttaagtctgtagatggaatcagcaaaatcttttctttgatgaaggaggcacggaaaatggtgtcccgctgtacctacctcaacatattgttacaaacccgttcccctgaaatcctggtgaaatttattgacgtcggagggtacaagctgctgaataattggctgacctatagcaagacaaccaataatattccactactgcagcaaatactcctgacacttcagcacctgcctctcaccgtggaccatttaaaacagaacaacacggccaaacttgtgaaacagctctcaaagtctagcgaagatgaagaactcagaaaactggcatcagtgctggtgtctgattggatggcggtgattaggagccagagtagcacacagccagccgaaaaagataaaaaaaagagaaaagacgagggaaagagcagaaccacgttgccagagagacccctgactgaagtcaaggcagaaaccagagcagaggaggcccccgaaaaaaagagagaaaagcctaagtccctgaggacaaccgctcccagccatgcaaaatttcgctctaccggactcgaactcgagacaccctcactcgttccggtgaagaagaatgcttctacggtggtggtatccgacaagtacaatttaaagccaattcccttgaagaggcagtcaaatgtggctgcccccggtgatgctaccccgcctgcagagaagaaatacaaaccgttgaacactactccaaacgccaccaaggagattaaggttaaaattattccaccacaaccaatggaaggtctgggcttcctggatgctctcaactcagcccctgtgcccggaatcaaaattaaaaagaagaagaaagtactgtcccccactgccgccaagcctagcccctttgaaggaaagactagcaccgagccctctaccgctaagcccagttccccagagcctgctcccccatctgaagccatggacgctgataggccaggcacccctgttcctccagtggaagtgccagagctcatggacaccgcgagccttgagcctggggcactggacgcgaagcccgtagaatcgcctggagatcccaatcagttgaccagaaagggcaggaagcgcaaatcagtcacctggcctgaggagggcaaattgagggagtacttttatttcgaactggacgaaacggagagggtgaacgttaataaaatcaaggacttcggcgaggctgccaagagagaaattctgagtgacagacacgccttcgaaaccgcccgacgattatcccatgataatatggaagagaaggtcccttgggtgtgtcctagacccctggtgctgccaagtcctctggtgacccctgggtcaaattcacaggagaggtacattcaggccgagagagaaaagggaatacttcaagaattgttcctgaataaggagagtccacacgaacctgacccagaaccttatgagcccattccccctaaactgattcctttagatgaagagtgtagcatggatgaaactccttacgtggagacattggaacccggcggaagcggagggagtccagacggcgccggaggaagtaagctaccaccagtgctcgcaaatcttatgggctccatgggggccggcaaaggcccccagggcccaggcgggggcggtattaatgttcaggaaatactgacttcaataatgggatcaccaaattctcacccatccgaggagctgctgaaacagccagattatagcgataaaatcaaacagatgctggtgcctcacggactcctggggcctggtcccatcgcaaatgggtttccccctgggggacctggcgggccgaagggcatgcagcacttcccgcctggccccggcggcccaatgccagggccgcacgggggcccagggggccccgttgggccgcgtctgttgggcccacctcccccacctcgggggggcgaccccttttgggatgggcctggcgaccccatgcgaggaggccctatgcgaggcgggcctggaccaggtccaggtccttaccaccgcgggcggggtgggcgcggaggaaatgaaccaccgcctccccccccccctttccgcggggccaggggaggccgatccggaggtggacctcctaacggtcggggcgggcccgggggtggtatggtaggaggcggagggcatcggccacacgagggcccagggggtgggatgggcaattcctccggtcaccgccctcatgagggccccggagggggaatggggagcggccacagaccacacgagggacccggcggcagcatgggagggggaggaggccaccgcccccacgagggaccgggtgggggaattagcggaggatccgggcataggccacatgagggtcccggaggcggaatgggagccggaggaggccacaggccccacgaggggccgggcggtagcatggggggatccggaggccataggccacacgagggaccgggccacggcgggccccatggacacaggcctcacgacgtaccgggccaccgcgggcacgatcatcgcggaccacccccccacgaacatcgaggccatgatggacccggtcacgggggcgggggccatcgggggcacgatgggggacattcccacggcggcgacatgtctaacagacccgtctgtcgtcacttcatgatgaaagggaactgtcgctacgaaaataattgtgccttttaccacccaggtgtaaatgggcctcctcttccttag

SEQ ID NO: 131288 - DNA, 2823 bp, Artificial Sequence
  derived and/or modified sequence
atgggcagcggccccatcgaccccaaggagctgctgaagggcctggactcattcctgaacagggatggagaggtgaaaagcgttgacggcatttccaaaattttcagcctcatgaaggaagctaggaaaatggtgtctcgttgtacttacttaaacatccttctccaaactaggtccccagaaatcctagtaaagttcatcgacgtgggcgggtacaagttgctgaataattggctcacatactcaaaaacaaccaataacattcctctccttcagcaaatcctgttgacccttcagcacttgcctctgaccgtagatcacctgaagcaaaataacaccgccaagctggtgaaacaactgtctaaaagttcagaggacgaagagctcaggaagctcgccagcgttttggtgagcgactggatggcagtcattaggagtcagtcctccactcagcccgcagagaaggacaaaaaaaaaaggaaggatgaaggcaaaagtcgtactactttaccagagagaccactcaccgaagttaaggcagagacacgcgccgaagaagcacccgagaagaagcgtgagaagcccaagagtttaaggaccaccgcaccctctcatgcaaagtttagaagtaccggcctggaattggagaccccgtccctcgtaccagtaaaaaaaaacgcaagcaccgtcgtcgtcagcgataaatacaacttaaaacctattcctctgaaacggcagagtaacgtggctgcccccggtgacgctacgcctccggccgagaagaaatacaagcccttgaacacgacacccaacgcaacgaaggagattaaggtaaaaataatacccccccaaccaatggaagggttagggttcctggatgctctgaattctgcccctgtgcccggtattaagatcaaaaaaaaaaaaaaagtgctttctccgaccgctgctaagcctagcccattcgagggaaaaacctcaactgagccatctacagccaaaccgtccagcccagaaccggctcccccttctgaggccatggatgccgatcgacccggtacccccgtccctccagttgaagtgcccgaactgatggacaccgccagcctcgaacctggggccttggacgccaaacccgtagagtctcctggtgatcccaaccagctgacacgcaaggggcgcaagcgaaagtctgtgacctggcccgaggagggaaagctccgcgaatatttctacttcgagttagatgaaactgagcgagtcaatgtaaacaaaattaaggacttcggcgaggctgccaagagagaaattctgtcagaccgacatgcctttgagacagcgagaaggctgagtcatgataatatggaagagaaagttccatgggtgtgtccccgacccttggtactgcctagtcctctggtcactcctggctccaattcacaggagcggtacatccaggctgaacgggagaagggcatcctgcaagaactgtttctgaataaggagtcccctcatgagccggaccctgaaccctacgagcccatccctcccaagctcattccactcgatgaagaatgctctatggacgagacaccttacgtcgaaaccttagagccagggggctcgggaggcagccccgatggcgccggggggtccaagttgccccctgttctggcaaacctcatgggatcaatgggagcgggcaagggccctcaagggccgggcggcggtggcattaacgtccaggaaatcctaacctccataatgggatcgccaaactctcatccttccgaggaactgctgaaacaacctgactacagtgacaaaataaaacagatgcttgttccccatggtttgttgggcccagggcctattgcgaacggctttccgccgggcgggcccggtggcccgaagggcatgcagcactttccaccgggccctggtggccccatgcctggtccacacggagggcctggggggcccgtggggccccgcctgcttggacctccccctcctccacgggggggtgatcccttctgggatggtccaggggacccaatgcgcggcggccctatgcgcggcggccccggacccgggcccggaccataccataggggccgagggggcagagggggcaatgaaccccccccccctcctccaccatttaggggcgcacgtgggggtaggtcaggaggcggcccaccaaacggcagggggggccccggcggcggcatggtcgggggcgggggccaccgtccccacgaaggaccgggcggaggaatgggcaattcgtccggccatagacctcacgagggaccaggcggcgggatggggagcggtcaccggccccatgaggggccagggggcagcatgggcggcggcggtggccaccgcccccacgaggggcccgggggcgggattagtggaggaagcggacaccgtccccatgaaggtccaggagggggaatgggggccggcggcggccacagacctcacgagggaccaggcggctcaatgggggggagtggagggcatcgaccccatgaaggccccgggcacggcggcccccacggccacaggccccatgatgtccctggtcaccgaggacatgaccacaggggccctcccccacatgaacacaggggccatgatggccccggccacggcgggggcggacacagaggacacgatggcggccattcccatggtggagatatgtctaatcgccctgtgtgccgtcacttcatgatgaaagggaattgccgctacgagaataactgcgccttttatcaccctggagttaatggacccccgcttccttag

SEQ ID NO: 131289 - DNA, 939 bp, Artificial Sequence
  derived and/or modified sequence
atgggcagcggccccatcgaccccaaggagctgctgaagggcctggatagctttctgaaccgagacggcgaagtgaagtccgtggacggtatttccaaaattttttccctcatgaaagaggcacgaaagatggttagccgctgtacgtaccttaatatacttctgcagactcgatcacctgagatcctcgtaaaattcatcgatgtcggtggatacaaactgttgaataactggctaacgtatagcaagactactaataacatccctctgttgcagcagattttgctgacacttcagcacttgccgctgactgtggatcatctgaaacagaacaacaccgccaagttagtgaaacagcttagcaagtcctctgaagatgaagagcttcggaaactcgcctccgtgctggtctctgattggatggcagtgatccgctctcagagttccactcagccagcagaaaaggacaagaagaagcgaaaggacgaggggaagtcccgcacgacactcccagagcggcctttgaccgaagtgaaggcagaaactagagctgaagaagctcctgagaaaaaacgggagaagcctaaatcacttcgcactactgccccctcacatgcaaaatttcgttccacaggccttgagttggaaaccccttccttagtccctgttaagaaaaacgccagcacagtagtggtctctgacaagtacaatcttaagccaattccgttgaagaggcagtcaaacgtcgccgcccccggtgacgccactccccccgctgaaaaaaagtacaaaccgctgaatacaacgcccaacgccacaaaagagatcaaggtgaagattattcctccacagcctatggaaggcttaggatttctagacgccttgaatagtgctccggtccctggtatcaagataaagaaaaagaagaagaaaaaatag

SEQ ID NO: 131290 - DNA, 939 bp, Artificial Sequence
  derived and/or modified sequence
atgggcagcggccccatcgaccccaaggagctgctgaagggcctggactcctttctaaaccgtgacggcgaggttaagtccgtcgacggcatttccaagattttcagccttatgaaagaagctaggaagatggtgtctagatgcacttatctcaacatcttactgcagactcgtagtcctgaaatcttggtgaaattcattgatgtcggcggctacaagttgcttaataactggctcacatactctaagactacaaacaacatcccgttgctccagcagatactgctgacactacagcacctgcccttgaccgtcgaccaccttaagcagaacaataccgctaaattggtgaagcagctgagcaaaagcagcgaggatgaggagctacgcaagctggcctccgtcttagtgagcgattggatggctgtaatcaggtcccaatcgtctactcagcccgcagagaaggataaaaagaaaagaaaggacgaaggcaagagtagaacgacacttccggaacggccattgacagaggtaaaggccgagactagggcagaggaagcccctgagaaaaaaagggaaaaacctaagtccctgaggaccaccgccccaagtcacgccaaatttagatcaaccggccttgagcttgagaccccgagtcttgtgccagtcaagaagaacgcctctactgtcgtagtgtctgataagtataatctcaagcctattccgctgaagcggcagagtaacgtagcagcacccggcgatgccaccccgcccgcagaaaagaagtataagccactcaataccacgcctaatgcaacaaaggaaattaaggtgaagatcattccccctcagcctatggaaggtttagggttcctggatgccctgaacagtgcccccgtccccggcatcaaaattaaaaaaaaaaagaagaaaaaatag

SEQ ID NO: 131291 - DNA, 939 bp, Artificial Sequence
  derived and/or modified sequence
atgggcagcggccccatcgaccccaaggagctgctgaagggcctggactcatttctcaaccgagacggggaggtaaagagtgttgatggaattagcaagatcttcagcctcatgaaagaggctaggaagatggtttccaggtgtacatacttgaatatccttctgcagacccgatcgcccgagatactcgtcaagttcatagatgtgggtgggtacaagttgctgaataactggctgacctattcaaagaccacgaacaatatacccctgctgcaacagattctcctaacgcttcagcacctcccattaacggtggatcacttgaaacagaataatacagctaaacttgtgaaacagctgagcaaatcaagtgaggatgaagagcttaggaaactggccagcgtcttggtctccgattggatggccgtgatccgctcacaatcaagcactcagccggctgagaaagataaaaagaagcggaaggacgagggtaaatctagaactactctgccagaacgccctctaaccgaggtgaaagcggaaacaagggctgaagaagccccagagaagaagcgagagaaaccaaagagtctgcgaaccaccgccccctctcacgcaaaatttaggagtacgggccttgagctggagacaccctcactggtgcctgtgaagaaaaatgcaagcaccgtcgttgtctctgataaatataacctgaagcctataccacttaaaagacagtctaatgtggccgcgccgggagatgccacaccaccggctgaaaaaaaatacaaaccgctgaacaccacccctaatgccacaaaggagataaaagtgaagattatccccccacagcccatggaaggtctgggcttccttgatgccctcaatagtgcacccgtcccaggcattaagattaagaaaaagaaaaagaagaaatag

SEQ ID NO: 131292 - DNA, 939 bp, Artificial Sequence
  derived and/or modified sequence
atgggcagcggccccatcgaccccaaggagctgctgaagggcctggactctttcctcaacagagacggggaggtgaaatcagttgatggtatctcgaagatattctccctgatgaaagaagcacggaaaatggtgagtcgttgtacctacctgaacatcctcctccagactcgctcaccggagatcctggtcaaattcattgatgtgggcggctacaagctcctcaacaactggttaacctactcgaaaaccactaataacatcccattactccagcagatcctcctgactctccagcacctccccctcacagtggatcacctgaaacagaataatactgctaaactggtgaagcagctgagcaagtcctcggaggatgaagagctgcggaagctcgcctcagtgctcgtttcggactggatggcagtgatacgatcgcagtcatctacccagcctgcggagaaagataagaagaaacggaaggacgaagggaagtctaggaccacattgcctgagaggccactgaccgaggtgaaggcggagacccgcgcagaggaggcacctgagaaaaaacgggaaaaacctaagtctttacggacaacagccccaagccatgcaaagttccgctcaacaggactggagctggagacccccagcctggttccggtcaaaaaaaatgcttcgactgtggtggtatcggacaaatacaatttgaagccaattcccctcaaacgccagtccaatgttgccgcccccggggacgctacaccccctgcagagaaaaaatataaaccgcttaatactacacctaacgccaccaaagaaattaaagttaaaattatccccccacaaccgatggagggcctggggtttttagacgcactgaattccgcccctgtccccggcatcaaaattaagaaaaaaaaaaagaaaaaatag

SEQ ID NO: 131293 - DNA, 939 bp, Artificial Sequence
  derived and/or modified sequence
atgggcagcggccccatcgaccccaaggagctgctgaagggcctggactccttcctcaatagagacggggaagtgaaatccgtggacggaatatctaaaatcttttctctgatgaaggaggctcgaaagatggtttctagatgtacatatctcaacattctgttgcagactaggagtccggagattctggtgaaattcattgatgtgggagggtataaactgctgaataattggctgacctactccaagacgaccaacaacatcccactgttgcagcaaatcctgctgaccttacagcatttaccactcacagtcgaccaccttaaacagaacaacaccgcaaaattggtgaagcagctctcgaagtcaagcgaggacgaggagctccgcaaactagccagtgtacttgtgagcgattggatggcagtgattcggagtcaaagctccacacagcccgcagaaaaagacaagaaaaagagaaaggacgagggcaagtcccgaacaacactgcctgagcgcccccttacagaagtgaaagccgaaacgagggccgaggaggccccagaaaagaaaagagagaagccaaagtcactcaggacaaccgctccttctcacgctaaatttcgttctacaggactggaactcgagacaccaagcctcgttcccgtgaagaagaatgcatccactgtcgtggtcagtgataaatataacttgaaacctatacccctcaaacggcaatcaaacgtcgccgctcccggagatgcaacaccaccagcagaaaaaaaatataaaccactgaataccaccccgaatgctaccaaggagattaaggtcaagattattccccctcaacctatggagggactaggctttctggacgcgttaaactccgccccagtgccagggataaagataaagaagaaaaagaaaaaaaaatag

SEQ ID NO: 131294 - DNA, 939 bp, Artificial Sequence
  derived and/or modified sequence
atgggcagcggccccatcgaccccaaggagctgctgaagggcctggactcattccttaatcgggacggggaagtcaagtctgtggacggtatctccaagatcttcagccttatgaaggaggccaggaagatggtcagtagatgcacatacctcaatattctgcttcaaacccgcagtcccgagatactggtaaagtttattgatgtcggggggtacaagctgttaaataactggctcacttatagtaaaaccacaaacaatatcccactcctccagcaaatccttctgacccttcaacatctgcctttgacagtggatcaccttaagcagaataatacagctaaactagtgaagcagctttccaagagctctgaggacgaggagctcaggaaactggcgtcagtgttggtgtcggattggatggctgtcattcgatcccagtcttctacccagcccgctgaaaaagataagaaaaagcgcaaggacgagggcaaatctagaacgacgttgccggagcgaccattaaccgaagtgaaggccgagaccagggctgaagaggcccccgaaaaaaagcgcgagaagcccaaatctctgcgaaccaccgcaccttctcacgccaagttcaggtccaccggcttggagctagagacccctagtctagtgcccgtaaaaaagaatgcttcaaccgtggtcgtgtccgataagtacaacctcaagcccattccactgaagcgacagtctaatgtcgcagctcccggagatgctacccccccagctgaaaagaaatacaagcctctaaacacgacccctaatgcaacaaaagagattaaagttaaaatcattcctcctcagcctatggagggcctgggcttcctggacgccctcaattctgcacccgtccctgggatcaaaattaagaaaaaaaaaaagaagaagtag

SEQ ID NO: 131295 - DNA, 939 bp, Artificial Sequence
  derived and/or modified sequence
atgggcagcggccccatcgaccccaaggagctgctgaagggcctggattccttcctgaacagagatggagaggtcaagagcgtagatggaatctccaaaatcttcagtctcatgaaggaggcccgaaaaatggtctcacgctgtacgtatctgaatattctcctccaaacaaggtcgcccgaaattctcgtgaagtttatagacgtaggggggtataagctgctgaataactggctaacctattccaagaccaccaataacatccctctgctccagcagatcttgttaacattgcaacacctaccattgacggtcgaccacctgaagcagaacaatacagccaagctggtaaaacagctgtctaaaagctccgaagatgaggaactccggaagttggcttctgtcttggtaagtgattggatggccgttatcagatcacagagctcaactcagcctgcagagaaagacaagaaaaagcgcaaggacgagggcaaatcccggaccaccctgccagagagaccgctgactgaagtgaaagccgagacaagggcagaggaggctcctgagaagaaaagggagaagcccaaatccctgcgtaccactgcacccagccacgccaagttcagatctactggactggagcttgaaactccatccttagtgccagtgaaaaagaatgcctccactgttgtcgtgtccgacaaatacaatctgaaaccaataccactgaaacggcagtctaacgtggctgcccctggggatgccacacccccggccgaaaagaaatataagccgttgaatacaacacccaatgcaacaaaggagattaaggtgaaaatcatacctccccagcctatggagggactgggatttttagatgcgttaaacagcgcccctgtgcctggcatcaagataaagaaaaagaaaaagaaaaaatag

SEQ ID NO: 131296 - DNA, 2823 bp, Artificial Sequence
  derived and/or modified sequence
atgggttctggacccattgaccccaaggagcttctgaagggcctggactcgttcctgaatcgggacggagaggtcaagagcgtggacggcatatccaaaattttttcccttatgaaagaagcaaggaaaatggtgtcgagatgtacctacctgaatattctgttgcagaccagatcccccgagatcctggtgaaatttatcgatgtggggggatacaaattattgaacaactggcttacctactctaagacaaccaacaatattcccctgctgcagcaaatcctcctcaccttgcagcacctccccctgactgttgaccacctcaaacagaataataccgcaaagctcgtcaagcagttgtccaaaagctctgaagacgaagagctcagaaagttagcctccgtgctggtgagtgactggatggccgtaattaggtcccagtcctccacgcaacccgctgaaaaagataagaagaagagaaaggacgaagggaagtctaggacaacattacccgagcgcccactgacggaggtgaaagccgagaccagggcggaggaagcacccgagaagaagcgagaaaaaccaaagagcctgaggaccacagcaccatctcatgccaaatttagaagtacgggtcttgagctcgagacgcccagccttgttccagtaaaaaagaacgcctctacagtcgtggtgtctgataagtacaatctaaagccaatcccccttaaaaggcagtcaaacgtggccgctcctggggatgccacaccccctgcagaaaaaaaatataagcccctcaacacgacacctaacgcaaccaaggaaattaaagtgaagatcattccaccccagcctatggagggtttgggcttcctcgatgccctcaacagtgctcctgtccccggaattaaaatcaaaaagaaaaaaaaggtgctaagccctacggccgctaaacccagcccctttgaaggaaaaacctcaacagagcccagcactgctaagccatcctcaccagagcctgcaccgcctagcgaggctatggatgcagatcggcctgggactccggttccccctgtcgaagtgcccgagctgatggatactgcctccttggagccaggagccttggatgcaaagccagttgagagtcccggagacccgaatcagctgactcgaaaaggtcgaaagcggaagagtgtgacatggcctgaggaaggcaaacttagggaatatttctacttcgagctcgatgaaacagaacgtgtgaatgtaaacaagattaaggattttggcgaggcagccaaaagggagatcctgagtgataggcatgcctttgagacagcacgccgactgagtcatgataacatggaggagaaagtaccttgggtttgccctcggcctctggtgctccctagcccactcgtcacaccaggaagcaattctcaagaacgctacatccaggcagagcgggaaaagggtatactccaggaattgttcctgaacaaagagagccctcacgagccggaccccgagccctacgagcccatacccccaaaactcatacccctcgacgaggaatgcagcatggacgagactccatacgtggaaaccctcgagcccggaggctccggcggtagcccagatggagctggtgggtccaaattgccacctgtgttagccaacttaatggggtccatgggggctgggaaaggacctcagggacctggtggtggcggaatcaatgttcaggaaatactgacgtccatcatgggtagccccaactctcatccatccgaggaattactgaaacagccagactacagtgataagattaaacaaatgttggtaccgcatggactgctggggccagggccaattgcgaatgggttccctcctggcggacctggcggacctaaagggatgcaacatttcccgcctggccctgggggaccgatgcctgggcctcatggaggccctggcggaccagtggggccacgattactagggcctcctccacccccaaggggtggagatccattctgggatggcccaggagaccccatgagaggcggtcctatgagagggggtcctggcccagggcctggaccttaccacaggggacgcggagggaggggcggaaatgaacccccaccaccaccaccgcctttccgcggtgctaggggaggcaggtccgggggaggacctcccaacggccgtggcggaccagggggtggcatggtgggtggtggagggcaccgaccccacgagggacccggaggaggaatgggaaactccagcggccatcggccacacgaagggcctggaggtggcatgggcagcgggcatcgcccacatgaggggccaggcggaagtatgggtggaggtgggggacaccggccacatgaaggtccgggaggcggtatctcaggaggctccggccaccgccctcatgaagggcctggcggaggaatgggagctgggggaggacatcgtccacatgagggaccaggagggtctatgggcggatccgggggtcaccgaccccacgagggacctgggcacgggggtcctcacggacacagaccacatgatgtgccagggcaccggggtcacgaccaccgcggacctcctccacacgaacaccgaggccacgacgggccaggacatggcggaggcggtcataggggccacgacggagggcattctcacggcggtgatatgagcaaccggcctgtgtgtaggcatttcatgatgaaaggcaattgccggtacgagaataactgcgctttctaccacccgggagtcaacggtccgcctctcccctag

SEQ ID NO: 131297 - DNA, 2823 bp, Artificial Sequence
  derived and/or modified sequence
atggggtccggacccatagaccccaaggagctgctgaaaggtctcgactcattcctcaacagggatggggaggtgaagagcgtcgatgggatttccaagattttctcattgatgaaagaagcgagaaaaatggtgtcaagatgtacatatttaaacatcctgcttcagactcggtcaccagagatattggtgaaatttatcgatgtcgggggatacaagcttctgaacaattggctcacatatagtaagaccactaataacatcccgttgctccaacagatccttctaaccctgcaacacttacctctgacagtggaccacctgaaacagaataacacagctaaattagtgaaacagctgagtaaatccagcgaggacgaagaattgcggaagcttgccagcgtcctcgtatcagattggatggctgtgatccgatcccagagttctacacagccagccgagaaagataagaagaagagaaaggacgaaggaaaaagtagaactactctccctgaacgcccacttactgaggttaaagccgagacacgagctgaggaggctcctgaaaagaagcgcgagaagcccaaatccttgcgcaccactgcacccagccatgccaagttccgctcaacagggttggaattggaaaccccttcactcgtgcccgtcaagaaaaacgcgtcgacagtggtggttagcgataagtataacctgaagcctattcccttgaagcgacaaagtaacgtggcagccccaggcgatgcaacccctcctgccgagaagaaatacaaaccccttaacacgaccccgaacgctacaaaggaaatcaaagtgaaaataatacctcctcagcctatggagggcctgggctttctcgatgctctgaacagcgccccagtgcctgggattaagattaaaaagaagaaaaaggttctgtctcccaccgcagctaaaccaagtccctttgaaggtaagacctccacagagcccagtaccgctaagccatcaagtccagagccggctcccccatcggaggccatggacgctgacaggccagggacacccgttccacctgtcgaagttcctgaactgatggacacagcatccctggagcccggtgccttagacgccaagccggtcgagagtccaggggatcccaatcagctaaccaggaaggggaggaagcgcaagagcgtaacttggccagaggagggtaagctgcgggagtatttctatttcgaactagatgagaccgagcgcgtcaatgtgaacaaaattaaggacttcggtgaggcagccaaaagagagatactctctgatagacacgcctttgagacagcaaggcgcctttcccacgataacatggaggagaaagtcccttgggtgtgtccgcgtcccctggtgctgccatcaccacttgtcactccgggatcgaattcccaggagcggtacatccaggccgagagagagaagggaattctccaggagctgttcttgaacaaagaatcacctcatgagcctgatcctgaaccatatgaacctattccacctaaactaattcctctcgatgaggagtgcagcatggacgagactccctacgtcgagacgctggaacccggtggaagcgggggatcacctgacggcgctggcggaagtaaactgccacctgtgctcgcgaacctgatgggatcaatgggagccggtaaaggcccacagggtccagggggtgggggaatcaatgtgcaagagatcctgacctctatcatgggctcccccaatagtcatccgtcagaggagctactcaagcaacccgactactctgacaagatcaagcagatgctcgttcctcatggactcctgggacctggccctatagccaatggctttcctcccggaggcccaggaggcccaaaggggatgcaacacttccctcccggtcccggagggccaatgcctgggccacacgggggacccggagggccagtgggccctagattactgggccctccccctccgcctcggggaggggatcctttttgggacggtcctggcgatcctatgcgaggtggcccaatgcgaggcggaccaggaccaggtcccggaccctaccataggggtcgcggagggcgtggcggaaacgagccacccccacctcccccaccatttcgcggagctagaggcggaagatcaggcggaggacctcctaacgggagaggcggacctgggggtggtatggtaggtggcggtggacaccgtccacacgaggggcctggcggtggcatggggaattccagcgggcaccggccacatgaaggcccaggtggaggcatgggatccggccaccggcctcacgagggacctggtggcagcatggggggagggggaggccaccggcctcacgagggcccagggggaggcatctctggcggaagcggacatcgaccgcatgaaggacctggcggaggcatgggggctgggggaggacataggcctcacgaaggccctggcggaagcatgggaggctcagggggacataggccccacgaggggcctggtcatggtggccctcacggccacaggccccatgacgtaccaggccaccgcggacacgaccatcgcggtcctccaccgcatgagcacagaggccacgatggtcccggacacggaggcggaggacaccgcggacatgacgggggacatagccatgggggagacatgagcaataggcctgtttgccggcacttcatgatgaagggtaactgtcgttacgaaaataattgtgccttctatcatccaggggtcaatggaccacccctgccctag

SEQ ID NO: 131298 - DNA, 2823 bp, Artificial Sequence
  derived and/or modified sequence
atgggatctggacccatcgatcccaaggagctgttgaaagggctggattcatttctaaatcgagacggggaggtgaaaagcgtggacgggatatcaaaaatcttttccttgatgaaggaggccaggaagatggtctcccgttgtacatacttaaacatcctcctacagacacgctcacctgagattctggtcaaattcatagatgtgggagggtacaaactgctcaacaactggttgacatactctaaaaccacaaataacattccgctcctccaacaaatcctgctgacgctgcaacatctgcctctaaccgtggaccacttgaaacagaataacacagccaagctggtcaagcagctgtctaagtcctcggaggatgaggagctccgcaagcttgcatcagtcctggtgtctgactggatggctgtcataagatcccaatcaagcacacagccagcagagaaagacaagaaaaaaaggaaagacgaaggaaagagccgaactacattgccagaaagacccctgaccgaggtaaaggcagagacaagagcagaggaagcacccgagaagaaacgggagaagccaaagtctctgcgaactaccgccccttctcatgcgaagttcagatccaccggactggaactggaaacacccagcctggtgcccgtcaaaaaaaatgcctctaccgtggtggtctccgataagtataatctgaaaccgattccactgaaaaggcagtccaatgtggctgcacctggagacgccacgcccccagccgagaagaagtacaagcctctgaatactacacctaacgcgacaaaggaaatcaaagtcaaaattataccaccacagccaatggagggacttggcttcctcgacgcccttaactcagcaccggttcctggaattaagatcaaaaaaaaaaaaaaggtcctaagtcccacggccgcaaagccctctccattcgagggcaaaacttctaccgaaccaagtacagctaaacctagcagtcccgagcctgctcctccttcagaagccatggatgccgatcgtccgggtacccccgtacctcctgtggaagtgcctgagctcatggacacggcaagcttggaacctggagccctggacgcaaagcctgtcgagagtcctggggaccctaaccaactaacccgaaaaggtcgcaaaaggaagtccgtgacatggccagaggaaggaaagctccgcgagtacttctattttgaactggacgaaacagaacgggttaacgtcaacaaaattaaagatttcggagaggccgctaaaagagaaattctatcggatagacacgccttcgaaactgccaggcgcctgtcacatgataacatggaagagaaagttccgtgggtgtgccccagacctctggttctaccatctcctctagtgacaccgggaagtaactctcaggaaaggtatatacaggctgagcgcgagaagggcatactacaggagctgtttctcaacaaggaaagccctcatgagcctgaccccgaaccgtacgaacccatcccaccaaagttgattcctctggacgaggagtgtagcatggatgaaacaccatacgtggaaaccctggagccaggcggatccggaggctcgcctgatggtgcaggcggaagcaagcttcccccagtgttggcaaacctcatgggcagtatgggagccggtaaaggccctcagggtccaggaggaggaggcattaacgtccaggaaattcttacctccataatggggtcaccaaatagtcaccctagcgaggagctcctgaaacagcctgactattcagataagatcaaacagatgctggttcctcacgggctcctgggccctggcccaatagccaatggatttccacccggaggacctgggggaccgaagggaatgcagcatttcccccctgggcctggcggtcccatgcccggaccacacggcggacccggtggacctgtcggaccacgtctattgggccctcctcctcccccacggggtggcgatcctttttgggatggtcctggcgaccctatgcgtggcggacctatgcggggagggcctggcccagggccaggcccatatcatcgtgggaggggtgggcgtggagggaatgagccaccaccccctcccccaccgttcaggggcgctaggggagggaggtctggcggaggcccaccaaacgggaggggcggacccggaggcggtatggtgggcggaggcggtcaccgcccacacgagggtccgggaggaggaatgggaaattcctccggtcacaggccacacgagggcccaggagggggaatgggatccggccatcggccacacgagggccctgggggaagtatgggaggcggtggagggcaccgcccacacgaaggcccaggtggtgggatatcggggggtagtggacatcggcctcatgagggtcccggtggaggcatgggcgcagggggaggtcacaggccccacgagggcccaggcggttctatgggcggaagcgggggtcacaggcctcatgagggacctggccacggcggacctcacgggcatcggcctcacgacgtgcccggacaccgcggacatgatcatagaggcccacccccacacgaacatcggggtcatgacggaccaggtcatggcggaggtgggcatcggggtcacgacggcggacactcccacggtggtgatatgagtaaccgtcctgtgtgtcgtcactttatgatgaaaggaaattgtaggtatgagaacaattgcgccttctatcatccgggagttaacggacctccactcccctag

SEQ ID NO: 131299 - DNA, 2823 bp, Artificial Sequence
  derived and/or modified sequence
atgggctctggcccaatagatcccaaagaactgttgaaggggctcgacagcttcttgaatcgggacggtgaggtcaagtcagtcgacggtattagcaagatcttttcccttatgaaagaggcccgaaagatggtgagtagatgtacttacctgaatatacttctgcagaccagatcaccagagattcttgtcaaattcatcgatgtgggcggttataaactgttaaacaattggctcacatactcaaagaccacaaacaatatcccgctattacagcagatactgctgacactgcagcatctgcctttaaccgtcgaccacctgaagcagaataataccgcgaaactcgtcaagcagcttagcaaatcatccgaggacgaggagttacgaaagctagcgtccgttctcgtctctgactggatggccgttatcagatcacagagcagtacacagcctgccgaaaaagataagaaaaaaagaaaagacgaaggcaaatcacgcacaaccctgcctgaaaggcccctaactgaagtcaaagctgagacacgtgctgaagaagcccctgagaagaagcgcgagaagcccaaatccctgcggaccacagccccttcacacgcaaagtttcgtagcactggactggaactggagacccccagcctcgtgcctgtgaagaagaatgccagcactgtcgtagtatcggacaaatacaacttaaagccgataccgttaaagcggcaatcaaatgtggcagccccaggagacgcgacacccccagccgaaaagaagtacaagccacttaatactactccaaatgctacaaaggagatcaaggtaaagataattccgcctcagcctatggaggggctaggcttcctggatgctctgaatagtgctccagtgcccggtatcaagatcaagaaaaagaaaaaggttctcagccccaccgcagccaagccttctccctttgaggggaaaacctctaccgagcccagcactgccaaaccaagctccccagaaccagctcctccttcagaggccatggacgccgacaggcccggtactcctgtgccacctgtggaagtgcccgagctgatggacacagcctccctcgagccgggagcgctcgacgccaagccagtagagagtcccggagatcctaatcagcttacccggaagggcagaaagagaaagtctgtcacttggccggaagaggggaaactgcgggagtacttctatttcgaactggatgagaccgagcgggttaacgtaaacaagattaaagacttcggcgaagctgcaaaacgcgaaatcttaagcgaccgccatgcattcgagacagctcggagactcagccatgataacatggaagaaaaggtcccttgggtctgcccgcgacctctagtactgccaagccccttggtgactcccggttcaaatagtcaggagcggtatattcaggccgagcgagaaaagggcattctgcaggagctgttccttaataaggaatctcctcacgaaccggaccctgagccatacgagccaataccccctaagctgataccgttggacgaagaatgttcaatggatgagactccgtatgtcgaaaccctggagccaggcggatcaggcggaagtcctgatggggctgggggatccaagttgcccccagtgctggctaatttgatggggtcaatgggcgcagggaaggggcctcagggcccaggagggggtggaatcaatgtccaagagattctgacatctatcatggggtccccaaactcccaccccagcgaagaactgctgaaacagccggactattcagacaagattaaacagatgttggtgccacacggcctactcggcccaggcccaatcgcaaatggattcccccctggagggcctggcggacctaaagggatgcagcactttccgccaggacccggtgggcctatgccaggccctcacggcggacccggaggtcccgttgggccacgcttgctgggacctcctcctccccctcggggtggagacccattctgggatggacctggagacccgatgagaggcggaccgatgcggggtggtcctgggcctggcccaggaccctaccatcggggaagggggggaagggggggtaacgagccgcctccacctccacctccctttcgcggagcacggggagggcgaagcgggggaggtcctcccaacggaaggggagggcctgggggtggaatggtggggggaggcggacatcgaccccatgaaggacccggagggggaatggggaactcgtctggccaccgccctcacgagggccctgggggtgggatgggctcaggtcaccgccctcacgagggacccggaggcagcatggggggtgggggaggacataggcctcatgaggggcctgggggtgggattagcggcggttctggacatcgccctcacgaaggccctggaggcggtatgggagccggaggaggccacagaccgcatgagggacctggcggttctatgggagggtctggcggacatcgccctcacgaggggcctgggcacgggggaccacatggacaccgtccgcacgacgtgccaggccaccgagggcacgaccaccgagggccaccccctcatgagcataggggccatgacggtcctggccacggtggcggtgggcaccgtggacacgatggcggacactcacacggaggtgacatgagtaataggccagtgtgcaggcattttatgatgaaaggaaattgtaggtatgaaaataactgtgcattctaccacccgggagttaacggaccgccactgccatag

SEQ ID NO: 131300 - DNA, 2823 bp, Artificial Sequence
  derived and/or modified sequence
atgggcagcggacctatcgatcccaaagagctgctgaaagggctagactctttcctgaacagagatggcgaggttaaaagcgtcgacgggatttccaaaatcttctccctgatgaaagaagcaagaaagatggtgagccggtgcacatacttaaacattctgttacagacccgttccccagaaatcctggtcaagttcatcgatgtggggggttacaagctcctaaacaactggctgacttactcaaaaacaaccaataatattccgcttctacaacagatactgctgactcttcagcacctcccactgactgtcgatcatttgaagcagaacaacaccgcgaagctggtcaaacagctttcgaagtcatccgaagatgaggagcttagaaaactggcctctgtgctcgtgtctgattggatggcagttattagaagtcagtctagcactcagcccgcagagaaggataagaagaagagaaaagacgaaggaaagtctcgaaccaccctaccggagagacctctcaccgaggtgaaggccgagaccagggctgaagaagccccagagaagaagcgtgagaagcctaagagtttgcgcacaacagccccttcccacgctaaattcaggtctaccggccttgaactggagactccaagcctcgttccagtgaagaaaaatgcttccaccgtcgtggtgagcgacaagtacaatttgaagccaatacctctgaaaagacagtctaatgtggccgctcccggtgatgctaccccaccagctgagaagaaatataagcctctcaacactactccgaatgctacgaaagaaatcaaggtaaaaattatccccccacagccaatggagggcctgggctttctggatgcacttaacagcgcgccagttcctggtattaagattaaaaaaaaaaaaaaggtcttaagtcctactgccgctaagccatcaccatttgagggtaagaccagtactgagccaagcacagcgaaaccgagcagcccggagccggcaccgccatccgaggctatggatgccgatcgacccggtaccccagttccacctgtggaagtgccggagctgatggacaccgcgtctttagagccaggggcactggatgcaaaaccggtggaatcacctggcgaccctaaccaattaaccagaaagggcagaaaaaggaagagtgtcacctggcccgaggaaggaaaattaagggaatacttctactttgagctggacgagaccgaacgtgtgaacgttaacaaaatcaaggatttcggggaggcggctaaacgcgagattctcagtgaccgtcacgcctttgaaaccgcaagaaggctgtctcacgacaatatggaagaaaaagttccgtgggtctgcccacggcctcttgtccttccctcaccactcgtcactcctggatctaatagccaggaacggtacatccaggctgagcgtgagaagggcattctgcaggagcttttcctaaacaaggaaagtccccacgagcctgatccggaaccctatgaacctattccacctaagctgattccattagatgaagagtgcagcatggatgagacaccgtatgtggagacactggagccaggtggaagcggaggaagccccgacggggctggaggaagtaagttgccacctgttctcgccaacttgatgggatccatgggcgcaggtaagggccctcagggaccagggggtggtggcattaatgttcaggagatcctgaccagtatcatgggcagtcccaattctcaccctagcgaagagctgctcaaacagcctgattactctgacaaaatcaagcagatgctcgtgcctcatggactacttggcccaggacccatagccaatggcttcccacctggtgggccaggaggcccaaagggcatgcaacattttcctcccggacccggaggacccatgcctgggccacacggagggccaggagggcctgttggacctcgcctgttaggaccaccccctccacccagaggaggtgaccccttttgggatgggcctggggatcccatgaggggtgggcctatgagaggagggcctggtccaggccctggcccataccaccggggaagagggggacgcggtggtaatgagccgccacctcctccgccaccatttagaggggcacggggaggcaggagcgggggtggccctccaaacgggcgtggaggccctggtggcggaatggtggggggaggcggacataggcctcatgaaggaccgggtggtggtatgggtaatagctccggccaccgccctcacgaggggcctggagggggaatgggctcaggacatcgcccacatgaaggtcccggaggctcgatgggaggcggaggaggacatcgaccacatgagggtcctggcggaggcatctcaggagggtctggtcaccgaccacacgagggccctgggggagggatgggagccggaggcggtcaccggccacatgagggcccaggcggttccatgggcggaagtggtggtcacagacctcacgagggtcccggacatggagggcctcacggccataggccgcatgatgtgcccggtcaccggggacacgaccacagaggcccacctcctcacgaacaccgaggacacgacggcccaggacatgggggaggaggccaccgtggacacgatggtggccactcccacggcggagatatgagtaaccggccagtctgcagacatttcatgatgaaaggcaactgtcgctacgagaataactgtgccttctatcaccctggagtgaatggaccccctttaccctag

SEQ ID NO: 131301 - DNA, 2823 bp, Artificial Sequence
  derived and/or modified sequence
atggggtccggcccaatcgatcccaaagagctgttgaaaggcttggactccttcctgaaccgcgatggagaagtgaaatccgtcgacgggatcagcaagattttttctttgatgaaagaagccagaaaaatggtcagtcgttgtacatatcttaatatcctgctgcagacgcggagtccggaaatcctcgtcaagtttattgacgtaggcggatataagttgctcaataattggctcacatatagtaagacaaccaacaacattccgctgctgcaacagatattactgaccttgcagcacctccccttaaccgtggatcaccttaaacagaataatacagcaaagcttgtgaagcagctgagcaaaagcagtgaggacgaggaactgcgaaagctggcctccgtgctggtgtcagactggatggctgtgattagatcccaatcttccacacagccagcggaaaaggataaaaagaaaaggaaggatgaaggaaaaagccgaaccactttaccagagcgcccactcaccgaagtaaaggcagaaactagggccgaagaggctcctgagaagaagcgagagaaaccaaagtcactgcgcacgaccgctcccagccacgcgaaattccgctccacaggcctggagctggaaaccccctcacttgtgccagtcaagaagaatgctagcacagtagtggtttctgataagtataacctaaaaccaattcccctgaagcgccagtcgaacgtggctgcccctggcgatgccacaccaccagcagagaaaaaatacaagccactgaataccactccaaatgcaacgaaggaaattaaggtcaaaatcattcccccacagccaatggagggcctgggctttctggatgctttaaacagtgcccctgtgcctggcatcaaaattaagaagaagaagaaagtcctttctcctaccgcagccaagccatcaccctttgagggcaaaactagcactgagccctccactgctaaaccgagcagtcccgagccagcgccaccctctgaggcgatggatgcggacagacctggcacgccagtgccccctgttgaagtgcctgagttgatggacacagcttctctcgagcctggagctctggatgccaaaccagtggaatcaccgggtgacccgaaccagctgacgcgtaaaggccgaaaacgtaaaagcgtgacctggccagaggagggtaaactccgagagtatttctacttcgagctggacgagacagaaagggtaaacgtaaataaaatcaaggacttcggggaggcagccaagcgggaaatcctatctgatcggcacgcctttgagactgcgaggagattaagccatgataacatggaagaaaaggtcccttgggtgtgtccacgacccctcgtgctgcctagtcccttagttacccccggaagcaatagccaggagcgatacatccaggccgagagagaaaaaggtattttacaggaactgttccttaacaaagagagtccacatgagcccgacccggagccctacgaacctataccacctaagctcatccccctcgatgaggagtgttcaatggatgagaccccttacgtggaaacactagagcccggaggaagtggtggctcacctgacggcgcaggtggctccaagctgccgcctgtcctcgccaacttaatgggctcaatgggggctggaaagggccctcagggcccaggcggaggcggtataaacgtgcaggagattctgacctcaattatgggatccccaaactctcacccatcagaagagttgctaaaacagccagattactctgataaaatcaaacagatgctggtccctcacggtcttctaggaccaggtcctattgccaacggcttccctccaggtggccctgggggaccgaaaggaatgcagcactttccgcctggcccaggaggacccatgcccggaccccacggaggccctggcggtccagtggggccacgtctgctgggtcctcctcccccacccagaggcggtgaccccttttgggacggaccgggtgatcctatgcgaggtggcccaatgagagggggacccggaccagggcctggaccataccaccggggacgtgggggacgcggaggcaacgagccccctcccccaccccctccatttaggggagcccgtggcggtcgctcaggtggcggtcccccaaatggaaggggcggtcccggtggaggcatggttggcggtggaggtcataggccgcacgagggaccaggaggaggcatgggcaattctagtggtcacagacctcacgaaggcccaggtggaggtatgggaagcgggcatagacctcacgaagggccaggcggttccatgggcggtggtggcggacaccggccacacgaaggtccaggtgggggtatttcaggaggctccggccacagacctcacgagggacccggagggggtatgggtgccggtggtggtcacagacctcatgagggccctgggggatcaatggggggaagcggtgggcacaggccccacgaagggccagggcacggaggcccacatgggcatcggccacacgacgtacccggacaccgcggtcatgatcacagaggtcccccacctcacgagcaccgaggtcatgatggacctggtcacggaggcggaggacaccgcggacacgatggcggacatagccatgggggagatatgtctaacaggcctgtctgccgacactttatgatgaaaggtaactgtcggtacgaaaacaattgcgccttttatcatccaggtgttaatggaccacctcttccttag

SEQ ID NO: 131302 - DNA, 2823 bp, Artificial Sequence
  derived and/or modified sequence
atggggagtggaccgatagaccccaaggagttacttaaaggcttggacagcttcctgaatagagatggagaggtcaagtccgtagacgggatctccaagattttttctctgatgaaggaagccaggaagatggtgtcccgttgcacctacttgaatatacttctgcaaactagatcccctgaaatcctggtgaaatttattgatgtaggagggtataagcttcttaataactggttgacatactccaagactaccaataatatccccctgctacaacaaatcctgctcactcttcagcacctacctctgacagtcgaccacctgaaacagaacaataccgctaagttggtgaagcagctgtcaaaaagctcggaagatgaggagctccgaaagctggctagcgtgctggtgtccgattggatggccgtgatccggagccagagctcaactcagcccgctgaaaaggacaagaaaaaacgaaaagacgaggggaaatcacggaccactctcccggagaggccacttactgaagtgaaagcagagactcgcgctgaggaagcccctgaaaaaaaacgggaaaagcccaaaagcctgcgaacaacagcccctagccatgcaaagttcaggtccactgggctcgagctagaaacgccctcgctcgtgcctgttaagaagaacgcttccactgtggtagtcagtgacaaatacaatttgaagcctattcccctcaagcggcagagcaatgtcgctgcccctggcgatgcaactccacctgctgagaaaaagtacaaacccctgaatactacacctaacgctactaaagaaatcaaggtcaaaattattccccctcaaccaatggaaggcctggggttcctcgacgcgttgaactctgcacccgtgccaggaatcaagatcaagaagaaaaagaaggtcctatctcctactgcagccaagccaagcccctttgaaggcaagacatccacagagccgtctactgctaagcccagctctccagaaccggcaccccctagcgaggcgatggatgccgatagacccggaaccccagtgccgcctgtggaggttcccgagctgatggatacagcctctctggagccgggagcattagatgcaaaacccgttgagagtccaggggatccgaaccagctgacacggaagggtcgaaaaaggaagagcgtgacgtggcctgaagaagggaagcttcgcgagtatttttattttgagctcgacgagaccgaacgcgtcaacgtcaataagatcaaagatttcggtgaggcagcgaaaagggaaattctatccgataggcacgcgtttgagaccgccaggaggctgtcgcacgacaacatggaggagaaggtgccgtgggtgtgccctcgcccactggtgttgccctcaccactggtgacacctggttctaattctcaagaacggtacattcaggccgaacgggagaagggaatcctgcaggaactgttcctgaataaggagagcccccacgaacctgatcccgaaccatatgagcccattccccctaaactgataccactagacgaggaatgctctatggatgaaaccccatatgtcgagacactcgaacccggaggctctgggggatccccggacggggcagggggatcgaaattgcctcctgtcctagctaatctgatggggagtatgggagccggaaaggggcctcagggccctggcggaggcggtattaatgtgcaggagatcctgacaagcattatgggctccccaaattcccacccgtctgaagagctcttaaaacagcccgactactctgacaaaatcaagcagatgttagtgccacacggactgctcggaccaggcccaattgcgaacgggttccctccgggtggccctggcggacccaaggggatgcagcactttccgcctggcccaggtgggccaatgcccggaccgcatggcggtccagggggacctgtcggtcctcgtctgctgggtcctccaccacctccccgaggaggagacccattttgggacggacctggagacccaatgcgaggcggtcccatgaggggtggcccaggtccagggccaggaccttatcaccggggacgagggggtagaggcggaaacgagccgccaccgcctcctcctcccttccggggtgcccgagggggtcgcagcggaggcggtccccctaatgggagaggaggtccaggcggtggaatggtgggaggcggagggcaccggcctcatgaaggacccggtgggggtatgggcaatagctccggccaccggcctcatgagggcccaggtggtgggatggggtccggacaccgccctcacgagggacccggaggatctatgggtggcggtggcggacatagaccccatgagggcccaggaggcggaatctcaggcggttcgggacatagaccacacgaagggcctggcggtgggatgggcgcaggaggcggtcaccgcccacatgaggggccagggggaagcatgggaggatctggtggacaccgaccccacgaaggtcccggtcacggagggccacatggccacaggcctcatgatgtccccggtcaccgaggccacgaccaccgaggacctcccccacacgaacaccggggacatgatggacctggccacggaggtgggggacatcgtggacatgacggcggtcattcgcacgggggtgacatgtcgaacagacctgtttgcaggcacttcatgatgaagggtaactgccgttatgaaaataattgcgctttttatcatccaggagttaatggacctcctctgccttag

SEQ ID NO: 131303 - DNA, 939 bp, Artificial Sequence
  derived and/or modified sequence
atggggtctggtccaatcgacccaaaggagctgctgaagggtctggacagttttctcaatagagatggtgaggtgaagagcgtggacggcattagtaagatcttctctttaatgaaagaggctcgcaagatggtttcccgatgtacctacctgaatatcctcctgcagacgcgtagccctgagattctcgtgaaatttattgacgtcggcggatacaagttgctcaataattggctgacatacagtaaaacgaccaacaacattcccttgcttcagcagatcttgcttactctccagcatctgccactcactgtcgatcacctgaaacaaaacaacaccgctaagcttgttaaacagctcagcaaatcctccgaggatgaggaattgagaaagctggccagcgtccttgtcagcgactggatggccgttatccggtctcagtcatctacccaacctgccgagaaggacaagaaaaagcgaaaagatgagggcaagagcagaacgaccctccctgagcggccattgactgaggttaaggccgagacccgtgccgaggaggctccggagaaaaagcgggaaaaaccgaagtctcttcgaaccacagccccaagccatgccaagtttcgcagtaccggactcgaactcgaaaccccatctctggtacccgtgaagaagaacgcctccaccgtggtggtgtcggacaaatacaacctcaagcccattccacttaagagacagagtaatgttgccgctcccggtgacgccacccctcccgctgagaaaaagtacaagcctctgaacactaccccgaatgccacgaaggagattaaagtcaaaattattccccctcagccgatggaaggacttggctttttggatgccctcaactcagcacctgtgcccggtattaagattaagaaaaaaaaaaagaagaagtag

SEQ ID NO: 131304 - DNA, 939 bp, Artificial Sequence
  derived and/or modified sequence
atgggctccggacccatcgatccaaaggagctcctgaagggtctcgatagtttcctcaacagggacggggaagtgaaatccgtggatggcatctcgaagatcttctccctcatgaaggaggccaggaaaatggtctcccgatgtacctacttgaacattcttcttcagactagaagccccgaaatactggttaagttcatagatgtgggaggatacaaactgcttaacaactggcttacatactctaagactaccaataatatcccgctgctgcagcagatcctgctcactctccagcatcttcccctcactgttgatcatctcaaacagaacaacaccgccaagttagtgaaacaactgtctaaatcgtcggaggacgaggagctccgcaagctcgcaagtgtgctcgtatccgactggatggcagtgatcagatctcagtcgagtacacagccagccgagaaagacaagaaaaagcgcaaggatgagggtaagagcaggaccactctccctgaaagaccactgaccgaagtgaaggcggagacaagagcggaggaggccccagaaaaaaagagggagaagccaaagtccctccggacaaccgcccctagtcatgcaaagttcagatctaccggcctcgagctggagacccctagtctggttcccgtgaagaagaacgcctccaccgttgtggtaagcgacaagtataacctcaagccaatccctctgaaacggcagtctaacgtcgcagcacccggagacgctacacctccagccgagaagaagtataaacctctgaacacaacacccaacgccacaaaagagatcaaggtgaagattatacccccacagccaatggaggggctcggatttctggatgcattaaactccgcgcctgttcccggaattaaaatcaaaaagaagaagaaaaaaaagtag

SEQ ID NO: 131305 - DNA, 939 bp, Artificial Sequence
  derived and/or modified sequence
atgggaagcggccctatcgatcctaaagaattgctgaaaggtctggacagttttctgaacagggatggtgaggtaaagtctgtggatgggatctctaagatcttcagcctgatgaaagaggccaggaagatggtgtcccggtgtacctacctgaacattctcctgcagaccagatcccccgagatactggttaaattcatagatgtcggcggatacaaacttttgaataattggcttacttattcaaaaacgactaataatatccctttgttgcagcagattctgctgaccctccaacacctgcccctgactgtcgatcatttgaaacagaataataccgccaagctcgttaagcaactctcaaaatcaagcgaagacgaggagctgcggaagctcgcctctgtgctcgtttctgattggatggccgtcatccgctctcaaagttccactcagcccgcagaaaaagacaagaaaaaaaggaaagacgaaggaaaaagcaggaccacgctcccggagagaccgctgaccgaagtgaaggcagaaacccgtgctgaggaggcacccgagaagaaacgggaaaagccaaagtccttgaggacaacagcgcctagtcatgccaagttcaggtccacagggttagagctggagacaccctctctggtgcccgtcaagaagaacgcatctacagtcgtcgtgtccgataagtataatctaaagccaattcccttaaaacggcagtctaacgtggctgcaccgggagatgccacccctcccgcagaaaagaagtataaaccacttaacaccacacccaacgccacaaaagaaatcaaggttaagattattccacctcagcctatggaaggattaggatttctagatgcgttgaacagcgcgcctgtccctggaatcaagatcaaaaagaaaaaaaagaagaaatag

SEQ ID NO: 131306 - DNA, 939 bp, Artificial Sequence
  derived and/or modified sequence
atgggatcaggccctatcgatccaaaggaactgttgaagggcctggattctttcctcaaccgtgacggggaagtgaagtcagtggacggcatttctaaaatctttagcttgatgaaggaggccagaaagatggtcagcaggtgcacatacttgaatatcctgctgcagactagatctccggaaattttagtcaaattcatagacgtgggtggctataaactattaaacaattggcttacctacagtaagactactaataacatcccactgctgcagcagattttgctgactctccagcacttgccgttgaccgtggaccacctcaaacagaacaatacagctaaactggtcaagcagttgagcaagtcttctgaggatgaggaacttaggaaactcgccagcgtcctggtatcagattggatggccgtcattaggtcgcaatctagtacccaacccgcagagaaagacaaaaagaaacggaaggacgagggaaagtcccgcactaccctgcctgaaagacctctgactgaagttaaagcagaaacgagagccgaggaagctcctgagaagaagagagagaaacctaagtccctgcgcacaactgcgccttctcacgcaaagttccgctcaacaggcctagaactggagaccccgagtcttgtccccgtgaaaaaaaacgcttcaaccgtagtggtgtccgataagtataatctcaaaccaattcctctgaaaaggcaatccaacgtggccgctccaggcgacgctacccctccagccgagaagaaatataagccgctgaacacaacccccaacgcaaccaaggaaatcaaggttaaaatcatccctccacagcctatggaaggactcggattcctggacgcgctgaactccgccccagtgcccggaattaagatcaagaaaaagaagaagaaaaagtag

SEQ ID NO: 131307 - DNA, 939 bp, Artificial Sequence
  derived and/or modified sequence
atgggaagcggtcccattgatcctaaggagctcctgaagggacttgactcttttctaaaccgcgatggcgaagtgaagtctgtggacgggatttccaagatattctctctcatgaaagaagctcgcaaaatggtcagccgctgtacctacttgaatatactgctgcaaacaaggtcgccagaaatcttagtgaaattcatcgacgtgggcggatataagctgctaaacaattggctgacgtactcaaagaccacaaacaatattccactcctccaacagattctgcttactttgcagcaccttccccttaccgtagaccacctgaagcagaataacactgctaagttggttaagcaactgtctaaatcttctgaagacgaagagcttcggaagcttgcgtctgttttagtaagcgactggatggccgtaatcaggagccaaagctcaactcagcccgctgagaaggacaagaaaaaaagaaaagacgaagggaaatctcggaccactcttcctgagcgccctctaactgaggtgaaagcagaaacacgggcagaggaagcccctgaaaagaaacgtgagaaacccaagagcctcagaaccactgctccgtcccatgctaaattccgctcaacagggctcgagcttgagaccccaagcttagtgcctgtgaaaaagaacgcttccactgtagttgtgtctgataagtacaacctgaagccgataccattgaagagacaatccaatgtggccgcacccggagatgcaacacctcccgcagagaagaagtataagccattgaacacaactcccaacgctacgaaagagatcaaggtgaaaatcataccacctcagcccatggaaggactaggcttcctcgacgctttgaattcagctcccgtgcccggtatcaaaattaagaagaagaagaagaaaaagtag

SEQ ID NO: 131308 - DNA, 939 bp, Artificial Sequence
  derived and/or modified sequence
atgggctccggacctattgaccccaaggaactgcttaaggggctggacagttttctgaatagagatggagaggttaagagcgttgatggaatcagcaagatttttagtctcatgaaagaggccaggaagatggtgtctcgctgcacataccttaacatccttctgcagacaagaagcccagagatactggtgaagtttattgacgtggggggttacaaactcctgaataattggctcacctattctaaaaccacaaacaacataccattgctgcagcagatactgttaaccctgcagcatttgccactgactgtcgatcacctgaaacaaaataatactgcgaaattggtcaaacagttatccaagagttcagaggacgaagaactgaggaagctggcttctgtgctggtctctgattggatggcggttatccggagtcagagctcaacacagcctgccgagaaggacaaaaaaaaacgcaaggacgaaggtaagagccggacaaccttgccagagcgcccacttacagaggtgaaagccgagactcgtgcagaagaagcccctgaaaaaaaacgagagaagcccaaatctctgagaactacagcaccttctcatgcaaagtttcgcagcaccggccttgaacttgaaactcctagtcttgtccccgtaaagaagaacgcatcaaccgtggtggtctctgacaagtacaatctgaagcccataccactgaaaaggcagagcaacgtggccgcaccaggggatgctactccacccgcagagaagaaatataaacccctgaacacaacacctaacgccactaaagaaatcaaagtgaagataatacccccacaaccgatggagggattgggatttttggatgccctcaatagcgcccctgtgccgggtatcaagatcaagaaaaaaaaaaaaaagaagtag

SEQ ID NO: 131309 - DNA, 939 bp, Artificial Sequence
  derived and/or modified sequence
atggggagtggacccatcgaccccaaagagctgctgaaagggttggattccttcctgaaccgggacggcgaggtgaaaagtgtcgacggcatttcaaaaattttttccctgatgaaggaagccaggaaaatggtcagtagatgtacctacctgaacatactcctccagaccagatctcctgagattcttgtcaagtttatcgatgtcggcggatacaaactgctcaacaactggctgacctactcaaaaactactaataacatccctctcctgcagcagattctactgactctccagcatctgccactgacagtagaccacctgaagcagaataacacagctaagcttgttaagcagctttctaaatcctccgaggacgaggagctacgcaaactggccagtgtcctggtgtccgattggatggccgtcatcagaagtcaatcatccacccaacccgctgagaaggacaaaaagaagcggaaggatgaagggaaaagccgtacaacattacctgaacgaccgctcaccgaggtgaaggccgagacccgggctgaagaagcccctgagaagaagcgagagaagcccaaatctctcaggaccactgccccatctcatgcaaagtttcgaagcacagggctggagctggagacaccctcactagttccagttaaaaagaatgcctccaccgtcgttgtttccgacaagtacaacctcaagcctattcccctcaaaagacagagcaatgtggccgctccaggagacgccaccccccctgcagagaaaaagtacaaacctcttaacaccaccccgaacgctactaaagaaataaaggtgaaaattatccctccacagcccatggagggactcgggtttctggacgcccttaatagcgctccagtccccggtatcaagatcaaaaagaaaaaaaaaaagaaatag

SEQ ID NO: 131310 - DNA, 2823 bp, Artificial Sequence
  derived and/or modified sequence
atgggcagcggccccatcgaccccaaggagctgctgaagggcctggacagcttcctgaacagagacggcgaggtgaagagcgtggacggcatcagcaagatcttcagcctgatgaaggaggccagaaagatggtgagcagatgcacctacctgaacatcctgctgcagaccagaagccccgagatcctggtgaagttcatcgacgtgggcggctacaagctgctgaacaactggctgacctacagcaagaccaccaacaacatccccctgctgcagcagatcctgctgaccctgcagcacctgcccctgaccgtggaccacctgaagcagaacaacaccgccaagctggtgaagcagctgagcaagagcagcgaggacgaggagctgagaaagctggccagcgtgctggtgagcgactggatggccgtgatcagaagccagagcagcacccagcccgccgagaaggacaagaagaagagaaaggacgagggcaagagcagaaccaccctgcccgagagacccctgaccgaggtgaaggccgagaccagagccgaggaggcccccgagaagaagagagagaagcccaagagcctgagaaccaccgcccccagccacgccaagttcagaagcaccggcctggagctggagacccccagcctggtgcccgtgaagaagaacgccagcaccgtggtggtgagcgacaagtacaacctgaagcccatccccctgaagagacagagcaacgtggccgcccccggcgacgccaccccccccgccgagaagaagtacaagcccctgaacaccacccccaacgccaccaaggagatcaaggtgaagatcatccccccccagcccatggagggcctgggcttcctggacgccctgaacagcgcccccgtgcccggcatcaagatcaagaagaagaagaaggtgctgagccccaccgccgccaagcccagccccttcgagggcaagaccagcaccgagcccagcaccgccaagcccagcagccccgagcccgccccccccagcgaggccatggacgccgacagacccggcacccccgtgccccccgtggaggtgcccgagctgatggacaccgccagcctggagcccggcgccctggacgccaagcccgtggagagccccggcgaccccaaccagctgaccagaaagggcagaaagagaaagagcgtgacctggcccgaggagggcaagctgagagagtacttctacttcgagctggacgagaccgagagagtgaacgtgaacaagatcaaggacttcggcgaggccgccaagagagagatcctgagcgacagacacgccttcgagaccgccagaagactgagccacgacaacatggaggagaaggtgccctgggtgtgccccagacccctggtgctgcccagccccctggtgacccccggcagcaacagccaggagagatacatccaggccgagagagagaagggcatcctgcaggagctgttcctgaacaaggagagcccccacgagcccgaccccgagccctacgagcccatcccccccaagctgatccccctggacgaggagtgcagcatggacgagaccccctacgtggagaccctggagcccggcggcagcggcggcagccccgacggcgccggcggcagcaagctgccccccgtgctggccaacctgatgggcagcatgggcgccggcaagggcccccagggccccggcggcggcggcatcaacgtgcaggagatcctgaccagcatcatgggcagccccaacagccaccccagcgaggagctgctgaagcagcccgactacagcgacaagatcaagcagatgctggtgccccacggcctgctgggccccggccccatcgccaacggcttcccccccggcggccccggcggccccaagggcatgcagcacttcccccccggccccggcggccccatgcccggcccccacggcggccccggcggccccgtgggccccagactgctgggccccccccccccccccagaggcggcgaccccttctgggacggccccggcgaccccatgagaggcggccccatgagaggcggccccggccccggccccggcccctaccacagaggcagaggcggcagaggcggcaacgagcccccccccccccccccccccttcagaggcgccagaggcggcagaagcggcggcggcccccccaacggcagaggcggccccggcggcggcatggtgggcggcggcggccacagaccccacgagggccccggcggcggcatgggcaacagcagcggccacagaccccacgagggccccggcggcggcatgggcagcggccacagaccccacgagggccccggcggcagcatgggcggcggcggcggccacagaccccacgagggccccggcggcggcatcagcggcggcagcggccacagaccccacgagggccccggcggcggcatgggcgccggcggcggccacagaccccacgagggccccggcggcagcatgggcggcagcggcggccacagaccccacgagggccccggccacggcggcccccacggccacagaccccacgacgtgcccggccacagaggccacgaccacagaggcccccccccccacgagcacagaggccacgacggccccggccacggcggcggcggccacagaggccacgacggcggccacagccacggcggcgacatgagcaacagacccgtgtgcagacacttcatgatgaagggcaactgcagatacgagaacaactgcgccttctaccaccccggcgtgaacggcccccccctgccctag

SEQ ID NO: 131311 - DNA, 939 bp, Artificial Sequence
  derived and/or modified sequence
atgggcagcggccccatcgaccccaaggagctgctgaagggcctggacagcttcctgaacagagacggcgaggtgaagagcgtggacggcatcagcaagatcttcagcctgatgaaggaggccagaaagatggtgagcagatgcacctacctgaacatcctgctgcagaccagaagccccgagatcctggtgaagttcatcgacgtgggcggctacaagctgctgaacaactggctgacctacagcaagaccaccaacaacatccccctgctgcagcagatcctgctgaccctgcagcacctgcccctgaccgtggaccacctgaagcagaacaacaccgccaagctggtgaagcagctgagcaagagcagcgaggacgaggagctgagaaagctggccagcgtgctggtgagcgactggatggccgtgatcagaagccagagcagcacccagcccgccgagaaggacaagaagaagagaaaggacgagggcaagagcagaaccaccctgcccgagagacccctgaccgaggtgaaggccgagaccagagccgaggaggcccccgagaagaagagagagaagcccaagagcctgagaaccaccgcccccagccacgccaagttcagaagcaccggcctggagctggagacccccagcctggtgcccgtgaagaagaacgccagcaccgtggtggtgagcgacaagtacaacctgaagcccatccccctgaagagacagagcaacgtggccgcccccggcgacgccaccccccccgccgagaagaagtacaagcccctgaacaccacccccaacgccaccaaggagatcaaggtgaagatcatccccccccagcccatggagggcctgggcttcctggacgccctgaacagcgcccccgtgcccggcatcaagatcaagaagaagaagaagaagaagtag

SEQ ID NO: 131312 - DNA, 210 bp, Artificial Sequence
  derived and/or modified sequence
atgatggtgctgacccccttctggctgggcagagactgccccagcagaggccagcccaccctgagagagggcaagggcctgagcgtgcccttcacctgcaagctgaacaacccccagagatacctgctgtacctgacccacacccccagaagacagtacagccccgcctggtacctgcccggcaagctgggcatcaccctgaccgtgtag

SEQ ID NO: 131313 - DNA, 423 bp, Artificial Sequence
  derived and/or modified sequence
atgctgaccatcatgtgtggcttccagatgcagagccacctggccgccggggacatgaagaggctgggctatgactttgaccacctgctgagccctgccctgcccatcagcacctctgtggcccgggagggccccagcctcatcaccctgcgggccaccagagatgctgaatgtgccctgagcagcggggccggccagggcgccggccgcggggagaagaccccagccagccccaccaaccagcaccctggcctggaggagctgcagcaggccgctgaccgggagttccacccccagcctgacagcagaaattctgaggtgcaggaccgggccagctgccgctgggagcccggcatggtgggcgccgccagcagcgctgctggggagagcgtgtgtgtgcagggctgccgggtggcctgctag

SEQ ID NO: 131314 - protein, 309 aa, Artificial Sequence
  derived and/or modified sequence
MDEKVFTKELDQWIEQLNECKQLSESQVKSLCEKAKEILTKESNVQEVRCPVTVCGDVHGQFHDLMELFRIGGKSPDTNYLFMGDYVDRGYYSVETVTLLVALKVRYRERITILRGNHESRQITQVYGFYDECLRKYGNANVWKYFTDLFDYLPLTALVDGQIFCLHGGLSPSIDTLDHIRALDRLQEVPHEGPMCDLLWSDPDDRGGWGISPRGAGYTFGQDISETFNHANGLTLVSRAHQLVMEGYNWCHDRNVVTIFSAPNYCYRCGNQAAIMELDDTLKYSFLQFDPAPRRGEPHVTRRTPDYFL

SEQ ID NO: 131315 - DNA, 930 bp, Artificial Sequence
  derived and/or modified sequence
atggatgagaaggtcttcacaaaagagctcgaccagtggatagaacaacttaacgagtgcaaacagctgtccgagtcacaggtgaagtcgctttgtgaaaaagctaaggaaattctgacaaaagagtcgaatgttcaggaggtcaggtgccctgtgactgtgtgcggtgatgtgcacggacaattccacgacctcatggagctttttagaataggaggcaaaagtccggatactaactacctgttcatgggcgactacgttgatcggggctattacagcgtggaaacagtcactctcctggtggcattgaaggtacgatacagagaacggataaccatcctccggggaaatcatgagagccggcagatcactcaggtctatggcttttatgatgaatgcttaaggaagtacggtaatgctaacgtctggaaatactttacagatctcttcgactacctgccactgactgccttagtggatggccagattttctgcctgcatggtgggttgtcaccatccattgataccttggaccatatccgtgcactggatagactgcaggaggtgcctcacgaaggccccatgtgcgacttgctgtggtcggacccagacgatcgtggcggttggggtatcagccccaggggcgcaggctacacattcggccaggatatctccgaaaccttcaaccacgccaatggactgaccctggtaagccgggcccatcaactggtaatggagggttacaattggtgccatgacagaaatgttgtgactatcttctctgcaccaaattactgttacaggtgcggcaaccaggccgctataatggaactcgacgataccctgaagtattcatttctgcagttcgaccccgctccccggaggggcgagccccacgtgacaagaaggacacccgattactttctctag

SEQ ID NO: 131316 - DNA, 930 bp, Artificial Sequence
  derived and/or modified sequence
atggatgagaaggtgttcaccaaggagctggaccagtggattgagcagctgaatgaatgcaagcagctgtctgagagccaggtgaagagcctgtgtgagaaggccaaggagatcctgaccaaggagagcaatgtgcaggaggtgcgctgccctgtgacagtgtgtggagatgtgcacggccagttccatgacctgatggagctgttcagaattggaggcaagagcccagacaccaactacctgttcatgggagactatgtggaccggggctactacagcgtggagaccgtgaccctgctggtggccctgaaggtgcgctaccgggagcgcatcaccatcctgcggggcaaccacgagagccggcagatcacccaggtgtatggcttctatgatgagtgcctgaggaaatatggaaatgccaacgtgtggaagtacttcacagacctgtttgactacctgcccctgacagccctggtggatggccagatcttctgcctgcatggaggcctgagccccagcattgacaccctggaccacatccgggccctggaccggctgcaggaggtgccccatgagggccccatgtgtgacctgctgtggagcgaccctgatgacagaggaggctggggcatcagccccaggggggccggctacaccttcggccaggacatcagcgagaccttcaaccacgccaacggcctgaccctggtgtcccgggcccaccagctggtgatggagggctacaactggtgccacgacagaaatgtggtgaccatcttcagcgcccccaactactgctaccgctgtggcaaccaggccgccatcatggagctggatgacaccctgaagtacagcttcctgcagtttgatcctgccccccggcggggggagccccacgtgaccaggaggaccccagactacttcctgtag

SEQ ID NO: 131317 - DNA, 930 bp, Artificial Sequence
  derived and/or modified sequence
atggacgagaaggtgttcaccaaggagctggaccagtggatcgagcagttgaacgaatgcaagcaactgagtgaaagccaggtcaaaagtctgtgcgaaaaggcaaaggaaattctgaccaaggagtcgaacgtgcaggaggtacgatgccctgtgaccgtatgtggggacgtccatggacaattccacgacttgatggagctatttaggatcggcggcaaaagcccagacacaaattacctgttcatgggcgactacgttgacagagggtactactcagtggagacagtgaccctgttagtggcactcaaggtgcggtatcgtgagcgcataacaatacttaggggcaatcacgaatccagacagatcacccaggtgtacgggttctacgatgagtgtctgcgtaaatacggcaatgcaaatgtctggaaatattttaccgatctgttcgactatctccccctgacggccctggtggacgggcaaatcttttgtctgcacgggggtctgtccccgtctattgataccctggaccacattcgagctctggatcgattacaggaagtccctcatgaagggccaatgtgcgacttgttgtggtcagaccctgatgacagaggcggttggggtatttctccccgcggtgccggatacacattcggccaagatatctctgaaacttttaaccatgcaaatggcctgacacttgtgtcccgcgctcatcagttagtgatggagggctacaattggtgccatgaccgtaatgtggtgactatattctccgcacccaattactgttacaggtgcgggaatcaggccgctattatggagctcgacgatacactcaagtatagcttcctgcaatttgacccagcccctcgccggggcgagcctcatgtcacccgccgcaccccagactattttctttag

SEQ ID NO: 131318 - DNA, 930 bp, Artificial Sequence
  derived and/or modified sequence
atggacgagaaggtgtttaccaaagagctggatcagtggatcgagcagctaaatgaatgcaaacagctatccgaaagtcaggtcaaaagcctgtgtgagaaggccaaagaaatactgactaaggagagcaacgtccaggaggtgaggtgtccagtaacagtctgcggggatgttcatggtcagtttcacgaccttatggaacttttcaggatcgggggtaaatctccggatacaaactacctgttcatgggtgactacgttgatcggggttattacagcgtagagacagtgacactgctagtcgcactaaaggttaggtaccgagaacgtattaccattctgagaggaaaccacgagtcccgtcagataacacaggtgtacggattttacgatgagtgccttcgcaaatacgggaacgcaaacgtctggaagtattttaccgacctatttgactatctgcctctcaccgccctggttgatggacagatcttctgcttgcacgggggattatctccaagtattgatacactcgaccacattcgggctctcgacaggctgcaagaggtgccccacgaagggcctatgtgcgacttattatggtcggaccccgacgacagggggggatggggcatcagtccaagaggcgcagggtacaccttcggccaggacattagcgagacgtttaatcatgccaatggattaacccttgtctcacgtgcccaccaactagtgatggagggctacaattggtgtcacgataggaacgtggttactatcttttcagcacctaactattgttatagatgcggcaaccaggctgcgatcatggaactggacgatacgctgaaatactcttttctgcaatttgatccagctccacggcgaggagaaccccacgtcacacgcagaacacctgattatttcctctag

SEQ ID NO: 131319 - DNA, 4649 bp, Artificial Sequence
  derived and/or modified sequence
cttttcccctccgctccccgccgcctcctgacgccgggcgtgacgtcaccacgcccggcggccgccattacagagagccgagctctggagcctcagcgagcggaggaggaggcgcagcggccgacggccgagtactgcggtgagagccagcgggccagcgccagcctcaacagccgccagaagtacacgaggaaccggcggcggcgtgtgcgtgtaggcccgtgtgcgggcggcggcgcgggagcagcgcggagcggcagccggctggggcgggtggcatcatggacgagaaggtgttcaccaaggagctggaccagtggatcgagcagctgaacgagtgcaagcagctgtccgagtcccaggtcaagagcctctgcgagaaggctaaagaaatcctgacaaaagaatccaacgtgcaagaggttcgatgtccagttactgtctgtggagatgtgcatgggcaatttcatgatctcatggaactgtttagaattggtggcaaatcaccagatacaaattacttgtttatgggagattatgttgacagaggatattattcagttgaaacagttacactgcttgtagctcttaaggttcgttaccgtgaacgcatcaccattcttcgagggaatcatgagagcagacagatcacacaagtttatggtttctatgatgaatgtttaagaaaatatggaaatgcaaatgtttggaaatattttacagatctttttgactatcttcctctcactgccttggtggatgggcagatcttctgtctacatggtggtctctcgccatctatagatacactggatcatatcagagcacttgatcgcctacaagaagttccccatgagggtccaatgtgtgacttgctgtggtcagatccagatgaccgtggtggttggggtatatctcctcgaggagctggttacacctttgggcaagatatttctgagacatttaatcatgccaatggcctcacgttggtgtctagagctcaccagctagtgatggagggatataactggtgccatgaccggaatgtagtaacgattttcagtgctccaaactattgttatcgttgtggtaaccaagctgcaatcatggaacttgacgatactctaaaatactctttcttgcagtttgacccagcacctcgtagaggcgagccacatgttactcgtcgtaccccagactacttcctgtaatgaaattttaaacttgtacagtattgccatgaaccatatatcgacctaatggaaatgggaagagcaacagtaactccaaagtgtcagaaaatagttaacattcaaaaaacttgttttcacatggaccaaaagatgtgccatataaaaatacaaagcctcttgtcatcaacagccgtgaccactttagaatgaaccagttcattgcatgctgaagcgacattgttggtcaagaaaccagtttctggcatagcgctatttgtagttacttttgctttctctgagagactgcagataataagatgtaaacattaacacctcgtgaatacaatttaacttccatttagctatagctttactcagcatgactgtagataaggatagcagcaaacaatcattggagcttaatgaacatttttaaaaataattaccaaggcctcccttctacttgtgagttttgaaattgttctttttattttcagggataccgtttaatttaattatatgatttgtctgcactcagtttattccctactcaaatctcagccccatgttgttctttgttattgtcagaacctggtgagttgttttgaacagaactgttttttccccttcctgtaagacgatgtgactgcacaagagcactgcagtgtttttcataataaacttgtgaactaagaactgagaaggtcaaattttaattgtatcaatgggcaagactggtgctgtttattaaaaaagttaaatcaattgagtaaattttagaatttgtagacttgtaggtaaaataaaaatcaagggcactacataacctctctggtaactccttgacattcttcagattaacttcaggatttatttgtatttcacatattacaatttgtcacattgttggtgtgcactttgtgggttcttcctgcatattaacttgtttgtaagaaaggaaatctgtgctgcttcagtaagacttaattgtaaaaccatataacttgagatttaagtctttgggttttgttttaataaaacagcatgttttcaggtagagcttaaactaaatgatgtgtttacttagtgcagtttctggttatgaatattatattgctatgtgtatattatatggactctttaaaatgattgacagattggcaaattcttaaatctttgtacattgttgagtcatatgttcttagagttaaatttgtctcagataagaaagtgttaaagcattagcctgtgtcaagttctttgagtgatactagtgaaaccaaatagaaaactattgttggatcatgatttagtcttatgtacattcacccgaagacaaaaatggtacttaaagtggcagtgttcaacatttaatgagtttttccccttttatccttcgaataggattagatgtttaaaaaaaagttcttctgtgggaactaatatttgatattttaacctaccagagtaaacaggaacacttaatcatacttgtgagtgtagtaaataaaagttttcttgctttgtgctgtgttgaatctggaaccaacagggaagttatagcatatcccctttctaaaatgcttgaggaacacatacataccgaatgtcttttctgatctaattgatagtatttttagtggcttgtggagttaattttccaaagcaaaaggccattagggtttctacatttcatttcatttcattcttttctttcacaagaaatacattctctgtgtgtctttttgttgctctgtcactctatgccctttctctccgactgaacaaatagcttatccatgtgcagtggttttaatacccaaacaatctagacaccaagcagctattttttccggtcctgtgatatcagaattgaccaaggaatacgtatattgtaattgacacgtggtggtatcttccaggtacaaattctctaaattttgtggttagcagaatgggacttgtgataagaatagcttggttttagcataactagggtttaaaataattgtttaattatagagactgaccgggctttggccatctaaactggaaagtgttagtaccctaccttcttttgaaaatggctatggtaaggaaaatgtgttagtaaattatgtattttcttgaaaaatacataattatggttggatgggaatcactaagttgggtgttaactgatgtctcaattagtaacattaggattttcattaataaacctaaaaagctttccctaagaacaggcctggcacagtggctcatgcctgtaatcccagcactttgggagaccagggtgggtggatcccttgaggtcaggagttgaagagcagcctggccaacatggcaaaaccccatctctacaaaaaatatgaaaatcagccgggcttggtggcataccatagtcccagctacttgggaggctgaggtgagaggatcgcctgagcccaggagatggaggttgcagtgggctgagattgtgccactgtactccagtctgggtgacagagccagaccctgtctcaaaaataaagaggattctgagtttgtatagtgagggcttgcagaaattttgaaacttattttgtaagtttacaatgaatttgtacatgatgtgctcatgtcttgggttgagtatcctagacatgattttttcatttgctgcatattaaacatttgttggttgtagtcggtatttcttaaatagaagtttgtcaatattagattagtttcaagaaggacttagctcaggaaaaggatagttatttctgtggttctcagctttgatgcctacagagattctgatttaaattgctggaggagggcccaggcatacattttttaagtttcccaagtgattctaatttacatctagggttaaaaacagccaggcgcggtggctcatgcctgtaatcccagcacttggggaggccggggtgggtggatcacctgatgtcaggagatcgagaccagcctggccagcgtggtgaaaccccatctctattaaaaatacaaaactgaccggtgtggtggcaggagcctgtaatcccagctacttgggaggctgaggcaggagaatcacttgaactcaggaggaggaggttacagtgagcccagatcgtgccattgcactccagcctgggcaaaaagagcaaaactccatctcaaaaaacaaaaacacctcactgctgtttcctaagtacatacttaagaaaattgggatacatggtggtggttcatggatgttgataaggaattaaaatgtaccgtgcgactctctgtttcagtggtgacttttacctgtttagtataaatattcctttgcttccaaccataaatgtgttcttagaaatgggcctatagtttagtaacctatagtttggtaataggcttgtttgttttcagatggattttggttctgtgagctaaagctattttgcattaaagccttcgtcctca

SEQ ID NO: 131320 - DNA, 930 bp, Artificial Sequence
  derived and/or modified sequence
atggacgagaaggtgttcaccaaggagctggaccagtggatcgagcagctgaacgagtgcaagcagctgagcgagagccaggtgaagagcctgtgcgagaaggccaaggagatcctgaccaaggagagcaacgtgcaggaggtgagatgccccgtgaccgtgtgcggcgacgtgcacggccagttccacgacctgatggagctgttcagaatcggcggcaagagccccgacaccaactacctgttcatgggcgactacgtggacagaggctactacagcgtggagaccgtgaccctgctggtggccctgaaggtgagatacagagagagaatcaccatcctgagaggcaaccacgagagcagacagatcacccaggtgtacggcttctacgacgagtgcctgagaaagtacggcaacgccaacgtgtggaagtacttcaccgacctgttcgactacctgcccctgaccgccctggtggacggccagatcttctgcctgcacggcggcctgagccccagcatcgacaccctggaccacatcagagccctggacagactgcaggaggtgccccacgagggccccatgtgcgacctgctgtggagcgaccccgacgacagaggcggctggggcatcagccccagaggcgccggctacaccttcggccaggacatcagcgagaccttcaaccacgccaacggcctgaccctggtgagcagagcccaccagctggtgatggagggctacaactggtgccacgacagaaacgtggtgaccatcttcagcgcccccaactactgctacagatgcggcaaccaggccgccatcatggagctggacgacaccctgaagtacagcttcctgcagttcgaccccgcccccagaagaggcgagccccacgtgaccagaagaacccccgactacttcctgtag

SEQ ID NO: 131321 - protein, 440 aa, Artificial Sequence
  derived and/or modified sequence
MMQLTFWLRVPPPFSHFKRQFRSLCSDDTPMVRRAAASKLGEFAKVLELDSVKSEIVPLFTSLASDEQDSVRLLAVEACVSIAQLLSQDDLETLVMPTLRQAAEDKSWRVRYMVADRFSELQKAMGPKITLNDLIPAFQNLLKDCEAEVRAAAAHKVKELGENLPIEDRETIIMNQILPYIKELVSDTNQHVKSALASVIMGLSTILGKENTIEHLLPLFLAQLKDECPDVRLNIISNLDCVNEVIGIRQLSQSLLPAIVELAEDAKWRVRLAIIEYMPLLAGQLGVEFFDEKLNSLCMAWLVDHVYAIREAATNNLMKLVQKFGTEWAQNTIVPKVLVMANDPNYLHRMTTLFCINALSEACGQEITTKQMLPIVLKMAGDQVANVRFNVAKSLQKIGPILDTNALQGEVKPVLQKLGQDEDMDVKYFAQEAISVLALA

SEQ ID NO: 131322 - protein, 601 aa, Artificial Sequence
  derived and/or modified sequence
MAGASELGTGPGAAGGDGDDSLYPIAVLIDELRNEDVQLRLNSIKKLSTIALALGVERTRSELLPFLTDTIYDEDEVLLALAEQLGNFTGLVGGPDFAHCLLPPLENLATVEETVVRDKAVESLRQISQEHTPVALEAYFVPLVKRLASGDWFTSRTSACGLFSVCYPRASNAVKAEIRQQFRSLCSDDTPMVRRAAASKLGEFAKVLELDSVKSEIVPLFTSLASDEQDSVRLLAVEACVSIAQLLSQDDLETLVMPTLRQAAEDKSWRVRYMVADRFSELQKAMGPKITLNDLIPAFQNLLKDCEAEVRAAAAHKVKELGENLPIEDRETIIMNQILPYIKELVSDTNQHVKSALASVIMGLSTILGKENTIEHLLPLFLAQLKDECPDVRLNIISNLDCVNEVIGIRQLSQSLLPAIVELAEDAKWRVRLAIIEYMPLLAGQLGVEFFDEKLNSLCMAWLVDHVYAIREAATNNLMKLVQKFGTEWAQNTIVPKVLVMANDPNYLHRMTTLFCINALSEACGQEITTKQMLPIVLKMAGDQVANVRFNVAKSLQKIGPILDTNALQGEVKPVLQKLGQDEDMDVKYFAQEAISVLALA

SEQ ID NO: 131323 - protein, 119 aa, Artificial Sequence
  derived and/or modified sequence
MPRSPLKCPWIPSSRLGTGSACWLRLNSIKKLSTIALALGVERTRSELLPFLTDTIYDEDEVLLALAEQLGNFTGLVGGPDFAHCLLPPLENLATVEETVVRDKAVESLRQISQEHTPV

SEQ ID NO: 131324 - protein, 224 aa, Artificial Sequence
  derived and/or modified sequence
  misc_feature (1)..(1): Xaa can be any naturally occurring amino acid
XNLLKDCEAEVRAAAAHKVKELGENLPIEDRETIIMNQILPYIKELVSDTNQHVKSALASVIMGLSTILGKENTIEHLLPLFLAQLKDECPDVRLNIISNLDCVNEVIGIRQLSQSLLPAIVELAEDAKWRVRLAIIEYMPLLAGQLALSEACGQEITTKQMLPIVLKMAGDQVANVRFNVAKSLQKIGPILDTNALQGEVKPVLQKLGQDEDMDVKYFAQEAI

SEQ ID NO: 131325 - DNA, 1323 bp, Artificial Sequence
  derived and/or modified sequence
atgatgcagctgaccttctggctgagagtgcccccccccttcagccacttcaagagacagttcagaagcctgtgcagcgacgacacccccatggtgagaagagccgccgccagcaagctgggcgagttcgccaaggtgctggagctggacagcgtgaagagcgagatcgtgcccctgttcaccagcctggccagcgacgagcaggacagcgtgagactgctggccgtggaggcctgcgtgagcatcgcccagctgctgagccaggacgacctggagaccctggtgatgcccaccctgagacaggccgccgaggacaagagctggagagtgagatacatggtggccgacagattcagcgagctgcagaaggccatgggccccaagatcaccctgaacgacctgatccccgccttccagaacctgctgaaggactgcgaggccgaggtgagagccgccgccgcccacaaggtgaaggagctgggcgagaacctgcccatcgaggacagagagaccatcatcatgaaccagatcctgccctacatcaaggagctggtgagcgacaccaaccagcacgtgaagagcgccctggccagcgtgatcatgggcctgagcaccatcctgggcaaggagaacaccatcgagcacctgctgcccctgttcctggcccagctgaaggacgagtgccccgacgtgagactgaacatcatcagcaacctggactgcgtgaacgaggtgatcggcatcagacagctgagccagagcctgctgcccgccatcgtggagctggccgaggacgccaagtggagagtgagactggccatcatcgagtacatgcccctgctggccggccagctgggcgtggagttcttcgacgagaagctgaacagcctgtgcatggcctggctggtggaccacgtgtacgccatcagagaggccgccaccaacaacctgatgaagctggtgcagaagttcggcaccgagtgggcccagaacaccatcgtgcccaaggtgctggtgatggccaacgaccccaactacctgcacagaatgaccaccctgttctgcatcaacgccctgagcgaggcctgcggccaggagatcaccaccaagcagatgctgcccatcgtgctgaagatggccggcgaccaggtggccaacgtgagattcaacgtggccaagagcctgcagaagatcggccccatcctggacaccaacgccctgcagggcgaggtgaagcccgtgctgcagaagctgggccaggacgaggacatggacgtgaagtacttcgcccaggaggccatcagcgtgctggccctggcctag

SEQ ID NO: 131326 - DNA, 1806 bp, Artificial Sequence
  derived and/or modified sequence
atggccggcgccagcgagctgggcaccggccccggcgccgccggcggcgacggcgacgacagcctgtaccccatcgccgtgctgatcgacgagctgagaaacgaggacgtgcagctgagactgaacagcatcaagaagctgagcaccatcgccctggccctgggcgtggagagaaccagaagcgagctgctgcccttcctgaccgacaccatctacgacgaggacgaggtgctgctggccctggccgagcagctgggcaacttcaccggcctggtgggcggccccgacttcgcccactgcctgctgccccccctggagaacctggccaccgtggaggagaccgtggtgagagacaaggccgtggagagcctgagacagatcagccaggagcacacccccgtggccctggaggcctacttcgtgcccctggtgaagagactggccagcggcgactggttcaccagcagaaccagcgcctgcggcctgttcagcgtgtgctaccccagagccagcaacgccgtgaaggccgagatcagacagcagttcagaagcctgtgcagcgacgacacccccatggtgagaagagccgccgccagcaagctgggcgagttcgccaaggtgctggagctggacagcgtgaagagcgagatcgtgcccctgttcaccagcctggccagcgacgagcaggacagcgtgagactgctggccgtggaggcctgcgtgagcatcgcccagctgctgagccaggacgacctggagaccctggtgatgcccaccctgagacaggccgccgaggacaagagctggagagtgagatacatggtggccgacagattcagcgagctgcagaaggccatgggccccaagatcaccctgaacgacctgatccccgccttccagaacctgctgaaggactgcgaggccgaggtgagagccgccgccgcccacaaggtgaaggagctgggcgagaacctgcccatcgaggacagagagaccatcatcatgaaccagatcctgccctacatcaaggagctggtgagcgacaccaaccagcacgtgaagagcgccctggccagcgtgatcatgggcctgagcaccatcctgggcaaggagaacaccatcgagcacctgctgcccctgttcctggcccagctgaaggacgagtgccccgacgtgagactgaacatcatcagcaacctggactgcgtgaacgaggtgatcggcatcagacagctgagccagagcctgctgcccgccatcgtggagctggccgaggacgccaagtggagagtgagactggccatcatcgagtacatgcccctgctggccggccagctgggcgtggagttcttcgacgagaagctgaacagcctgtgcatggcctggctggtggaccacgtgtacgccatcagagaggccgccaccaacaacctgatgaagctggtgcagaagttcggcaccgagtgggcccagaacaccatcgtgcccaaggtgctggtgatggccaacgaccccaactacctgcacagaatgaccaccctgttctgcatcaacgccctgagcgaggcctgcggccaggagatcaccaccaagcagatgctgcccatcgtgctgaagatggccggcgaccaggtggccaacgtgagattcaacgtggccaagagcctgcagaagatcggccccatcctggacaccaacgccctgcagggcgaggtgaagcccgtgctgcagaagctgggccaggacgaggacatggacgtgaagtacttcgcccaggaggccatcagcgtgctggccctggcctag

SEQ ID NO: 131327 - DNA, 1323 bp, Artificial Sequence
  derived and/or modified sequence
atgatgcagcttaccttttggttgcgggtcccccctccttttagccactttaaacggcaatttcgctccctgtgctctgatgatacacctatggttcgacgcgccgctgcctcgaaactgggggagtttgccaaggtactggagctagatagcgtgaagagtgaaatcgtgccactcttcacaagcctggcgagcgatgagcaagatagcgtcagattactggccgtggaagcatgtgtaagtattgcacagttactgagccaggatgatcttgaaacccttgtgatgcctactcttagacaggccgcggaggacaagagttggagagtgcgctacatggtggcagatcgcttttcagaattgcagaaagctatggggcctaaaataacactcaacgacctcatcccggctttccagaacttgttaaaggactgcgaggctgaagtgagggcggccgcagctcataaagtgaaggagctgggggaaaatctgcccatcgaagatagagagacaattatcatgaaccagatcttaccctacatcaaggagctagtcagtgatactaatcagcatgttaagagcgccctggcgagcgttatcatgggtctgtcaacaattctggggaaggaaaacacaatcgagcatctgctccctttgtttctagcacaactcaaagatgagtgtccagatgtacgcctgaacattatttccaatctggattgtgtgaacgaagtgatcgggattcgacagctctctcagtccctgctccccgccattgtggagctcgcagaggatgcaaaatggcgtgtgcgcctggcgattattgagtatatgcccctgctcgcaggccagctcggagtggaattcttcgatgaaaagctgaacagtctctgtatggcctggctggttgaccacgtctacgcgattagggaggcagccactaacaaccttatgaaattggtgcagaaattcggaaccgaatgggcacagaacaccatcgttcccaaagtgctggtgatggctaacgaccctaactatctgcataggatgacaaccctcttctgcattaatgccctctccgaagcctgtggacaggagattaccactaagcagatgctccccatcgtcctgaagatggcaggtgatcaggtggcgaacgtcagatttaacgtcgccaagtcccttcaaaaaataggacccattctcgataccaatgccctgcagggtgaggttaagcctgttctgcagaagttgggccaggatgaagacatggacgtgaagtattttgcccaagaggccatcagtgttcttgccctggcgtag

SEQ ID NO: 131328 - DNA, 1806 bp, Artificial Sequence
  derived and/or modified sequence
atggccggagcttctgaactcggtactggccctggcgcggctgggggggatggtgatgactctctgtatccaatcgcagtcctcatcgatgaattaaggaacgaagatgttcagctgcgcctcaattcaatcaagaagcttagcaccatagcgctcgccctcggcgtggagagaacccgatctgagctcttgccttttctcacagacaccatctatgatgaggatgaggtcctcctcgccctcgccgagcagctgggaaactttactggcctggtcggcgggccagattttgcacactgtctcctccctcctctagagaatctggcgacagtggaggagacagtggtaagagataaggctgttgaatcattgagacagatcagccaggagcacacaccagtagccctggaggcgtattttgtgcctctcgtcaagaggctggccagcggagactggttcacatcacggacctccgcgtgtgggctatttagcgtgtgctacccaagagccagcaacgcggtgaaggccgaaatacgacaacaatttcgctccctgtgtagtgatgatacgcctatggtgcgaagagccgccgccagtaagctcggagaattcgccaaggttctcgaactcgatagcgttaaaagtgaaattgtgcctttattcacctccctggctagtgacgaacaggattccgtaagactcttagctgtggaagcatgtgtctcaatagcgcagctgctgtctcaagacgatctcgaaacactggtgatgcccaccctccgacaggccgctgaagacaaaagctggcgcgtgcgctatatggtcgccgatagattttccgaattgcaaaaggctatgggcccaaaaataactctcaacgacctcattccagctttccagaacctcctgaaggactgcgaggccgaagttcgcgcggccgcagctcacaaggtgaaggaattaggcgagaacctgcccatagaggacagggagactatcataatgaatcagatccttccttatattaaggaattggtgagcgacacaaatcagcacgtgaagtcagctctggctagcgtaattatgggcctgtctactattctcggcaaggagaatacaatagaacacttgctccccctgtttctggcgcaactgaaagacgagtgcccagatgtgaggctgaatattatctccaacctggattgcgtcaatgaagtaatcgggatcaggcagcttagccagtcgcttctgccagctattgttgaattagctgaggacgcaaaatggcgtgtcaggctcgccataattgagtacatgccgctcttagctggacaactgggggtcgaattcttcgatgaaaaattgaatagtctttgtatggcctggcttgtcgaccatgtctacgcgatccgggaggccgcgactaacaatctgatgaagttggtgcagaagtttggtaccgaatgggcccagaacaccatcgtccccaaagtcttggtaatggctaacgatcccaactacttacacagaatgacaaccttgttctgtattaatgccctgagtgaagcgtgtggacaggagatcacaactaagcagatgctacctattgtcctgaagatggctggcgatcaggttgcaaacgttcggttcaatgtggccaaaagtctgcagaagattgggcctatcctggatactaatgctctccagggagaggtgaaacccgttttacagaagctggggcaagacgaggacatggatgtcaagtacttcgcgcaagaagcaatctcggtgctggctttggcatag

SEQ ID NO: 131329 - DNA, 1323 bp, Artificial Sequence
  derived and/or modified sequence
atgatgcagctgaccttctggctgcgggtgcccccacccttcagccacttcaagaggcagttccgcagcctgtgcagtgatgacacccccatggtgagaagagctgctgccagcaagctgggggagtttgccaaggtgctggagctggacagcgtgaagtctgagatcgtgcccctcttcaccagcctggccagtgatgagcaggacagcgtgcggctgctggccgtggaggcctgtgtgtccatcgcccagctgctgagccaggatgacctggagaccctggtgatgcccaccctgcggcaggccgctgaggacaagtcctggagggtgcgctacatggtggccgaccgcttcagcgagctgcagaaggccatgggccccaagatcaccctgaatgacctgatcccagccttccagaacctgctgaaggactgtgaggccgaggtgcgggctgctgctgcccacaaggtgaaggagctgggggagaacctgcccattgaagatcgggagaccatcatcatgaaccagatcctgccctacatcaaggagctggtgtctgacaccaaccagcacgtgaagagcgccctggccagcgtcatcatgggcctgagcaccatcctgggcaaggagaacaccatcgagcacctgctgcccctcttcctggcccagctgaaggatgaatgtccagatgtgcggctgaacatcatcagcaacctggactgtgtgaatgaagtcatcggcatccggcagctgagccagagcctgctgcctgccatcgtggagctggccgaggatgccaagtggagggtgcggctggccatcatcgagtacatgcccctgctggccggccagctgggcgtggagttctttgatgagaagctgaacagcctgtgcatggcctggctggtggaccacgtgtatgccatccgggaggccgccaccaacaacctgatgaagctggtgcagaagtttggaacagagtgggcccagaacaccatcgtgcccaaggtgctggtgatggccaatgaccccaactacctgcacaggatgaccaccctcttctgcatcaatgccctgtctgaggcctgtggccaggagatcaccaccaagcagatgctgcccatcgtgctgaagatggccggggaccaggtggccaacgtgcgcttcaacgtggccaagagcctgcagaagattggccccatcctggacaccaatgccctgcagggcgaggtgaagcctgtgctgcagaagctgggccaggatgaggacatggatgtgaagtactttgcccaggaggccatctctgtgctggccctggcctag

SEQ ID NO: 131330 - DNA, 1806 bp, Artificial Sequence
  derived and/or modified sequence
atggccggggccagcgagctgggcactggacctggagctgctggaggagatggagatgacagcctgtaccccatcgctgtgctgattgatgagctgagaaatgaagatgtgcagctgcggctgaacagcatcaagaagctgagcaccatcgccctggccctgggcgtggagaggaccaggtctgagctgctgcccttcctgacagacaccatctatgatgaagatgaggtgctgctggccctggccgagcagctgggcaacttcaccggcctggtgggcggccctgactttgcccactgcctgctgccccccctggagaacctggccaccgtggaggagaccgtggtgcgggacaaggctgtggagagcctgcggcagatcagccaggagcacacccctgtggccctggaggcctactttgtgcccctggtgaagaggctggccagcggggactggttcaccagcaggaccagcgcctgtggcctcttctctgtgtgctacccccgggccagcaatgctgtgaaggccgagatccggcagcagttccgcagcctgtgcagtgatgacacccccatggtgcggcgggctgctgccagcaagctgggggagtttgccaaggtgctggagctggacagcgtgaagtcagaaattgtgcccctcttcaccagcctggccagtgatgagcaggacagcgtgcggctgctggccgtggaggcctgtgtgtccatcgcccagctgctgagccaggatgacctggagaccctggtgatgcccaccctgcggcaggccgctgaggacaagtcctggagggtgcgctacatggtggccgaccgcttcagcgagctgcagaaggccatgggccccaagatcaccctgaatgacctgatcccagccttccagaacctgctgaaggactgtgaggccgaggtgcgggctgctgctgcccacaaggtgaaggagctgggggagaacctgcccatcgaggaccgggagaccatcatcatgaaccagatcctgccctacatcaaggagctggtgtctgacaccaaccagcacgtgaagagcgccctggccagcgtcatcatgggcctgagcaccatcctgggcaaggagaacaccatcgagcacctgctgcccctcttcctggcccagctgaaggatgagtgcccagatgtgcggctgaacatcatcagcaacctggactgtgtgaatgaggtgattggcatccggcagctgagccagagcctgctgcctgccatcgtggagctggctgaagatgccaagtggagggtgcggctggccatcatcgagtacatgcccctgctggccggccagctgggcgtggagttctttgatgagaagctgaacagcctgtgcatggcctggctggtggaccacgtgtatgccatccgggaggccgccaccaacaacctgatgaagctggtgcagaagtttggaacagagtgggcccagaacaccatcgtgcccaaggtgctggtgatggccaatgaccccaactacctgcacaggatgaccaccctcttctgcatcaatgccctgtctgaggcctgtggccaggagatcaccaccaagcagatgctgcccatcgtgctgaagatggccggggaccaggtggccaacgtgcgcttcaacgtggccaagagcctgcagaagattggccccatcctggacaccaatgccctgcagggcgaggtgaagcctgtgctgcagaagctgggccaggatgaggacatggatgtgaagtactttgcccaggaggccatctctgtgctggccctggcctag

SEQ ID NO: 131331 - DNA, 1323 bp, Artificial Sequence
  derived and/or modified sequence
atgatgcagctgaccttctggctgcgggtgcccccccccttcagccactttaagcgccagtttaggagtctatgtagcgacgacaccccaatggtgagacgggccgcggcctcaaagttaggggaatttgccaaagtgctggagttagactccgtgaagagcgaaatcgtgccgctctttacttccctggccagcgacgagcaggattctgtgagactcctagccgtcgaagcttgtgtctctatcgctcagctgctctcccaggacgatctcgagaccctcgtcatgccaacactgcgtcaagcggccgaggataagagctggcgtgtgagatatatggtggccgacaggttctccgagctccagaaagctatgggcccaaagataaccttgaatgatctgatccctgcattccagaacctgctgaaagactgtgaggccgaggtccgggccgctgcagcgcacaaagttaaagagctgggcgagaaccttccaattgaggatcgggagacaattatcatgaaccagattttgccgtacatcaaagaacttgtgtccgataccaaccaacacgttaaaagcgcccttgcatctgtaattatgggcctgagcacaatactgggcaaggaaaatactatagaacacctgcttccactttttctggcccagctaaaggacgagtgtcctgatgtcagactgaatataataagtaacttggactgcgtcaacgaggtcatcggaattaggcaactcagtcagagccttctcccagctatcgtcgagctcgccgaggatgctaaatggagagtgcgactggccatcattgagtacatgcctttactggccggccagttaggtgttgagtttttcgacgaaaaattgaactccctgtgtatggcttggctggtcgaccacgtgtatgccatcagggaggcggctaccaataatctcatgaagctggtgcagaagttcgggaccgaatgggcccagaatactatcgtacctaaagtgcttgtcatggcaaacgatcccaattatctgcatcggatgaccacactgttctgcatcaacgctctgagtgaggcatgtggacaagagattaccacaaagcagatgttaccaatcgtgcttaagatggccggagatcaagtcgcaaatgtgcgcttcaacgtggccaagtcacttcagaaaatcggcccaatcctggatacaaacgcactccaaggtgaggtgaagcccgtgctgcaaaagctgggacaagatgaggacatggatgtaaagtatttcgcacaggaggccatatctgtcctcgcactggcctag

SEQ ID NO: 131332 - DNA, 1806 bp, Artificial Sequence
  derived and/or modified sequence
atggccggcgccagcgagctgggcaccggccccggcgccgccggcggcgacggtgacgacagcctctatcctattgccgtgcttatcgatgaactacgcaacgaagatgtacagctgaggcttaattccattaagaagctgagtaccatcgcccttgccttgggggtcgagagaacaagatccgagctcttacccttccttaccgatacaatctatgatgaggacgaggtcctcttggccctggccgaacagttgggaaatttcacaggcctggttgggggcccagacttcgcgcactgtctgctccctcccttagaaaatctggcaacggttgaagaaaccgtggttagggacaaagctgtggaaagcctgagacagatttcccaggagcatacccctgtcgcattagaggcatactttgtgccactggttaagaggcttgcatccggagactggttcacatcccgtacttctgcatgcggcctcttctcagtatgctacccacgggcttccaacgccgttaaagcagagattcggcagcagttccgctcactgtgtagcgatgacacacctatggtgcgtcgtgcagcagccagcaaactaggagagttcgctaaagtactggagctcgattccgtcaagtctgagatagtgcctctgtttacgtcactggcatctgacgaacaggactcggtgcggctgcttgccgtcgaagcttgtgtttcaatcgcacagctgctctcccaggacgacctggagacattggtgatgccgacgctgaggcaagctgccgaggacaagtcctggcgagtgcgatatatggtggccgaccgtttttctgaattgcagaaggcaatgggtcctaaaattactctgaatgatcttatcccagcattccagaacctgctcaaagattgcgaggctgaagtccgggccgcggcagcccataaggtaaaagagctcggggaaaatctgccaatcgaggacagggaaaccatcatcatgaatcagattctgccctacatcaaagagctggtgtctgacaccaatcagcatgtgaaatctgcccttgccagcgttatcatgggcctaagtaccatcctcggcaaggaaaatacgattgagcacctgctcccactattcctcgcccagctgaaggatgagtgtcccgacgtccggctcaatatcattagtaatttggactgtgtgaacgaggtgattggcatcaggcagctcagccagtcacttcttcctgccatcgtggaattggcagaggacgcaaaatggcgggtgaggctggccatcattgaatacatgcctttactcgccgggcagttgggggtggagttcttcgacgagaaactgaatagcctgtgcatggcatggttagttgaccatgtgtatgccataagagaagcagctacgaacaatctgatgaaactggtccagaagtttgggaccgagtgggctcagaacactatcgtgcccaaggtccttgtcatggccaacgacccaaactacctgcaccgaatgactaccctcttttgcatcaatgctctgagcgaggcctgtggccaggagatcaccaccaaacagatgctgcctatagtcctgaagatggccggggaccaggtagcgaacgttcggttcaatgtggctaagtctcttcagaaaattggtcctatcttagatacaaacgcattgcagggggaggtgaaacccgtgctgcagaaactgggacaggatgaagacatggacgtaaagtactttgctcaggaggcgatcagtgtgctggccttagcgtag

SEQ ID NO: 131333 - DNA, 1323 bp, Artificial Sequence
  derived and/or modified sequence
atgatgcagctcacattctggctgcgagtccctcccccatttagtcacttcaaacggcagtttagatccctatgttccgatgacaccccaatggtgcggagagccgcagccagcaagctgggggaatttgccaaagtcctcgaactcgattctgtcaaatcagaaattgttcccctgttcacgagtctggcctctgatgagcaggattcggtccggttgctggcagtggaggcctgtgtgagcatcgcacagctactgtctcaggacgatctggagactctggtgatgccaaccctgcggcaggcagctgaggacaagagctggcgggtaaggtatatggtagctgatcggtttagtgaactgcagaaagcgatgggcccaaagatcactttaaatgatctcatcccggcatttcaaaacctcctgaaagattgcgaggctgaggtgagagctgccgcagcccacaaggtcaaggagctgggagagaaccttccaattgaggacagggagactatcattatgaaccagattctgccctatatcaaagagctggtgtcggatactaatcaacacgttaagtcggctctggccagcgttattatgggactctcgacaattctagggaaggagaacaccatcgaacacctgttaccactcttcctcgctcaactcaaggatgagtgtcccgatgtccgcctgaatatcatttcaaatctcgattgcgtaaatgaagttatcggaatcaggcaactctcccagtcactgctcccagctatcgtagaattagcagaggatgctaaatggagggtccgcttggccataattgaatatatgcctctcttggccggtcaactgggtgtggaatttttcgacgagaagcttaattcgttgtgcatggcttggctggtggaccacgtatatgccatccgggaggccgcaaccaacaatctcatgaagcttgttcagaagttcgggacggaatgggcacagaacacaatcgtacctaaagtgctcgtgatggccaacgatccaaattacctgcacagaatgacaaccctgttctgtatcaatgcactgagcgaagcctgtggacaagagatcaccacaaaacagatgttacctatcgtgctgaagatggcaggagaccaagtcgctaatgtgaggttcaatgtggctaagagccttcagaagatagggcctatcctggatacaaacgccttacagggtgaggtcaaaccagtgctgcagaagctgggtcaggacgaagatatggacgtcaagtactttgcccaggaggccatcagtgtgttggccctggcctag

SEQ ID NO: 131334 - DNA, 1806 bp, Artificial Sequence
  derived and/or modified sequence
atggcaggcgcttcagagctgggcacgggaccgggagctgcaggcggagacggtgacgattctctgtatcctattgcagtcctgatcgatgaattacggaacgaggacgtgcagctccgcctgaacagtatcaagaaactgtcaacgatcgcactcgcgttgggagtggagagaaccaggagcgagctgttgccgttcctgactgacactatctacgatgaggacgaagtcttgctcgccctcgcagagcagctagggaacttcactggtttggtgggcggaccagattttgcgcactgcctactccctcctctggagaacctcgccacggtggaggaaacagtcgtcagagataaagcagttgaatccctccgccaaatctcacaggagcacacacccgtggcgctggaggcgtactttgtcccactggtgaagcggttagcttctggagactggttcacaagcagaacctccgcctgtgggctgttcagtgtctgctatccaagagcctccaatgctgtgaaggccgaaattcggcagcaatttcgctctttatgttctgacgacacgcctatggtacggagggcagcagcatctaagctcggtgagttcgccaaggtactggaactagacagcgtcaagtccgagatcgtgccactgttcaccagtctggcatcagacgaacaggactctgtcagactcttggccgtggaggcttgtgtgagcattgctcagctgctatctcaggatgatcttgagaccctggtgatgccaacactcaggcaggccgctgaagataagagttggcgtgtccggtatatggtagcggatcggttcagcgagctacagaaggcaatgggacccaaaattacactaaatgatctaattcctgcctttcagaatctactgaaggattgcgaggctgaagttcgagccgctgctgcacataaagtgaaagagctgggagaaaatctgccaatcgaagatcgtgagacaataataatgaaccagattctgccttacatcaaggagctggtgagcgacactaatcagcacgtgaagagcgctcttgcttctgtcatcatggggctgtctaccattttggggaaagaaaataccatcgaacacctgctgcccctttttctcgcccagctgaaggatgagtgccccgacgtcaggctcaacatcataagtaatcttgactgcgtcaacgaagtaatcggcataaggcagttgtcccagtcactgctgccagcaattgtggaactcgcggaagatgccaagtggcgggtccggcttgcgattatcgagtacatgccgcttctcgctggtcagctcggcgtggagttttttgacgagaagctaaacagcttatgcatggcctggctagtggatcatgtgtacgccattagggaggctgccactaacaacctgatgaaactcgtacagaagtttgggacagaatgggcccaaaataccattgttccaaaggtgctcgtgatggccaacgatcccaattatctgcataggatgacaactctgttctgtattaacgctctatccgaagcctgtggtcaagagatcaccaccaaacagatgctcccgatcgtattaaaaatggccggagaccaggtagctaacgtgcgttttaacgtcgctaaaagcctccaaaaaattggacctatcttggacacaaatgctttgcagggcgaggtgaagcctgtccttcagaaactggggcaggatgaggatatggatgtgaagtactttgcccaggaggccatatctgtgttggcactggcctag

SEQ ID NO: 131335 - DNA, 2294 bp, Artificial Sequence
  derived and/or modified sequence
aaagaacatggcgggcgcatcagagctcgggaccggcccaggagcagcgggtggagatggagatgattcgctatacccgatcgcggttttaatcgacgagctccgcaatgaagacgtgcagctccgactcaacagtattaagaagttatcaacaattgccctagcacttggagtagaaaggacccgaagtgaattgttgccatttcttacagatacaatttatgatgaagatgaggtactattagctcttgctgagcagctgggaaatttcactggcctagtgggaggtcctgactttgcccactgtctgctgacaccatctgggaattgccatctgggacacgagatcttggcttttctacagaagtcgtgtctttgggttggccgcaccatatgttatcactgtgtgagctgaaagtaaccatttggtatgatgcagctaacattctggttacgtgtaccacctcccttcagtcactttaaaaggcaattccgttccttgtgctcagatgacacaccaatggtacgacgtgctgctgcttccaaattgggtgaatttgcaaaagttttggaattagacagtgtgaaaagtgaaattgttccactgttcactagtctagcttcagatgaacaggattcagtgcgcctccttgctgtggaagcttgtgtcagtattgcccagttattgtctcaggatgaccttgagactttggtgatgcctacacttcgacaagcagcagaagataaatcttggcgcgttcgctatatggtggctgacagattttcagagctccagaaagccatgggtcctaaaatcaccctaaatgacctcatccccgcctttcagaacctacttaaagactgtgaagctgaagtccgggcagctgctgcccacaaagtaaaagaacttggtgagaacttgcccattgaagatagagagaccataattatgaatcaaattctgccttatataaaggaattagtatccgataccaatcaacatgtcaaatcggctctagcttctgtaattatgggattgtctactattttgggcaaagaaaataccattgaacatcttctacctcttttcttagctcagttaaaggatgagtgtcctgacgttcgtttgaatatcatctccaatttggattgtgtaaatgaagtgattggaatccgtcagctctctcagtctctccttcctgccatagtggagctggcagaagatgccaaatggagggtccgcctggccatcattgagtatatgccgctgctggcaggccagctgggtgtggaattctttgatgaaaagctgaattctttatgtatggcttggctcgtggaccatgtatacgccatccgagaagctgccaccaacaacctcatgaaactagttcagaagtttggtacagagtgggcccaaaatactattgttcccaaagtgttagtaatggcaaatgatcctaattacttgcatagaatgaccactttattctgcattaatgcactgtctgaggcctgtggtcaggaaataactactaagcaaatgctgcccatcgtattaaaaatggcaggagaccaagtagcaaatgttcgcttcaatgtggccaaatctctacaaaagattggaccaattctagataccaatgctttacagggagaagtgaagccagtactacagaagttaggtcaagatgaagacatggatgtcaaatactttgcacaggaagctataagtgttcttgcattggcataatgaggagcaggagggaaaaggcctttactagattcttgtcacaaatttctagtcaatgtgttcttaactgggtggagaaagaatggaaaaccttcaagatctcatccaagcaaatggcaacaacttagaagaaatcatttagtgacttaattctttctaaagatgaaatgggattgttttttactcgtcttccttgttaaatcattatttaagccgttcttattgaccaattcctgacacttgattgtctcctaatgctttatccatcaccacctgggctcctgcatcctcactgtggaatcaggcaccagccacataatgttccagacaaagcctggaagggtgtggacccagacgtggagtggagtgattctcttgacgtttacatatatctctgtgtctctccatcattccaaagctaaatgtacatgtttagaataacttattttataaactcttcgggagacatgttgagatttgaccgtaatgaaagccacattttcctgaattatgatggtctgcattagtctcatgtgaaagg

SEQ ID NO: 131336 - DNA, 5587 bp, Artificial Sequence
  derived and/or modified sequence
ctgggcgcggggcggggcctgggcgcggggcgggaggcggtgaccagcagcaggaggagaaagaacatggcgggcgcatcagagctcgggaccggcccaggagcagcgggtggagatggagatgattcgctatacccgatcgcggttttaatcgacgagctccgcaatgaagacgtgcagctccgactcaacagtattaagaagttatcaacaattgccctagcacttggagtagaaaggacccgaagtgaattgttgccatttcttacagatacaatttatgatgaagatgaggtactattagctcttgctgagcagctgggaaatttcactggcctagtgggaggtcctgactttgcccactgtctgctgcctcctttggaaaatctggcaactgtggaagagactgttgttcgtgacaaggctgtggagtccctgagacagatctcccaggagcatactcctgttgctctggaagcttattttgtacctctggtgaaacgcttagcaagtggggattggttcacctctcgcacatctgcatgtggtttgttcagcgtttgctatcccagggcatcaaatgctgttaaagcagaaatcagacagcaattccgttccttgtgctcagatgacacaccaatggtacgacgtgctgctgcttccaaattgggtgaatttgcaaaagttttggaattagacagtgtgaaaagtgaaattgttccactgttcactagtctagcttcagatgaacaggattcagtgcgcctccttgctgtggaagcttgtgtcagtattgcccagttattgtctcaggatgaccttgagactttggtgatgcctacacttcgacaagcagcagaagataaatcttggcgcgttcgctatatggtggctgacagattttcagagctccagaaagccatgggtcctaaaatcaccctaaatgacctcatccccgcctttcagaacctacttaaagactgtgaagctgaagtccgggcagctgctgcccacaaagtaaaagaacttggtgagaacttgcccattgaagatagagagaccataattatgaatcaaattctgccttatataaaggaattagtatccgataccaatcaacatgtcaaatcggctctagcttctgtaattatgggattgtctactattttgggcaaagaaaataccattgaacatcttctacctcttttcttagctcagttaaaggatgagtgtcctgacgttcgtttgaatatcatctccaatttggattgtgtaaatgaagtgattggaatccgtcagctctctcagtctctccttcctgccatagtggagctggcagaagatgccaaatggagggtccgcctggccatcattgagtatatgccgctgctggcaggccagctgggtgtggaattctttgatgaaaagctgaattctttatgtatggcttggctcgtggaccatgtatacgccatccgagaagctgccaccaacaacctcatgaaactagttcagaagtttggtacagagtgggcccaaaatactattgttcccaaagtgttagtaatggcaaatgatcctaattacttgcatagaatgaccactttattctgcattaatgcactgtctgaggcctgtggtcaggaaataactactaagcaaatgctgcccatcgtattaaaaatggcaggagaccaagtagcaaatgttcgcttcaatgtggccaaatctctacaaaagattggaccaattctagataccaatgctttacagggagaagtgaagccagtactacagaagttaggtcaagatgaagacatggatgtcaaatactttgcacaggaagctataagtgttcttgcattggcataatgaggagcaggagggaaaaggcctttactagattcttgtcacaaatttctagtcaatgtgttcttaactgggtggagaaagaatggaaaaccttcaagatctcatccaagcaaatggcaacaacttagaagaaatcatttagtgacttaattctttctaaagatgaaatgggattgttttttactcgtcttccttgttaaatcattatttaagccgttcttattgaccaattcctgacacttgattgtctcctaatgctttatccatcaccacctgggctcctgcatcctcactgtggaatcaggcaccagccacataatgttccagacaaagcctggaagggtgtggacccagacgtggagtggagtgattctcttgacgtttacatatatctctgtgtctctccatcattccaaagctaaatgtacatgtttagaataacttattttataaactcttcgggagacatgttgagatttgaccgtaatgaaagccacattttcctgaattatgatggtctgcattagtctcatgtgaaaggggaatgtggaagctcagggttaatgtagtggttgttttggtttttatttgctcaattttgtctgtactcatgtcattcagaaacctgaagtgtggctgcatcttgctgctaatgtgtgatgttgacgcctaactgaatttgaacagctcaccactgtgcctacatttaaaaatacttctctctcttttctaaaaagctttaactgtagtgcctcctaataagcagtatgtttgtttcattgtgagattgcagttctgtatttcgaatgagtctaagaaccacagggataatactgtgcagatttcctgttctttacctggctctgcttccagcagtattgacacctagtccttgctgcattgtacagtagcttttcaaactgcagttttattgctaagtttttagtatgggtgatactggagtcttatcatttgaagtgtttgcttttctacttttacagtaaaacctcattaattctgaaatttaagataatgagttaagctgaagagtttactgaagcaaattaatagtgaggaagcctatttgaactacttaaacagtattaaagccctttttaaaaagcacctatttgggatcatttgaggtcaagaattcgagatcagcctgaccaacatggtgaaaccccatctctactaaaaatacaaaaaagttagctgggcgtggtggcacacacctgtagtcccagctactcaggaggctgaggcaggagaattgcttgaacctgggaggtagaggttgcactgagccgagatcgcgccactgcactctagcctgggccatagagcgagagtccatctcaaaaaaaaacaactatttttcacataatcaaactcaccttgtctcatgacttttggttaagggggttttcccatagtttatttttctctcagtgcatcttgctatgaggtttgcttgttacccttttggtttttgaattgttgattttgttcacaacctcttttaaatctaacaagtcctgttctgtttagtgaaggcccaaagactcctctaagactttgtatatttgttacataaaaccaagttttactaaatactttaaaatttgtcctacattcgaaaaatagaaattgtaaatcagaggttatctgtctgcattttaaactgccaaattaccttatagtaagtttctattttatgactttgggccaagaattaagtattttcctaagcacaaatctttttctatattctcattttaatatcttatgctattattctgtaaacattttaattttagtttcatgagtctttattttttgttacctgcaagttatgttcttcttcattgaatttcatatttgagagacatttgtcttcatgaagcagatttgcactggaaccattgctttactctggttggaaatgccattgttttggggacagacttttaaaatgcccttgtgtctcccagtgaggagccctaagcattgacttctctaccctaaaactgtttgagagagggagagtgggccctggctttctcaagcatgggtcgggggttcagcggggcctctgtcttttgtggtgacccctcaggggtttcattgtttccttctgacttaagcaatagagagagaatttgttttggtactcttcagaggaattgtgctttggctcataacttggccatgttctccatgaattagttctcctatttttttttttaactaccttaaacttaagggaaaagttctcctatcttgatttcactggaatataggctttaggagctctgtaaggctggtatttttgtctgttttatcttctactgtatcgccagtgcctggaacagtgtctggtgcacataataggtgctcaataaaaatgtgttcaatggatgaatttctaaaatatcctccaatgtgtgcatggaacaaataatcaaaagaaccagactgtgtcttattctcccactgacagaaagattttcctgctttcaggaaacaagctttatgtggcccttttctggtcccctggcttagactacagttctgtgtggatttgtctgattgcttcagacatgtaatgttgtttttcatccttggcagcttacatcagttgtttgtttgattagaaaaatgaagcagacacacacacacacacacacacacacacacacacacacacacaaacatataacctatgccaataaaaatgtctcagcaacagtggaattcaccttggtgtttctctctgtaatttgtgtggggtttacccctcacaggtttaagagaccaggtcttgtttctctctctgtgctaccaagaagatgtgaacctgaggatgcatcttgtttcataagaaggaaggcaggtgaatatgtggtttctaacgaggtcttgttgaaataacgggctgccctcagctcacagaaataccacagctcagccactgtgatgcagagccccaggggtctttgccagacaacttgtcctgactcaacagagacggcagcctgacctttgagctggcttgtccaggcattcaggttgcttgcgtagacttccagggaagcaagcctgtccttcctgacccggcggttaacctggtgcacttttgttcctttgttaactgttgtgttgtcactaaactgaaaggctggggcttgcccttagacgtcacattggctctgtccctgtggcgatggcagggcagggtggccaaacaggtcaggtgcttgttctgtcctcttgccttttacttaaattcctctgacttttaaaaatggtgacactcttatcgtaaagcttcttatttttctccactgcttggatatgaaactgtagagggagaggccctgttgcccagtgttctcctggtttagcagctgaggtgactgcagtctgatgtgatgtaactgtttccctttgattctccagtattcctgtttccatccagttccttactctcctctttcctcttccctcgcatgtctccctccagtcctctgtacctagaatagtctcactgtcccccgtttgcctccacgagcctgctgtttccaggaaattacataacgttcagttgggatggaaatcttccggaggacgaatagagtttaattactcattgcgtcggaaagccaagccatttctgtctccagagttgttctcttaaactgatatgagttct

SEQ ID NO: 131337 - protein, 447 aa, Artificial Sequence
  derived and/or modified sequence
MAGAGGGNDIQWCFSQVKGAVDDDVAEADIISTVEFNHSGELLATGDKGGRVVIFQQEQENKIQSHSRGEYNVYSTFQSHEPEFDYLKSLEIEEKINKIRWLPQKNAAQFLLSTNDKTIKLWKISERDKRPEGYNLKEEDGRYRDPTTVTTLRVPVFRPMDLMVEASPRRIFANAHTYHINSISINSDYETYLSADDLRINLWHLEITDRSFNIVDIKPANMEELTEVITAAEFHPNSCNTFVYSSSKGTIRLCDMRASALCDRHSKLFEEPEDPSNRSFFSEIISSISDVKFSHSGRYMMTRDYLSVKIWDLNMENRPVETYQVHEYLRSKLCSLYENDCIFDKFECCWNGSDSVVMTGSYNNFFRMFDRNTKRDITLEASRENNKPRTVLKPRKVCASGKRKKDEISVDSLDFNKKILHTAWHPKENIIAVATTNNLYIFQDKVN

SEQ ID NO: 131338 - DNA, 1344 bp, Artificial Sequence
  derived and/or modified sequence
atggccggcgccggcggcggcaacgacatccagtggtgcttcagccaggtgaagggcgccgtggacgacgacgtggccgaggccgacatcatcagcaccgtggagttcaaccacagcggcgagctgctggccaccggcgacaagggcggcagagtggtgatcttccagcaggagcaggagaacaagatccagagccacagcagaggcgagtacaacgtgtacagcaccttccagagccacgagcccgagttcgactacctgaagagcctggagatcgaggagaagatcaacaagatcagatggctgccccagaagaacgccgcccagttcctgctgagcaccaacgacaagaccatcaagctgtggaagatcagcgagagagacaagagacccgagggctacaacctgaaggaggaggacggcagatacagagaccccaccaccgtgaccaccctgagagtgcccgtgttcagacccatggacctgatggtggaggccagccccagaagaatcttcgccaacgcccacacctaccacatcaacagcatcagcatcaacagcgactacgagacctacctgagcgccgacgacctgagaatcaacctgtggcacctggagatcaccgacagaagcttcaacatcgtggacatcaagcccgccaacatggaggagctgaccgaggtgatcaccgccgccgagttccaccccaacagctgcaacaccttcgtgtacagcagcagcaagggcaccatcagactgtgcgacatgagagccagcgccctgtgcgacagacacagcaagctgttcgaggagcccgaggaccccagcaacagaagcttcttcagcgagatcatcagcagcatcagcgacgtgaagttcagccacagcggcagatacatgatgaccagagactacctgagcgtgaagatctgggacctgaacatggagaacagacccgtggagacctaccaggtgcacgagtacctgagaagcaagctgtgcagcctgtacgagaacgactgcatcttcgacaagttcgagtgctgctggaacggcagcgacagcgtggtgatgaccggcagctacaacaacttcttcagaatgttcgacagaaacaccaagagagacatcaccctggaggccagcagagagaacaacaagcccagaaccgtgctgaagcccagaaaggtgtgcgccagcggcaagagaaagaaggacgagatcagcgtggacagcctggacttcaacaagaagatcctgcacaccgcctggcaccccaaggagaacatcatcgccgtggccaccaccaacaacctgtacatcttccaggacaaggtgaactag

SEQ ID NO: 131339 - DNA, 1344 bp, Artificial Sequence
  derived and/or modified sequence
atggccggcgccggaggggggaatgacattcagtggtgtttctctcaggtcaagggagccgttgatgatgacgtagctgaagcggatatcatctcaaccgtcgagttcaaccactccggcgaacttcttgccaccggtgataagggcggacgcgtggtcatattccagcaggagcaggagaataaaatccagagccacagccggggagagtataatgtatacagtacgttccagtcacatgagccagaattcgactatcttaagtcactcgagattgaagaaaaaatcaacaaaattcggtggttgccgcagaagaatgccgcccaattcctgctgtccacgaatgataaaactattaagctctggaaaatcagtgagagggataaacgccctgagggctataatttgaaggaggaggatggccggtatcgtgatccaactacagtgacgacactgcgagtgcctgtttttcggccaatggacttgatggtggaagctagccctaggaggatattcgctaatgcccatacctaccacattaactccatctccattaactcagactacgaaacatatttgtcggctgacgacctacgtattaacctctggcatcttgagattaccgatcggagctttaatattgttgacataaaacctgccaacatggaagagctgaccgaagtcattacggcagcagagtttcaccccaattcctgcaatacctttgtgtactcatcgtccaaggggaccattcgtttgtgcgatatgcgtgcaagcgcgctctgtgaccggcacagcaagctttttgaggagccagaagaccccagcaaccgtagttttttctcagaaatcatctcgtccatttctgatgtgaagttctcccactcaggtcgttacatgatgacccgtgactacttaagcgtgaaaatctgggacctgaatatggagaacaggcctgtggaaacgtaccaggtgcatgagtatctacggtccaaactctgctctttgtatgagaacgattgcatttttgataagttcgagtgctgttggaatgggagcgactccgttgttatgacgggctcgtataataactttttcaggatgttcgaccgaaatactaaaagggacattaccctggaagcctcccgagagaacaacaagccacgcactgtcctgaaacctcgcaaggtctgtgcctctggcaagcgaaagaaggacgaaatttctgtcgactctctggattttaataaaaaaatccttcacactgcctggcacccaaaggagaacataatcgccgtcgcaacaacgaacaatctctatatcttccaggataaagtcaattag

SEQ ID NO: 131340 - DNA, 1344 bp, Artificial Sequence
  derived and/or modified sequence
atggccggggccggcggcggcaatgacatccagtggtgcttcagccaggtgaagggagctgtggatgatgatgtggccgaggccgacatcatcagcacagtggagttcaaccacagcggggagctgctggccactggagacaagggcggccgggtggtgatcttccagcaggagcaggagaacaagatccagagccacagcagaggagagtacaacgtgtacagcaccttccagagccatgagcctgagtttgactacctgaagagcctggagattgaggagaagatcaacaagatccgctggctgccccagaagaatgctgcccagttcctgctgagcaccaatgacaagaccatcaagctgtggaagatcagcgagcgggacaagaggcctgagggctacaacctgaaggaggaggatggccgctacagagaccccaccaccgtgaccaccctgcgggtgcctgtgttccggcccatggacctgatggtggaggccagcccccggcgcatctttgccaatgcccacacctaccacatcaacagcatcagcatcaacagcgactatgagacctacctgtctgcagatgacctgcgcatcaacctgtggcacctggagatcacagaccgctccttcaacatcgtggacatcaagccagccaacatggaggagctgacagaggtgatcacagctgctgagttccaccccaacagctgcaacacctttgtgtacagcagcagcaagggcaccatccggctgtgtgacatgagggccagcgccctgtgtgacagacacagcaagctgtttgaggagcctgaggaccccagcaacagaagcttcttcagcgagatcatcagcagcatcagtgatgtgaagttcagccacagcggccgctacatgatgacccgggactacctgtctgtgaagatctgggacctgaacatggagaacagacctgtggagacctaccaggtgcatgagtacctgcggagcaagctgtgcagcctgtatgaaaatgactgcatctttgacaagtttgagtgctgctggaatggaagtgacagcgtggtgatgacaggcagctacaacaacttcttcaggatgtttgacaggaacaccaagagggacatcaccctggaggccagccgggagaacaacaagcccaggacagtgctgaagcccaggaaggtgtgtgccagcggcaagaggaagaaggatgagatctctgtggacagcctggacttcaacaagaagatcctgcacacagcctggcaccccaaggagaacatcatcgctgtggccaccaccaacaacctgtacatcttccaggacaaggtgaactag

SEQ ID NO: 131341 - DNA, 3940 bp, Artificial Sequence
  derived and/or modified sequence
aggtgacgtcactggccaggccagccggcgccattttgaaagtggagtcgcctgcccctgccgctgccgccgccgccgtcgctgtcgtagtcgccgccgccgctgccggagaaagagcacgagcggggaagccccagagtgaaatctagcatcctgccggctggtctgcccgcccctccttccttttccccccggcccccgtcccctccccccgcaggtgccatccgccgccatccgccctctctacccccccatccccaggtgaggggggtgagttcaggaagcggagaccccgaggaacccagcagggtcaccatttgcagcgcaacatggcaggagctggaggagggaatgatattcagtggtgtttttctcaggtgaaaggagcagtagatgatgatgtagcagaagcagatataatttctacagtagaatttaatcattctggagaattactagcaacaggagataaaggtggtagagttgtcatctttcaacaggagcaggagaacaaaatccagtctcatagcagaggagaatataatgtttacagcaccttccagagccatgaaccagagtttgactacttgaaaagtttagaaatagaagaaaagatcaacaaaattaggtggttaccccagaaaaatgctgctcagtttttattgtctaccaatgataaaacaataaaattatggaaaatcagtgaaagggacaaaagaccagaagggtataacttgaaagaggaggatggaaggtatagagatcctactacagttactacactacgagtgccagtctttaggcctatggatctaatggttgaggccagtccacgaagaatatttgccaatgctcatacatatcacatcaactcaatttctattaatagtgattatgaaacatatttatctgcagatgatttgcggattaatctttggcatctggaaattacagacaggagttttaacattgtggatatcaagcctgccaatatggaagagctaacagaggtgattacagcagcagaatttcatccaaacagctgtaacacatttgtatacagcagcagtaaaggaactattcggctatgtgacatgagggcatctgccctctgtgatagacattctaaattgtttgaagaacctgaagatcccagtaacaggtcatttttttccgaaatcatctcctctatttcggatgtaaaattcagccatagtggtcgatatatgatgactagagactatttgtcagtcaaaatttgggacttaaatatggaaaacaggcctgtggaaacataccaggtgcatgaatacctcagaagtaaactctgttcactgtatgaaaatgactgcatatttgacaaatttgaatgttgttggaatggatctgacagtgttgtcatgactggatcttacaataatttcttcagaatgtttgacagaaacacaaagcgagacataaccctagaagcatcgcgggaaaacaataagcctcgcacagttctgaagcctcgcaaagtctgtgcaagtggcaagcgaaagaaagatgaaataagtgttgacagcctagacttcaataagaaaatccttcacacagcctggcaccccaaggaaaatatcattgccgtagctactacaaacaatctgtatatatttcaagacaaagtgaattagggttggcattcctagcagaagaacccacttcctgcttagttgagatagttgaatctagcattcgttcctataaaagagagaggtccattgtggcgcccctttccagtgtttgacagtgtgccattcgacaacacattgttatagctacatggagaaagctctgtggattcatcactgtggtgttctccatgtctgctagccatttaggtaagggtagggcacttttaatttaaatgacttcttgcaccatcttgcctaatggactagattggactgtatcaacattgatttactccactttttatgccttccattgtgatgacgtcaaacacagtgaaagccttcagtcatgctatgggatttaattgtgtatcctcattactgtatcatttgtggggtacaccccttccccctttttttaaattaaatacagctcattcttactgtggcttgtagcattcctcctcttctggcctcctggactgctccccttcatctcttacccttgccccctccacccggtcttggtggtggtatattaaaaaaagaaagaatgaaagcacacaaaatgagtcagtttggggtcagtggtataaagggggtatatgttgcaaacaaatgttttagtaacagttggctgtaatcactcctcgccgtgtctggcactgaaaataaggaaaaaaaacctactactgaataaaagtgacaaagaatggagaatctggttttctttttctttttaacctacctcttgtagccaatattttgtgtcatacctttgggcacagtgaaacaaaatgggttttcattgtttattggtatttttgttaattatttttaacaagtgttcttttacatgcaggaggagaggtattggttctctatgaacatattttgaatataggttttattaaggatttcacaatctataaatgctactagtttttttttttttttttaccatcatgagggtattggatacattgtgtctctatttaactcattatgtgttaatgaaattgttgtaaatgggaaccaaatttgtagaacttaatttctactttttagagtgcttaatttcatttttgccttactaaatagtcaaagacttataaaacatttttaacaagttagaacttttttgttattcagtcatataaaatagcagaaaactaacatcaagtgacactgcactaaatactttttttgtattttactgctatcaaatcagaatgaaatatactttaccatagatatttttcttctatttttggttttccaaagctatatgaaagacaaatttttaaaggtacagcgttcaaaaagtgcttaatgaactccaacagctgcctcaaataaaaatctgtatatgaatacattttccctaagcggtgatacattatccaaagatgaagagtgctcctatttttaataggtagaatgtacctttgtcagtcttgcagaaactttaatggagaagaaatggactttatttttgaaaggtgaaatgaacaggcatttatattattagagaatggtagtcttattttggtggaacataatgtaacaaccttgaatttcagaggactctgagtgcttctatgtccactacctattgttctattcttcaataatgaaaaagaattcaacgagccgaccgtgattccctctactacaaatattatgtcttgtaagttagcatttttagcacacaggagaaattttatgtaataaaattactgtatcttttggatttaacaaatttgtatttgaaacacattctatgtctgataattcttaatggcacttttactaatttatttggggatcttgggtacattcttaatttgtgtttattcttcacgcttgacttgcaagtgggatattcccctgccacaagtgtcaaacagtgatattcttcctgtgttgtgactggacagttttccagatcttttttgggagattttcctacagcttggttgtatgtcttgagataacaccaccaaacagctctcagaaattcttttttgattgatcagtagctatgatgattctcctccatgacactaaggattagtttatatatttaagagaaataattgctaaaattaaaatgcctctatcaaggaatgctattataaattattgttaacattctcaagtattaattttttaatttcattggtgtagcaaactctaagcccagccactcattttacatggccatggttaatctttttattaataaaaattatacttagaataaa

SEQ ID NO: 131342 - DNA, 1344 bp, Artificial Sequence
  derived and/or modified sequence
atggccggcgccggcggcggcaacgacatccagtggtgcttcagccaggtgaaaggggccgtggatgacgacgtcgccgaagccgatatcatctctacagtggagtttaaccatagcggtgagctactcgccacaggagataagggtgggcgagtggttattttccagcaggagcaggaaaacaagattcagtcacactcccgcggagaatataatgtctactctacattccagagtcacgaaccagagttcgattacttgaaatctttggagatagaagaaaagatcaacaagattcgatggcttccacaaaagaatgctgcccaatttctgctaagcacaaatgacaagaccattaagctgtggaaaatcagcgagcgcgataagagaccggagggatataatctgaaggaggaagacgggcgctatcgcgatcccaccacggtaacgaccctccgcgtgcccgtgttccgtcccatggaccttatggtggaagcctcacccagacgaatttttgccaacgcccatacctaccacatcaatagtatatcaatcaactctgactacgaaacctacctctcggcagacgacttgagaataaacctgtggcacttggaaatcaccgatcgctctttcaacatcgtcgacatcaaacccgcaaatatggaagagctgacagaagtgattaccgctgcggagttccatcccaactcttgtaacactttcgtatattcttctagcaagggtacgataagactgtgcgatatgcgagcttctgccctctgcgataggcattctaagctgtttgaggaacccgaggacccctccaatcggtcttttttctcagagattatttcttcaatcagcgacgtcaagttcagccactcaggtcgttatatgatgaccagagactacctctcagttaaaatctgggatctcaacatggaaaatcgacccgtggaaacctatcaggtacatgaatacttacgctctaagctctgctctctgtacgagaatgattgcatattcgataagttcgagtgctgttggaatggttcagactccgtggtgatgaccggatcttacaacaatttttttcgaatgtttgatcgaaacaccaaacgagacattacactcgaagcttctcgagaaaataataaaccccgcaccgtcctgaagccccgaaaagtctgcgctagcggtaaacgcaaaaaggacgagatcagcgtggatagtctggatttcaacaaaaaaattctgcataccgcatggcaccccaaggagaacatcatcgctgttgcgaccacaaacaatttgtatatctttcaagataaagtcaattag

SEQ ID NO: 131343 - DNA, 1344 bp, Artificial Sequence
  derived and/or modified sequence
atggcgggtgccggagggggaaatgacatacagtggtgcttctcccaggtgaagggggctgttgacgacgatgttgccgaagcagacataatttcgactgtagagttcaatcacagcggcgaactcctggctacgggcgacaaaggcggacgtgttgtgatcttccaacaagagcaggagaataaaatccagtcacattcgcggggagaatataacgtgtactctacttttcagtcgcacgaaccagaattcgactacctaaagagccttgagattgaggaaaagattaataagattcgttggctgcctcagaaaaatgcggcacagtttcttttaagtacaaacgataaaacgatcaaactgtggaagatatctgaaagggacaagagacccgaggggtacaacctaaaggaagaagacggacggtatagggatccaaccaccgtgaccaccctccgcgttcctgtgtttcgcccaatggatctcatggtggaggcatctcccaggcggatcttcgcgaatgcccacacataccacataaactcaatctcgatcaactctgattacgagacatatctgagtgctgatgacctgcggataaacttatggcatttagaaatcaccgataggtctttcaacatagttgacatcaaacccgctaacatggaagagctgaccgaagtgataactgccgcagagtttcaccccaattcatgcaatacgttcgtttacagcagctccaaggggaccatccgtctttgtgacatgcgcgctagcgcgctatgcgatcgccatagtaaactgttcgaggaaccagaggatcctagcaataggtcttttttttctgaaatcatcagcagtatctctgacgtcaaattttcacacagcggacgctatatgatgaccagagattatttaagcgtaaaaatatgggatctgaatatggagaatagaccagttgagacgtatcaagttcacgagtacctgaggtctaagctgtgctccctctacgagaacgactgtatcttcgacaagtttgagtgctgttggaacggctctgactccgtcgtaatgactggctcctacaacaattttttcagaatgtttgaccgcaataccaagcgagatattacattggaagccagtagagagaataacaagccacggaccgtgctgaaaccgagaaaagtgtgtgcctctggcaagaggaaaaaggatgagatctccgttgactccctcgattttaacaagaagattttgcataccgcctggcaccctaaggagaatattatcgctgtcgccactaccaataatctgtacatcttccaggataaggtgaattag

SEQ ID NO: 131344 - protein, 414 aa, Artificial Sequence
  derived and/or modified sequence
MDIEEQKADIYEMGKIAKVCGCPLYWKAPMFRAAGGEKTGFVTAQSFIAMWRKLLNNHHDDASKFICLLAKPNCSSLEQEDFIPLLQDVVDTHPGLTFLKDAPEFHSRYITTVIQRIFYTVNRSWSGKITSTEIRKSNFLQTLALLEEEEDINQITDYFSYEHFYVIYCKFWELDTDHDLYISQADLSRYNDQASSSRIIERIFSGAVTRGKTIQKEGRMSYADFVWFLISEEDKRNPTSIEYWFRCMDVDGDGVLSMYELEYFYEEQCERMEAMGIEPLPFHDLLCQMLDLVKPAVDGKITLRDLKRCRMAHIFYDTFFNLEKYLDHEQRDPFAVQKDVENDGPEPSDWDRFAAEEYETLVAEESAQAQFQEGFEDYETDEPASPSEFGNKSNKILSASLPEKCGKLQSVDEE

SEQ ID NO: 131345 - protein, 1150 aa, Artificial Sequence
  derived and/or modified sequence
MAATYRLVVSTVNHYSSVVIDRRFEQAIHYCTGTCHTFTHGIDCIVVHHSVCADLLHIPVSQFKDADLNSMFLPHENGLSSAEGDYPQQAFTGIPRVKRGSTFQNTYNLKDIAGEAISFASGKIKEFSFEKLKNSNHAAYRKGRKVKSDSFNRRSVDLDLLCGHYNNDGNAPSFGLLRSSSVEEKPLSHRNSLDTNLTSMFLQNFSEEDLVTQILEKHKIDNFSSGTDIKMCLDILLKCSEDLKKCTDIIKQCIKKKSGSSISEGSGNDTISSSETVYMNVMTRLASYLKKLPFEFMQSGNNEALDLTELISNMPSLQLTPFSPVFGTEQPPKYEDVVQLSASDSGRFQTIELQNDKPNSRKMDTVQSIPNNSTNSLYNLEVNDPRTLKAVQVQSQSLTMNPLENVSSDDLMETLYIEEESDGKKALDKGQKTENGPSHELLKVNEHRAEFPEHATHLKKCPTPMQNEIGKIFEKSFVNLPKEDCKSKVSKFEEGDQRDFTNSSSQEEIDKLLMDLESFSQKMETSLREPLAKGKNSNFLNSHSQLTGQTLVDLEPKSKVSSPIEKVSPSCLTRIIETNGHKIEEEDRALLLRILESIEDFAQELVECKSSRGSLSQEKEMMQILQETLTTSSQANLSVCRSPVGDKAKDTTSAVLIQQTPEVIKIQNKPEKKPGTPLPPPATSPSSPRPLSPVPHVNNVVNAPLSINIPRFYFPEGLPDTCSNHEQTLSRIETAFMDIEEQKADIYEMGKIAKVCGCPLYWKAPMFRAAGGEKTGFVTAQSFIAMWRKLLNNHHDDASKFICLLAKPNCSSLEQEDFIPLLQDVVDTHPGLTFLKDAPEFHSRYITTVIQRIFYTVNRSWSGKITSTEIRKSNFLQTLALLEEEEDINQITDYFSYEHFYVIYCKFWELDTDHDLYISQADLSRYNDQASSSRIIERIFSGAVTRGKTIQKEGRMSYADFVWFLISEEDKRNPTSIEYWFRCMDVDGDGVLSMYELEYFYEEQCERMEAMGIEPLPFHDLLCQMLDLVKPAVDGKITLRDLKRCRMAHIFYDTFFNLEKYLDHEQRDPFAVQKDVENDGPEPSDWDRFAAEEYETLVAEESAQAQFQEGFEDYETDEPASPSEFGNKSNKILSASLPEKCGKLQSVDEE

SEQ ID NO: 131346 - DNA, 3453 bp, Artificial Sequence
  derived and/or modified sequence
atggccgccacctacagactggtggtgagcaccgtgaaccactacagcagcgtggtgatcgacagaagattcgagcaggccatccactactgcaccggcacctgccacaccttcacccacggcatcgactgcatcgtggtgcaccacagcgtgtgcgccgacctgctgcacatccccgtgagccagttcaaggacgccgacctgaacagcatgttcctgccccacgagaacggcctgagcagcgccgagggcgactacccccagcaggccttcaccggcatccccagagtgaagagaggcagcaccttccagaacacctacaacctgaaggacatcgccggcgaggccatcagcttcgccagcggcaagatcaaggagttcagcttcgagaagctgaagaacagcaaccacgccgcctacagaaagggcagaaaggtgaagagcgacagcttcaacagaagaagcgtggacctggacctgctgtgcggccactacaacaacgacggcaacgcccccagcttcggcctgctgagaagcagcagcgtggaggagaagcccctgagccacagaaacagcctggacaccaacctgaccagcatgttcctgcagaacttcagcgaggaggacctggtgacccagatcctggagaagcacaagatcgacaacttcagcagcggcaccgacatcaagatgtgcctggacatcctgctgaagtgcagcgaggacctgaagaagtgcaccgacatcatcaagcagtgcatcaagaagaagagcggcagcagcatcagcgagggcagcggcaacgacaccatcagcagcagcgagaccgtgtacatgaacgtgatgaccagactggccagctacctgaagaagctgcccttcgagttcatgcagagcggcaacaacgaggccctggacctgaccgagctgatcagcaacatgcccagcctgcagctgacccccttcagccccgtgttcggcaccgagcagccccccaagtacgaggacgtggtgcagctgagcgccagcgacagcggcagattccagaccatcgagctgcagaacgacaagcccaacagcagaaagatggacaccgtgcagagcatccccaacaacagcaccaacagcctgtacaacctggaggtgaacgaccccagaaccctgaaggccgtgcaggtgcagagccagagcctgaccatgaaccccctggagaacgtgagcagcgacgacctgatggagaccctgtacatcgaggaggagagcgacggcaagaaggccctggacaagggccagaagaccgagaacggccccagccacgagctgctgaaggtgaacgagcacagagccgagttccccgagcacgccacccacctgaagaagtgccccacccccatgcagaacgagatcggcaagatcttcgagaagagcttcgtgaacctgcccaaggaggactgcaagagcaaggtgagcaagttcgaggagggcgaccagagagacttcaccaacagcagcagccaggaggagatcgacaagctgctgatggacctggagagcttcagccagaagatggagaccagcctgagagagcccctggccaagggcaagaacagcaacttcctgaacagccacagccagctgaccggccagaccctggtggacctggagcccaagagcaaggtgagcagccccatcgagaaggtgagccccagctgcctgaccagaatcatcgagaccaacggccacaagatcgaggaggaggacagagccctgctgctgagaatcctggagagcatcgaggacttcgcccaggagctggtggagtgcaagagcagcagaggcagcctgagccaggagaaggagatgatgcagatcctgcaggagaccctgaccaccagcagccaggccaacctgagcgtgtgcagaagccccgtgggcgacaaggccaaggacaccaccagcgccgtgctgatccagcagacccccgaggtgatcaagatccagaacaagcccgagaagaagcccggcacccccctgcccccccccgccaccagccccagcagccccagacccctgagccccgtgccccacgtgaacaacgtggtgaacgcccccctgagcatcaacatccccagattctacttccccgagggcctgcccgacacctgcagcaaccacgagcagaccctgagcagaatcgagaccgccttcatggacatcgaggagcagaaggccgacatctacgagatgggcaagatcgccaaggtgtgcggctgccccctgtactggaaggcccccatgttcagagccgccggcggcgagaagaccggcttcgtgaccgcccagagcttcatcgccatgtggagaaagctgctgaacaaccaccacgacgacgccagcaagttcatctgcctgctggccaagcccaactgcagcagcctggagcaggaggacttcatccccctgctgcaggacgtggtggacacccaccccggcctgaccttcctgaaggacgcccccgagttccacagcagatacatcaccaccgtgatccagagaatcttctacaccgtgaacagaagctggagcggcaagatcaccagcaccgagatcagaaagagcaacttcctgcagaccctggccctgctggaggaggaggaggacatcaaccagatcaccgactacttcagctacgagcacttctacgtgatctactgcaagttctgggagctggacaccgaccacgacctgtacatcagccaggccgacctgagcagatacaacgaccaggccagcagcagcagaatcatcgagagaatcttcagcggcgccgtgaccagaggcaagaccatccagaaggagggcagaatgagctacgccgacttcgtgtggttcctgatcagcgaggaggacaagagaaaccccaccagcatcgagtactggttcagatgcatggacgtggacggcgacggcgtgctgagcatgtacgagctggagtacttctacgaggagcagtgcgagagaatggaggccatgggcatcgagcccctgcccttccacgacctgctgtgccagatgctggacctggtgaagcccgccgtggacggcaagatcaccctgagagacctgaagagatgcagaatggcccacatcttctacgacaccttcttcaacctggagaagtacctggaccacgagcagagagaccccttcgccgtgcagaaggacgtggagaacgacggccccgagcccagcgactgggacagattcgccgccgaggagtacgagaccctggtggccgaggagagcgcccaggcccagttccaggagggcttcgaggactacgagaccgacgagcccgccagccccagcgagttcggcaacaagagcaacaagatcctgagcgccagcctgcccgagaagtgcggcaagctgcagagcgtggacgaggagtag

SEQ ID NO: 131347 - DNA, 3453 bp, Artificial Sequence
  derived and/or modified sequence
atggctgccacgtacagactggtggtctctacagtgaaccattattccagtgtagtgatcgaccgccggttcgagcaggctattcactattgcacaggaacgtgccatacctttactcatggcatcgactgcatagttgtccaccattccgtgtgtgccgacctgctgcatattcccgtgagtcaattcaaagacgccgatttaaactctatgttcctcccccatgagaatggactttccagcgcagagggggactaccctcagcaggcgttcacagggatcccacgcgtgaaacgtggcagtacatttcagaatacgtataacctcaaagatatagcgggggaagctatcagcttcgccagcgggaagataaaagaattctctttcgagaaactgaagaatagtaatcatgcggcctacaggaaagggcgtaaagtaaagtcggattccttcaataggcgatccgtggatctggacctgctatgtgggcactataataatgacgggaatgctcccagcttcggattactgcgcagcagttctgtcgaggaaaaaccgttgtcccaccgcaacagcctcgatacaaatcttacatccatgttcctccagaatttctcggaagaagatctcgtcacccagattctggagaagcataaaatcgacaattttagttccggcaccgacatcaagatgtgccttgatattctgctgaagtgttctgaggacctcaagaagtgcacggacatcatcaagcagtgtatcaagaaaaagtcagggagctcaattagcgagggctctggcaatgacactatttcttcctcggagactgtctacatgaatgtgatgacaaggttggcatcatatctcaagaagttgcccttcgagttcatgcagagtggtaataacgaggccctggacctgacggagcttatcagtaatatgccaagcttacaactgacacccttttcaccagtttttggcacagaacagccacccaaatatgaggatgttgtgcaattgtccgcaagcgactccggcagatttcagaccattgagctgcagaatgacaaaccaaattcccgaaaaatggacactgtgcagtctatacctaataacagtaccaactcgctttataatcttgaagtcaacgaccctagaacactgaaggctgttcaggtccaatctcagtccctgactatgaatcccttagaaaacgtgagcagcgatgacctcatggagacactctacatagaggaagagagtgacggtaaaaaggccctggataagggccaaaagacggagaacggcccatcacacgaactgcttaaggttaacgaacaccgggcagagtttccggaacatgcgacacatctgaagaaatgtccaacacctatgcagaatgaaatcggaaagatctttgaaaagtcttttgtgaacctccccaaagaagactgtaagtctaaggtttcaaagttcgaagaaggggaccagagagatttcacgaattccagcagccaggaagaaatagacaagctcctcatggatctcgagtctttttctcaaaagatggaaacctccctcagggaacctctagccaagggtaaaaactctaacttcctcaatagtcactctcaactcacagggcagactcttgtggacttggagcctaagagtaaagtgagctctcccattgagaaggtttcgccttcatgtcttacacggatcattgagaccaatggccacaagattgaggaagaggacagggctctcttgctgcggatactggagtccatcgaagattttgcccaggaactcgtggaatgcaagagctcccgcggctcactatcacaggagaaagagatgatgcagatccttcaagagacattgacaacgagttcgcaggctaacttatcggtttgccggagccctgtcggggataaggcaaaggatacaacatccgcagtgctgattcagcagacacccgaggtaatcaaaatacagaataagccagagaagaagcctggcactcctttgccaccaccagccacttctccaagcagccccagaccattgtccccagtgcctcacgtgaacaatgtcgtgaacgcccccctgagtatcaacattcctagattttacttcccggaaggtctgcccgacacctgttctaaccacgaacagacgttatcaagaattgaaaccgcattcatggatatcgaggagcagaaggccgacatctacgaaatgggaaagattgcaaaggtttgtggctgcccactgtactggaaggcaccaatgtttcgggcggcgggaggggagaaaacgggttttgttacagctcagagctttatcgccatgtggcgtaaactccttaataaccaccacgatgatgcctcaaagttcatctgcctcttggcgaagcctaactgcagctctcttgaacaagaggattttattccactgctgcaagacgttgtagatacccacccaggactgactttcttgaaggatgccccagaatttcattccagatacattacaaccgtgattcagcgtatattctacacggtaaatcggtcgtggagcggaaaaataacgagcaccgagattcggaaatcaaactttcttcagactctggccctattagaagaggaggaggatatcaatcagatcaccgactacttcagttacgagcacttctacgtcatttattgtaaattctgggagctggacaccgaccatgacctgtatatttctcaagctgacttgagtcggtataatgaccaggctagctcctctcggattatcgagcggatatttagtggggcggtgacccgaggcaagacaatacagaaggaaggcagaatgtcatatgccgactttgtgtggtttctcatctctgaggaagacaagcggaatccaacttcaattgaatactggttccggtgcatggatgtggacggcgatggagtcctgagcatgtatgagctagagtacttctatgaggagcagtgcgaacggatggaagctatgggaatcgagccgctcccattccatgatttattgtgccagatgttagacttagtgaaaccagcagttgacggcaaaatcactctgcgggaccttaaacgctgtcggatggcccacattttttacgataccttttttaatctggagaagtacctagatcacgaacagagagacccattcgcagtgcagaaggatgttgagaacgatgggcccgaaccgtccgattgggataggtttgctgcagaggagtacgaaaccttggtggccgaagaaagcgcccaggcacaatttcaggaaggtttcgaggattatgagaccgacgaacccgcctcaccctctgaatttgggaataaatctaacaagattttgtctgccagtttgccagaaaaatgcggcaaactgcagtccgtagacgaggaatag

SEQ ID NO: 131348 - DNA, 3453 bp, Artificial Sequence
  derived and/or modified sequence
atggccgccacctaccgcctggtggtgtccacagtgaaccactacagctctgtggtgattgacagaagatttgagcaggccatccactactgcaccggcacctgccacaccttcacccacggcatcgactgcatcgtggtgcaccacagcgtgtgtgccgacctgctgcacatccctgtgtcccagttcaaggatgctgacctgaacagcatgttcctgccccatgaaaatggcctgagcagcgctgagggggactacccccagcaggccttcaccggcatcccccgggtgaagaggggcagcaccttccagaacacctacaacctgaaggacattgctggggaggccatcagctttgccagcggcaagatcaaggagttctcctttgagaagctgaagaacagcaaccacgccgcctacaggaagggcaggaaggtgaagagtgacagcttcaacagaagatctgtggacctggacctgctgtgtggccactacaacaatgatggaaatgcccccagctttggcctgctgcggagcagctctgtggaggagaagcccctgagccacaggaacagcctggacaccaacctgacctccatgttcctgcagaacttcagcgaggaggacctggtgacccagatcctggagaagcacaagattgacaacttcagcagcggcacagacatcaagatgtgcctggacatcctgctgaagtgcagcgaggacctgaagaagtgcacagacatcatcaagcagtgcatcaagaagaagagcggcagcagcatcagcgagggcagcggaaatgacaccatcagcagcagcgagaccgtgtacatgaatgtgatgacccggctggccagctacctgaagaagctgccctttgagttcatgcagagcggcaacaatgaggccctggacctgacagagctgatcagcaacatgcccagcctgcagctgacccccttcagccctgtgtttggaacagagcagccccccaagtatgaagatgtggtgcagctgagcgccagtgacagcggccgcttccagaccatcgagctgcagaatgacaagcccaacagcaggaagatggacacagtgcagagcatccccaacaacagcaccaacagcctgtacaacctggaggtgaatgaccccaggaccctgaaggctgtgcaggtgcagagccagagcctgaccatgaaccccctggagaatgtgtccagtgatgacctgatggagaccctgtacatcgaggaggagagtgatggcaagaaggccctggacaagggccagaagacagaaaatggccccagccatgagctgctgaaggtgaatgagcacagagctgagttccctgagcacgccacccacctgaagaagtgccccacccccatgcagaatgaaattggcaagatctttgagaagagctttgtgaacctgcccaaggaggactgcaagagcaaggtgtccaagtttgaggagggggaccagagggacttcaccaacagcagcagccaggaggagattgacaagctgctgatggacctggagagcttcagccagaagatggagaccagcctgcgggagcccctggccaagggcaagaacagcaacttcctgaacagccacagccagctgaccggccagaccctggtggacctggagcccaagagcaaggtgagcagccccatcgagaaggtgagccccagctgcctgacccgcatcatcgagaccaacggccacaagattgaggaggaggaccgggccctgctgctgcgcatcctggagagcattgaagattttgcccaggagctggtggagtgcaagagcagccggggcagcctgagccaggagaaggagatgatgcagatcctgcaggagaccctgaccaccagcagccaggccaacctgtctgtgtgccgcagccctgtgggggacaaggccaaggacaccaccagcgctgtgctgatccagcagaccccagaggtgatcaagatccagaacaagccagagaagaagccaggcacccccctgcccccaccagccaccagccccagcagcccccggcccctgagccctgtgccccacgtgaacaacgtggtgaatgcccccctgagcatcaacatcccccgcttctacttccctgagggcctgcctgacacctgcagcaaccacgagcagaccctgagccgcatcgagacagccttcatggacatcgaggagcagaaggctgacatctatgagatgggcaagatcgccaaggtgtgtggctgccccctgtactggaaggcccccatgttccgggccgccggcggggagaagacaggctttgtgacagcccagagcttcatcgccatgtggaggaagctgctgaacaaccaccatgatgatgccagcaagttcatctgcctgctggccaagcccaactgcagcagcctggagcaggaggacttcatccccctgctgcaggatgtggtggacacccaccctggcctgaccttcctgaaggatgcccctgagttccacagccgctacatcaccaccgtcatccagaggatcttctacacagtgaacagatcctggagcggcaagatcaccagcacagagatcaggaagagcaacttcctgcagaccctggccctgctggaggaggaggaggacatcaaccagatcacagactacttctcctatgagcacttctacgtgatctactgcaagttctgggagctggacacagaccatgacctgtacatcagccaggccgacctgagccgctacaatgaccaggccagcagcagccgcatcatcgagcgcatcttctctggagctgtgacccggggcaagaccatccagaaggagggccgcatgtcctatgctgactttgtgtggttcctgatcagcgaggaggacaagaggaaccccaccagcattgagtactggttccgctgcatggatgtggatggagatggagtgctgtccatgtatgagctggagtacttctatgaggagcagtgtgagaggatggaggccatgggcatcgagcccctgcccttccatgacctgctgtgccagatgctggacctggtgaagccagctgtggatggcaagatcaccctgcgggacctgaagcgctgcaggatggcccacatcttctatgacaccttcttcaacctggagaagtacctggaccacgagcagagggacccctttgctgtgcagaaggatgtggagaatgatggccctgagcccagcgactgggacagatttgctgctgaggagtatgagaccctggtggccgaggagagcgcccaggcccagttccaggagggctttgaggactatgaaacagatgagcccgccagccccagcgagtttggaaacaagagcaacaagatcctgagcgccagcctgcctgagaagtgtgggaagctgcagagcgtggatgaggagtag

SEQ ID NO: 131349 - DNA, 3453 bp, Artificial Sequence
  derived and/or modified sequence
atggccgccacctaccggctggtggtgagcaccgtgaaccactactcatctgtggtcatcgaccgccggttcgaacaggctattcactactgcacaggcacatgccacacctttactcacggcattgattgtattgtcgtgcatcattccgtctgcgccgacctactccacattccggtgtcccaattcaaggatgccgaccttaacagcatgttcctcccccacgagaacggcctctcctcagcagagggagattacccccagcaggccttcactgggattcccagagttaagagagggagcacctttcagaacacctacaacttgaaggacatagcgggtgaggccattagctttgcctccgggaagataaaggagttcagtttcgagaaattgaaaaacagtaaccacgcggcctatcgaaagggcagaaaagtcaagagcgattcattcaatcgccgctcagtagacctcgatcttctctgtggccactacaataacgatgggaatgcgccttccttcggtctgctgcgatcaagtagcgtggaagagaagccattatctcatcggaacagcttggatacaaacttgactagtatgttccttcagaacttttccgaagaagatttggtcacccaaatccttgagaagcacaagattgacaacttttcgtccggtaccgacatcaagatgtgtctcgacattcttctgaagtgttcagaagatctcaagaagtgcaccgacattattaagcagtgcataaagaagaaatcgggctcctctatctcagaaggtagcggaaatgacaccatttcttcaagtgaaactgtttacatgaatgtgatgacgcggctggcttcttatctgaagaaacttccatttgagtttatgcagtcgggcaacaacgaggcacttgacctgacagagctcatttccaacatgcctagcctccagcttaccccgttcagccccgtctttggaaccgaacagccgccaaaatacgaggatgtggttcagctgagcgcctctgatagcgggcggttccaaactattgaactgcagaatgacaaacccaactctaggaagatggacactgttcaatccatcccaaacaattctacaaattctctgtataacctggaggtgaacgatccccgcaccctcaaggccgttcaggtgcaaagccagtctctaactatgaatccactggagaacgtgtcatccgacgatctgatggagaccctgtacatcgaagaggaatctgacggaaaaaaggcactggacaaaggtcaaaaaaccgagaatggcccaagtcacgagcttctgaaagttaatgagcatcgcgcggaattcccagagcacgccacccaccttaaaaaatgccccactcccatgcaaaacgagattgggaagattttcgagaagagcttcgttaatctgccaaaagaggactgtaagtccaaagtctcaaagtttgaggagggggaccagagagactttacaaactctagtagtcaggaagaaatcgataagttactaatggaccttgagtcattttctcagaaaatggaaacctccctgagagagcccctggctaagggcaaaaacagtaacttccttaatagtcactcacagctgactggccagaccctggtggatctcgagccaaagtctaaggtctcctcgccaatcgagaaggtctcccctagttgtctcaccaggattatcgaaacgaatggtcacaagatagaagaggaggacagggcgctgcttctcagaatcttagaaagcattgaggactttgcacaggaattggtagaatgcaagagcagtagaggctcactgagccaagagaaggagatgatgcaaatactccaggagacgttaaccacaagcagccaggcaaatctgtcggtatgccgtagccctgtgggggacaaggctaaggacaccactagcgcggtgctcatacagcaaactcccgaagtcatcaagattcagaataagcctgagaagaagccagggacaccactccctcctcctgccacctcaccgtctagtcctagaccattatctcccgttccacacgtgaataacgtggtgaacgcccccctgtccatcaatattcctcgtttttacttccccgaaggcctgccagacacctgtagcaaccacgagcagacactatctcggattgaaacagcctttatggacatcgaagaacagaaggccgatatctacgaaatggggaagatagccaaggtctgcggatgtcctctctactggaaggccccaatgtttcgggcagccggcggcgagaaaacagggtttgtcacagctcagagttttatcgctatgtggcggaagctccttaacaatcaccatgatgacgcatctaaattcatttgcctgctcgcaaaaccaaattgttccagtttggaacaggaagatttcatcccccttctgcaggatgttgttgatacacacccgggactgacctttcttaaggatgctcccgaatttcacagtcgttatatcactactgtgatccagcggatattctatactgtgaacaggtcttggtccgggaaaatcacatcgaccgaaataagaaaatctaattttctacagaccctcgccctgttagaagaggaagaggatattaatcagataactgactattttagctatgagcatttctacgtgatttattgcaagttctgggaactagataccgaccatgatctgtacatctcccaggctgacctgagcagatacaatgaccaggcttcatcctctcgtattatcgagcgtatattctccggtgcggtcacccggggcaaaaccatccaaaaggagggtcgcatgtcttatgccgattttgtatggttcttgattagcgaggaggataagcgcaatccgacgagtatagaatactggtttcgctgtatggatgtagatggcgacggcgtgcttagcatgtacgagttagagtatttctatgaggagcagtgcgaacgcatggaagcgatgggaatcgaacctttaccctttcatgatctcctgtgtcagatgctggacctagtgaagccagctgttgacgggaaaataaccctgagggacctcaagcgctgtagaatggctcacatcttttatgatacctttttcaacctggagaagtatctcgaccatgaacagagagacccatttgctgtccagaaagatgtggagaacgatggtccagaacccagcgactgggatcggtttgcggccgaggaatacgagacactggtcgccgaggagtctgcccaggctcagtttcaggaaggcttcgaggattacgaaacggacgagcccgcaagcccctcagagttcggcaacaagtccaacaaaattctctccgcatcattaccagaaaaatgcggtaagttgcagtctgtggacgaagagtag

SEQ ID NO: 131350 - DNA, 3453 bp, Artificial Sequence
  derived and/or modified sequence
atggccgcaacatatcggctggtggtgtctacagtgaatcattatagttcagtcgtcattgatcggagattcgagcaggccattcactactgcactgggacctgtcacacatttactcatggaattgactgtattgtggtccaccactctgtgtgcgctgacctacttcatatccccgtgtctcagttcaaagacgccgacctgaacagtatgtttcttccccatgaaaacgggctgtccagcgcggaaggagactatccccagcaggctttcacaggaatcccacgggtgaagcggggatcgactttccagaacacttacaatttgaaggatatcgctggagaggctatttctttcgcctctggcaagattaaggagttctcattcgagaagttaaagaactcaaaccatgccgcttacagaaaggggagaaaagtgaagtccgactcctttaaccgtagaagcgttgacctcgacctgctttgcggccattataataacgacggtaatgcaccatctttcggtctcttgcggtcaagtagtgtggaagagaagcctctttcccatcgaaattccctcgatactaatttaacttccatgtttctgcagaacttttctgaggaggacttggtcactcagatactagaaaagcacaagatcgataacttcagctcgggcacagacattaagatgtgtttggatatccttcttaaatgtagcgaagaccttaagaagtgcaccgatatcatcaagcagtgtattaaaaaaaagtcagggagttcaatctctgaaggatcgggcaacgacaccatttcgagctctgagaccgtgtatatgaatgtgatgacgaggctggcttcttatctgaagaaactgcctttcgagttcatgcagtcaggtaataacgaagctttagatctaaccgagctcatctctaatatgcctagtcttcagctgaccccgtttagccctgtgttcggtaccgagcagcctcccaaatatgaggacgtcgtccagctgtcagcctcggactccggaagattccagacaatcgaattgcagaacgacaaaccaaattccaggaagatggatacagttcagtcaatccctaataacagcactaattcactgtacaatttggaggtgaatgaccccagaacgctgaaggcagttcaagttcaatcccaatcccttactatgaatcctctggagaatgtgtcaagtgatgacctcatggagactctctatatagaggaagagtccgacggcaagaaggcactcgacaagggtcagaagacagagaacggaccaagtcatgagctgttgaaagtaaacgagcacagagctgaattccctgagcatgccacccacctcaagaagtgccccacccctatgcagaacgagattggaaagatctttgagaagtcattcgtcaatctcccaaaagaggactgcaagagcaaggtgagtaagtttgaggagggggaccagagggactttacaaactcttcaagccaagaagagattgataagctgctcatggacctggaaagcttttcacagaagatggagacaagcttgagggagccactcgctaaagggaagaacagcaattttctaaattcccactcccagctcactggacagacgctagtggacctcgaacccaagtctaaggttagctctccaatcgagaaggtgtcgccaagctgtctcacccgcattattgaaaccaatggtcataaaatcgaggaggaggatagagccttgctgcttcgtatactagagagcatcgaggacttcgcccaggaactggtcgaatgcaaatcatcccggggaagcctgagtcaggaaaaggagatgatgcaaatcttacaagagactctgacaacaagtagccaggcgaacctaagcgtgtgcagaagcccagtaggggacaaggcgaaggataccacttcagctgtcctaatccagcaaactcccgaggtgattaaaatccaaaacaagcccgaaaaaaagccaggaactcctctcccaccccctgctaccagccctagttctccccgtccccttagtcccgtgccccatgtgaacaacgtggtaaatgctccactgagtatcaacattcccagattctactttcccgagggcctgcccgatacctgcagtaaccacgaacagactctgtccaggattgagacggcctttatggacatcgaggagcagaaggctgacatctacgagatggggaaaatcgccaaggtgtgcggttgtcccctctattggaaggcacctatgttcagagcagcaggcggagagaagacaggcttcgtcacagctcaatctttcattgccatgtggagaaaattactgaataatcaccacgacgatgcttctaaatttatctgtttactggcaaaacccaactgctcctccctagagcaggaggacttcattcccttactacaggatgtggtagatacccatccagggctgacatttctcaaagatgcacccgaattccatagtaggtacattactacggtgatacagcggattttctacaccgtgaataggtcttggtccggaaagatcacatccacagagatccgaaaatccaattttctgcagacgctggccctgctagaagaagaggaggatattaaccagattacggactacttcagttatgaacatttctacgtaatatattgcaagttctgggaactcgacacagatcatgatttatacatttctcaggctgatcttagtcgatataatgaccaagcgtcatcgagtaggatcattgaacggatcttctccggcgcagtcacccgcggaaaaacgatccaaaaagaggggaggatgtcctacgcagattttgtctggttcctaatctctgaagaagacaagcgcaatccgactagcatcgagtattggttcagatgcatggatgtagacggtgatggcgttctctcgatgtatgagctggaatacttttacgaagagcaatgcgagaggatggaggccatggggatcgagcctctcccatttcacgacctactgtgtcagatgctagatctggtaaaacctgccgtggatggcaaaattactctaagagaccttaagcgatgtcggatggcccacatattctacgacacctttttcaatttagagaagtacctcgaccatgagcagcgtgacccctttgctgttcagaaagatgtcgagaatgacgggccagaaccctctgattgggatagattcgccgctgaggaatatgaaacgctcgttgctgaggagtcagctcaggcccagtttcaagaagggtttgaggactacgagactgatgaacctgctagcccttctgaatttggaaacaagtcgaataagatattgtctgccagtttacccgagaagtgtgggaagctccagtcagtcgatgaggaatag

SEQ ID NO: 131351 - DNA, 1782 bp, Artificial Sequence
  derived and/or modified sequence
tcttcacgcgccgcattcgtagcccgagagtccgcgccgcggggaggcttggaggcaagcgctgcccgcgagctgagccgccggaggaggagccgcgggcaacgagattcaaaataaaccagaaaagaaacctggaacaccactcccacctccagccacctctccaagtagtccccgacctctctccccggttccccatgtgaataatgttgtgaatgcgccattgtccataaacattccacggttctactttcctgaaggactcccagatacctgtagtaatcatgaacaaactctaagcagaattgaaactgctttcatggatattgaagaacagaaagcagacatttatgaaatggggaaaattgcaaaggtctgtggctgtcctctctattggaaagcccccatgttcagggctgcagggggagagaagacaggatttgtgacagcacagtcattcattgccatgtggagaaagttgctgaataaccatcatgatgatgcctctaaattcatctgtcttctagcaaagcccaactgcagctctctagaacaggaggatttcatccctctacttcaggatgtggtggatacccaccctggtctcacgttcctgaaagatgctccagaattccactcccgctacatcaccacggttattcagagaatattctacacagtcaacagatcttggagtggaaaaattacttcgacagagataagaaaaagcaactttttgcaaaccctagcacttttggaagaagaggaagatataaaccaaattacagattacttctcctatgaacatttctatgttatttattgtaaattctgggaactagatactgatcacgacctctacatcagccaggccgatctgtctcgatacaatgaccaggcttcatcaagcaggattattgaaaggatattctctggtgcagtaacaaggggaaaaacaatacagaaagagggaagaatgagctatgcagattttgtttggtttttgatctctgaagaagacaaaaggaatcctaccagcattgagtattggttccgctgcatggatgtggatggagacggtgtactctccatgtatgagctggagtacttctatgaggagcagtgtgaacggatggaagccatgggaattgagcccttgccattccatgatttactgtgccagatgcttgacctagtgaagccagctgttgatggcaaaataactctaagagatctgaagaggtgcagaatggctcacatcttctatgacactttctttaatctggagaaatacttagaccatgaacagagagatccctttgcggtccagaaggatgttgagaacgatgggcctgagccctcagactgggaccggtttgccgctgaggagtatgagacgcttgttgcagaggaatctgcccaagcacaattccaggaaggctttgaagattatgaaacagatgaacctgcctctccctctgaatttggaaacaaaagcaataaaatattaagtgcaagccttccagagaaatgtggaaagcttcaatcagtggatgaagaatagctgccggtgtctacaatgaaacgaagatgtgtattttaaatgtttctttcttgtgaagagatgttctcgtttgcatactgctttttaaagactttgatttctccaagtgtgtatcatctgcactaggaactttgtttttaagcaataggtctggatacacatttaacttaggaggctcctccaatttgcctcaaacctcttacggagcttctcctcag

SEQ ID NO: 131352 - DNA, 6795 bp, Artificial Sequence
  derived and/or modified sequence
aggaggaggaggaggaggagaaggaggtaggggcctgcgggtggctgggcggggcgcgctcgggcctccgctcttcacgcgccgcattcgtagcccgagagtccgcgccgcggggaggcttggaggcaagcgctgcccgcgagctgagccgccggaggaggagccgcgggcaacgaggtttctctgtcattcacagaaaaatgaatcatttaaacctttggaggactcagttatcacaatacttctctactaccaactaagatttatgatagtaaatttatgagagcaaatttccatgttatagaactgttgaagaactaaaagaggatattctttcatcaaaataattctgcagtatcataatattactaaataaaattaaaaagcacaattattaaattattaaatttgccacacatgtgcagcagctactgtatcctgatagtgaccaaacctcaaatataaatggtttcccttcatgggaaaagccattatatttggaagaaaccactgaacattgttattaaatatattttcagctaactgtcatttaggagaattttcatgaaacaagttctagaaagttccaagtcccaccagtaagtggatttgatattatggcagcaacttacagacttgtggttagtactgtgaaccactacagcagcgtggtgatagaccggcgttttgaacaagctatacattattgcactggaacctgccacaccttcacacatggaattgactgcattgtggtacaccatagtgtttgtgcagacctcttgcacatccctgtgtctcagttcaaagatgcagatctgaactctatgtttctaccccatgaaaatgggctttcttcggctgaaggagactatccccaacaggccttcacaggcatacccagggtcaagagaggatctacatttcagaatacctacaacttaaaggatattgcaggagaagcaatcagttttgccagtgggaaaataaaagaattttcctttgaaaaactcaaaaactctaaccatgcagcttacagaaagggaaggaaagttaagtctgactcatttaataggaggtcagttgatttggacttgctttgtggccattataacaacgatgggaacgccccatcctttggtttactgcggagttcctcagttgaggaaaaacctttgtctcatagaaactcactggatacgaacctgacttccatgtttcttcaaaacttttctgaagaagacttggttactcagattttggaaaaacataaaatagataatttttcttctgggacagacataaagatgtgcttggacatcttattgaaatgctccgaggatttaaaaaaatgcacagacatcataaaacaatgcataaagaaaaaatcagggagtagcatcagtgaaggaagtggtaatgatacaatttctagctctgaaactgtctatatgaatgtaatgaccaggttagcatcctatctgaaaaagttaccatttgaattcatgcagtctgggaataatgaggctctagatttaacagaactgatcagtaatatgcctagcttacaactgactcccttctccccagtgtttggcactgaacaaccccctaaatatgaagatgttgtccagctctcagcttctgactctggacgatttcaaactattgaattgcaaaatgacaagcctaattctaggaagatggacactgtacaatccattccaaacaactccacaaattccttatataacttagaggtaaatgatcctagaactctaaaagctgtccaggtccaatcacagtcattaaccatgaatcctttagaaaatgtttcttctgacgacttaatggaaactctttatattgaagaagagtcagatggaaagaaagcattagataaaggacaaaagacagagaatggacctagtcatgagttattaaaggtaaatgaacatagagcagaatttccagaacatgctactcatcttaaaaaatgccccaccccaatgcaaaatgaaattggtaagatatttgagaaatcatttgttaatctacctaaggaagactgtaaatcaaaagtttctaaatttgaagagggagaccagagagattttacaaattccagtagccaggaagagatagataaattgttaatggatttggaatctttttcacagaagatggagacctctctaagagagccacttgcgaagggtaaaaactctaattttttaaatagtcacagtcagttgaccggtcagacccttgtagatcttgagcctaaatctaaagtctcttcacccatagaaaaagtctcaccttcctgtctaacaaggattattgaaaccaatggacacaaaatagaggaagaggatcgagccctcttactgcgaatcctggaaagcattgaagactttgctcaagaactagttgaatgcaaatcaagcagagggagcctatcacaagaaaaggaaatgatgcaaattctacaggaaaccttgacaacttcctcccaggccaatttatcagtctgtagaagtcctgttggtgataaagccaaagatactacttcagcagttttgattcagcagactccagaggtgatcaagattcaaaataaaccagaaaagaaacctggaacaccactcccacctccagccacctctccaagtagtccccgacctctctccccggttccccatgtgaataatgttgtgaatgcgccattgtccataaacattccacggttctactttcctgaaggactcccagatacctgtagtaatcatgaacaaactctaagcagaattgaaactgctttcatggatattgaagaacagaaagcagacatttatgaaatggggaaaattgcaaaggtctgtggctgtcctctctattggaaagcccccatgttcagggctgcagggggagagaagacaggatttgtgacagcacagtcattcattgccatgtggagaaagttgctgaataaccatcatgatgatgcctctaaattcatctgtcttctagcaaagcccaactgcagctctctagaacaggaggatttcatccctctacttcaggatgtggtggatacccaccctggtctcacgttcctgaaagatgctccagaattccactcccgctacatcaccacggttattcagagaatattctacacagtcaacagatcttggagtggaaaaattacttcgacagagataagaaaaagcaactttttgcaaaccctagcacttttggaagaagaggaagatataaaccaaattacagattacttctcctatgaacatttctatgttatttattgtaaattctgggaactagatactgatcacgacctctacatcagccaggccgatctgtctcgatacaatgaccaggcttcatcaagcaggattattgaaaggatattctctggtgcagtaacaaggggaaaaacaatacagaaagagggaagaatgagctatgcagattttgtttggtttttgatctctgaagaagacaaaaggaatcctaccagcattgagtattggttccgctgcatggatgtggatggagacggtgtactctccatgtatgagctggagtacttctatgaggagcagtgtgaacggatggaagccatgggaattgagcccttgccattccatgatttactgtgccagatgcttgacctagtgaagccagctgttgatggcaaaataactctaagagatctgaagaggtgcagaatggctcacatcttctatgacactttctttaatctggagaaatacttagaccatgaacagagagatccctttgcggtccagaaggatgttgagaacgatgggcctgagccctcagactgggaccggtttgccgctgaggagtatgagacgcttgttgcagaggaatctgcccaagcacaattccaggaaggctttgaagattatgaaacagatgaacctgcctctccctctgaatttggaaacaaaagcaataaaatattaagtgcaagccttccagagaaatgtggaaagcttcaatcagtggatgaagaatagctgccggtgtctacaatgaaacgaagatgtgtattttaaatgtttctttcttgtgaagagatgttctcgtttgcatactgctttttaaagactttgatttctccaagtgtgtatcatctgcactaggaactttgtttttaagcaataggtctggatacacatttaacttaggaggctcctccaatttgcctcaaacctcttacggagcttctcctcagaagtggtaccatcgccttccaaagtcagcactctacactcttgaatgtaccaaggatctcttggcgacagtaccaagcacggttctctacacaggtgactgaagttgcctctgtgttggctggcatccctgagtcccctccgggctcctatggagcctagaagaaaccttcacttgcagaaaacttgagtcagaaaattctggaacttgaaaaagtagtaagggcctccagaattgacttagccctagtaataaaagcactgccaaaacatctcagagacttcttttatgtatactggagttcaaagatctttaacttacctggcttaatgtaatttcacagttacctgccaaactactagtcactttacatcctcaggtattgtaaccactgggccttccaactttgctggcaagctctggtaacctccctgactgtggatcttatataaaatctcaagataaaaaaacacttcttaaatgaagtatagaatttgactcatacttggaaaaagcccttttaacttttatcttttattcattgaactattgaatgatgtatttaatatccaaattagttgataactgttttcacttcctatcagaaggcctgcttgaagacataaaggaataatgatacattaaaattcttactagatagatatattccttcctcccaggagtattagactagctaatagtaaaggcctcaacgttattctttacttcatgttgaaaacaattactacagatatttcatccacctcagtatttatcaaggaaatggaaaatgatacagctataaaagaaagctgttatttactgtagttgtagatgtattcactacagaatcctacatttttcagcaggccacagtccagccaaatcctataatatccttgaaaagaaactattaaaaaggatagacatttctgatgtaagtaaaacccccaagcaacttaatatccatctgtcagtcatcaacttttcccctagattttttttttaactagttctgaaagtgtcaagaatagcttccctttccaccctacctaggttccctccttgctggcataaaggccaagcagtgaaatgaaccttgggttagagttatggtaggcaaaaagaaaaggagaatttaggaaataaatatgctataaacaaggtacagtacagtgagagttaacaatcctaggaatcctgcctgtcacaagctcccagttccctgtcattttatcttcatgattagaactgatcttccatttaactattacagaaagcagtaactattgcaactatctaatagttcacacaaaagaattaaaagcttaaaaataatttttaggaaacacaatattcaaaatctaaacacactgataaattattaagattaagattatttatgtgataaatgaaatctcctaccaatccatccagcctttaccagggaagaaaagcaattatttcatttcagatagaaatacaaaaaaaaaaaaaatacttttcttagaagccagatatggtttaaatgttttattatccataatgatctaaactaataagattcaccaaaaagtaaaaattcaattttacaatatacatttttttttttaactatttggctttacctttttaccttggttctccttactgaagtcctcttgctttcactttgatctggtttttgaagtctcttaattattggctgggcatggtgactcatgcctgtaatcccggcactttgggaggccaagggaggtgatcacttgagcccaggagtaaagaccagcctgggcaacatagtgagactccgtctctacaaaaaataaatttagctgggcatggtggtgcacatctgtagtcctaccaacttgggaggctgaggcaggagaatcgcttgagccccaggcttcgaggctgcagtgagctatgattacgacactgcactccagcctaggcgacagagcaagaccccattctcttacaaagtctctattataaaagtacatccatcaataccattccatttaaaatgggctattgtaatttacccacattatcacattttcaggaattataagaatgtgttttattgtactccttccttggagctgaatgcaaggaatgtgaattctgaggaattaaggtagaatatatttgactttctggtaaagatcatggttaagtataatcattactgccaaactggaattttcaagttattataatatcccaggccccttgataaaagctgagggttatcatgaccttaatgctaattcaatgagaaatgagtttaatagcataacattaccaaggtaatcaaactaataaaattccatatatcttccctgcatcttgtcactgtgtaccattcaaagtgtttataaaactctagattcatcaaatgagatttgctcagctttttgaaatgttaagatgtgtttggagaaggctgcatgactttgtttttcccttttagcaaaactaaataaagttgtcaaatat

SEQ ID NO: 131353 - protein, 524 aa, Artificial Sequence
  derived and/or modified sequence
MLTCNKAGSRMVVDAANSNGPFQPVVLLHIRDVPPADQEKLFIQKLRQCCVLFDFVSDPLSDLKWKEVKRAALSEMVEYITHNRNVITEPIYPEVVHMFAVNMFRTLPPSSNPTGAEFDPEEDEPTLEAAWPHLQLVYEFFLRFLESPDFQPNIAKKYIDQKFVLQLLELFDSEDPRERDFLKTTLHRIYGKFLGLRAYIRKQINNIFYRFIYETEHHNGIAELLEILGSIINGFALPLKEEHKIFLLKVLLPLHKVKSLSVYHPQLAYCVVQFLEKDSTLTEPVVMALLKYWPKTHSPKEVMFLNELEEILDVIEPSEFVKIMEPLFRQLAKCVSSPHFQVAERALYYWNNEYIMSLISDNAAKILPIMFPSLYRNSKTHWNKTIHGLIYNALKLFMEMNQKLFDDCTQQFKAEKLKEKLKMKEREEAWVKIENLAKANPQYTVYSQASTMSIPVAMETDGPLFEDVQMLRKTVKDEAHQAQKDPKKDRPLARRKSELPQDPHTKKALEAHCRADELASQDGR

SEQ ID NO: 131354 - protein, 384 aa, Artificial Sequence
  derived and/or modified sequence
MLTCNKAGSRMVVDAANSNGPFQPVVLLHIRDVPPADQEKLFIQKLRQCCVLFDFVSDPLSDLKWKEVKRAALSEMVEYITHNRNVITEPIYPEVVHMFAVNMFRTLPPSSNPTGAEFDPEEDEPTLEAAWPHLQLVYEFFLRFLESPDFQPNIAKKYIDQKFVLQLLELFDSEDPRERDFLKTTLHRIYGKFLGLRAYIRKQINNIFYRFIYETEHHNGIAELLEILGSIINGFALPLKEEHKIFLLKVLLPLHKVKSLSVYHPQLAYCVVQFLEKDSTLTEPVVMALLKYWPKTHSPKEVMFLNELEEILDVIEPSEFVKIMEPLFRQLAKCVSSPHFQVAERALYYWNNEYIMSLISDNAAKILPIMFPSLYRNSKTHWNK

SEQ ID NO: 131355 - DNA, 1575 bp, Artificial Sequence
  derived and/or modified sequence
atgctgacatgcaacaaggctggatcaaggatggtggtggatgctgcaaactctaacggccccttccaacccgtggttttgttacacatccgcgacgttcccccagcggatcaggaaaagttattcattcagaagcttcggcaatgctgtgtgttattcgactttgtcagcgatccgctcagcgatttaaagtggaaggaagtaaaacgggccgcgttaagcgaaatggtggagtacatcactcataataggaacgtgattaccgagccaatttaccctgaagtggtgcacatgttcgctgtcaacatgttcaggaccctgccacccagttccaatccgactggtgccgaatttgaccctgaggaagatgaacccaccctggaggcggcatggccacacctacagctggtctatgaattcttccttagattcctagagagcccagacttccagcccaatattgccaaaaaatacatcgaccagaaattcgtgcttcaacttttggaactgttcgactccgaagacccaagagagcgggactttctcaagaccacattacacaggatctacgggaagttccttggtctacgagcatacattcgcaaacagataaataacatcttctatagatttatctacgagaccgagcaccataatggcattgccgaattactcgagattctggggagcataataaatggctttgctttacccctcaaagaagagcacaagatctttctgcttaaagtcctcctgcccctgcataaggtcaaatcactctccgtctatcatccacagcttgcatactgtgttgtgcagtttcttgagaaagatagtacattaaccgagcctgtagtgatggctctgttgaagtattggcctaagacacactcgccgaaagaagtgatgttcctaaacgagctcgaagagattcttgacgtcattgaaccgtctgaatttgtgaaaattatggaacccttattcagacagctggcaaagtgcgtttcctcaccacactttcaggtcgctgagagggcactgtactactggaataacgaatacataatgagtttaatcagcgacaacgcagctaagatactccctatcatgttcccctccttgtataggaattccaagacccattggaataaaacaatccacggtctgatctacaacgcccttaagctgtttatggagatgaaccagaaattgttcgatgattgtactcagcagttcaaagccgaaaagctaaaggaaaagctaaaaatgaaagaaagagaggaggcatgggtgaaaattgagaacctggcgaaggccaaccctcaatacaccgtgtactcccaggcaagcaccatgagtatcccagttgctatggaaacggatgggcccctgttcgaagatgttcaaatgttgcggaaaacggtcaaagatgaggcccaccaggcgcagaaagaccccaagaaggatcgacccctggccaggcgtaagtccgagctgcctcaagaccctcacactaaaaaagcactcgaggcacattgtagggctgatgagttggcctcccaggatggtcgctag

SEQ ID NO: 131356 - DNA, 1575 bp, Artificial Sequence
  derived and/or modified sequence
atgctgacctgcaacaaggccggcagcaggatggtggtggatgctgccaacagcaatggccccttccagcctgtggtgctgctgcacatcagagatgtgcccccagctgaccaggagaagctgttcatccagaagctgcggcagtgctgcgtgctgtttgattttgtgtctgaccccctgagtgacctgaagtggaaggaggtgaagagagctgccctgtctgagatggtggagtacatcacccacaacagaaatgtcatcacagagcccatctacccagaggtggtgcacatgtttgctgtgaacatgttccgcaccctgccccccagcagcaaccccaccggggctgagtttgatcctgaggaggatgagcccaccctggaggccgcctggccccacctgcagctggtgtatgagttcttcctgcgcttcctggagagcccagacttccagcccaacatcgccaagaagtacatcgaccagaagtttgtgctgcagctgctggagctgtttgattctgaggacccccgggagcgggacttcctgaagaccaccctgcaccgcatctacggcaagttcctgggcctgcgggcctacatcaggaagcagatcaacaacatcttctaccgcttcatctatgaaacagagcaccacaatggaattgctgagctgctggagatcctgggcagcatcatcaatggatttgccctgcccctgaaggaggagcacaagatcttcctgctgaaggtgctgctgcccctgcacaaggtgaagagcctgtctgtgtaccacccccagctggcctactgtgtggtgcagttcctggagaaggacagcaccctgacagagcctgtggtgatggccctgctgaagtactggcccaagacccacagccccaaggaggtgatgttcctgaatgagctggaggagatcctggatgtgattgagcccagcgagtttgtgaagatcatggagcccctcttccggcagctggccaagtgtgtgagcagcccccacttccaggtggccgagcgggccctgtactactggaacaatgagtacatcatgagcctcatcagtgacaatgctgccaagatcctgcccatcatgttccccagcctgtacagaaacagcaagacccactggaacaagaccatccacggcctcatctacaatgccctgaagctgttcatggagatgaaccagaagctgtttgatgactgcacccagcagttcaaggccgagaagctgaaggagaagctgaagatgaaggagcgggaggaggcctgggtgaagattgagaacctggccaaggccaacccccagtacacagtgtacagccaggccagcaccatgagcatccctgtggccatggagacagatggccccctgtttgaagatgtgcagatgctgaggaagacagtgaaggatgaggcccaccaggcccagaaggaccccaagaaggaccggcccctggcccggaggaagtctgagctgccccaggacccccacaccaagaaggccctggaggcccactgcagagcagatgagctggccagccaggacggccgctag

SEQ ID NO: 131357 - DNA, 1575 bp, Artificial Sequence
  derived and/or modified sequence
atgctgacctgcaacaaggccggcagccggatggtggtggacgccgctaatagcaatgggcccttccagccagtggttctgcttcacattagggacgtgccacccgcagatcaggagaagctgttcatccagaaactgaggcagtgctgcgttctgttcgattttgtgtcagatccgctttcggacctgaaatggaaagaggtgaagcgcgccgccctttccgagatggtggagtatattacgcacaacaggaacgttattaccgaaccgatttaccctgaggtggttcatatgttcgccgtcaacatgtttagaacattaccaccctctagcaacccaactggagctgaatttgatccagaggaggacgaacctaccctagaagccgcctggcctcacctccagttggtgtatgagttcttcctgaggttcctagaatcaccggacttccagcctaacatagctaagaagtatatagatcagaagtttgtacttcaactgctggaactcttcgattcagaggatcccagagaacgcgacttcctcaagacaacactgcatcgcatttacggaaaattcttggggctgcgcgcttatatcagaaagcagattaacaatatcttctacagatttatatacgaaacagaacatcataatggcattgctgagctgctggaaatacttggctctattatcaatggattcgctctgcctctcaaagaggagcacaaaatctttttgctcaaagttctcctgcctctgcataaagtgaaatctctgtcagtgtaccaccctcagttggcctattgcgtcgttcaatttctcgaaaaggactccacactcacagagccagtggttatggccctgctgaaatattggcccaagacccactcccctaaggaagtaatgttccttaatgagctcgaggagatcctagacgtaatcgaacctagcgagttcgttaaaatcatggagcctcttttcagacagctcgcaaagtgcgtcagcagtccacactttcaggttgcagagagggctctttattactggaataatgagtacatcatgagcctgattagcgacaacgcagccaagatcctgccaatcatgttcccttccctgtatcgtaacagtaagactcactggaacaaaacaatacatggcctgatctataacgcgctcaagttgtttatggagatgaaccagaagctgttcgacgattgtacccagcagtttaaggccgaaaagctcaaagaaaagctaaagatgaaggagagggaggaggcctgggtgaaaattgagaatctggccaaggcaaatccgcaatataccgtgtactcccaggcctcaacaatgtccattccagtcgctatggagaccgacggaccactgttcgaggacgtccaaatgctgcgcaaaaccgtaaaggacgaggctcaccaagcacagaaagatccaaaaaaagataggcccctggcgaggcgcaaatcggagttgccacaagatccacataccaagaaagcgctggaagcgcattgccgggctgacgaacttgccagccaggatggtcggtag

SEQ ID NO: 131358 - DNA, 1575 bp, Artificial Sequence
  derived and/or modified sequence
atgctgacctgcaataaggcagggagtcgcatggtggttgatgcagccaatagcaacgggcctttccagcccgtagtgttgctacatatccgagacgtaccaccagctgaccaggagaaactgttcatccagaagctgcggcaatgttgtgtgctgttcgatttcgtcagcgacccactgagcgaccttaaatggaaggaggtaaagagagctgccctttcagagatggtcgagtacataactcacaacaggaatgtgatcaccgaaccaatctatcccgaggttgtgcatatgttcgccgttaatatgtttagaacgcttccgcctagctcgaacccgactggagctgagtttgacccagaagaggatgagcctaccttggaggcggcttggccacacctgcagctcgtatacgagttctttttacgttttctggagtcccctgatttccagcccaatattgcaaagaaatatattgatcagaagtttgtcttgcagcttctagagctctttgactccgaggacccgagagagagggacttcctgaagaccaccctgcatcgcatatatggcaagtttctcgggctaagggcttacatccgcaaacaaatcaataacattttctaccgctttatctacgaaaccgagcatcataacggtattgccgaacttctggagatccttggttccataataaatggattcgcccttcctctgaaagaggagcacaagatctttctgttaaaagtacttctgcccctgcacaaggtgaaaagtctgagcgtatatcaccctcagctggcctactgcgtcgtgcagttcctcgaaaaggattctacacttaccgagcccgtcgttatggctctgttaaaatactggccaaaaacgcatagcccaaaagaggtgatgttccttaatgaacttgaagagattctggacgtaattgaaccctctgaattcgtgaagatcatggagccactgttccgccaactagccaagtgcgtgtccagccctcacttccaggtggccgagagggcgctatattattggaacaatgagtacatcatgagcctgatctccgacaacgctgctaagatcttacctatcatgttccctagtctgtaccggaattccaaaacccattggaataagactatccacgggttgatttacaatgcccttaagcttttcatggaaatgaatcagaaactgttcgatgattgcacacagcagtttaaggccgagaaacttaaggaaaaactcaagatgaaggaaagggaggaagcatgggtgaagatcgagaatttggctaaggccaatccacagtacacagtctatagccaggccagcactatgtccatcccagttgccatggagacggatggccctctgtttgaggatgttcaaatgctgcgcaagactgtcaaagatgaggcgcatcaggcccagaaggatcccaagaaagaccgtccccttgcccgaagaaagtctgagctgccacaggacccccacacgaaaaaggcactcgaagcccattgccgagccgacgagctagcatcccaggacgggcgatag

SEQ ID NO: 131359 - DNA, 4037 bp, Artificial Sequence
  derived and/or modified sequence
ctggtttcttgccttaaggagcccattgcctttcccgctgaagtctagatgttgacatgtaataaagcgggcagcaggatggtggtggatgcggccaactccaatgggcctttccagcccgtggtccttctccatattcgagatgttcctcctgctgatcaagagaagctttttatccagaagttacgtcagtgttgcgtcctctttgactttgtttctgatccactaagtgacctaaagtggaaggaagtaaaacgagctgctttaagtgaaatggtagaatatatcacccataatcggaatgtgatcacagagcctatttacccagaagtagtccatatgtttgcagttaacatgtttcgaacattaccaccttcctccaatcctacgggagcggaatttgacccggaggaagatgaaccaacgttagaagcagcctggcctcatctacagcttgtttatgaatttttcttaagatttttagagtctccagatttccaacctaatatagcgaagaaatatattgatcagaagtttgtattgcagcttttagagctctttgacagtgaagatcctcgggagagagattttcttaaaaccacccttcacagaatctatgggaaattcctaggcttgagagcttacatcagaaaacagataaataatatattttataggtttatttatgaaacagagcatcataatggcatagcagagttactggaaatattgggaagtataattaatggatttgccttaccactaaaagaagagcacaagattttcttattgaaggtgttactacctttgcacaaagtgaaatctctgagtgtctaccatccccagctggcatactgtgtagtgcagtttttagaaaaggacagcaccctcacggaaccagtggtgatggcacttctcaaatactggccaaagactcacagtccaaaagaagtaatgttcttaaacgaattagaagagattttagatgtcattgaaccatcagaatttgtgaagatcatggaacccctcttccggcagttggccaaatgtgtctccagcccacacttccaggtggcagagcgagctctctattactggaataatgaatacatcatgagtttaatcagtgacaacgcagcgaagattctgcccatcatgtttccttccttgtaccgcaactcaaagacccattggaacaagacaatacatggcttgatatacaacgccctgaagctcttcatggagatgaaccaaaagctatttgatgactgtacacaacagttcaaagcagagaaactaaaagagaagctaaaaatgaaagaacgggaagaagcatgggttaaaatagaaaatctagccaaagccaatccccagtacacagtgtatagtcaagccagcaccatgagcattccggttgcaatggagacagatgggcctttatttgaagatgtgcagatgctgagaaagacagtgaaggacgaggctcatcaggcacagaaagatccgaagaaggaccgtcctcttgcacgccgcaagtccgagctgcctcaggacccccacaccaagaaagccttggaagctcactgcagggccgatgagctggcctcccaggacggccgctagcctccggggcgccgcgtcggggccgggcccgccagttcttttccggattctgtagaaaatacatacttcctgtgccataccaatcagttacactcaaagctttcttggaccccgttccgtaggcaataacgtgcgtccgcctcagcgcgagattaggagttcaaacaatggtgacttcccagagcccgctggcagagccgcgggttgacgacggtgtcctcgcagtgtcgccgccaccccagcgtagtccaagtcagactatttcacaaagtcagagcgataggaaagcaccctgcccttcatcttcatgttctcccaaatggaacttaggatcttttaacataggtggttctgtgataacatcagtgttttccaaatcaaaggaacgctttaaaaaataggacctattttttaagactttacagcctttgaaatggtttccacgtgattgttacgccagcagttctcgttttgtttgtttttcaatctcagtgaaatggctctttgctttcgagttctcacgcaacgtactgggcaaatgacaatcctcagccgctggtattttctaaggggtctcttcactttgatgagtgacatgaacaccgtgtctccttctcttgtgtgtacctaaagccatatttccaagtctgtggtactccaggattccaggagtaagcctgtagaagagatttattttaaaagagattgctctgaaatttatcttaaaagagcttgctctgtctaccttgacagaaattggagttttaaaattatgtgttaatatttttatttgcagatttcgtttccgtcaacttaaacattgttgcccttcaacaaggctcttgaattaataaaattatagtctctaagaattccacattttatggaaagttagagcaaaatcattttgagttaagccagttcttagcctaatgcaaactgcagcgcctttaagcataaagtaacacaacagcattgcacggggccggcactgccgctgccttcactgaaggctgcagtgctgttctgagagcttggaggaggcaccagcgaggatgacgtttagtggagctctttctgttgaaaagagctcacgttatcaacaccttgtaaggaaaatacagtgtctgagttttcatcggtcttcacatgctgctatatattccacagagttccttgcatgtactgagcttttgttttagatggaatagcacaaggagaaaaatctttaaacttagtgctttgtctattctttatttctctcagggtggccagtattttgacttatttatcctgcttgaaagctacttgagatgtgtactgctattctaaacacgtgatctagtttctttcatctctggcataagattatataacttaatgttaagtgtcttgaggcataaaagacaaaatgtggcttattttaggatctgttttttcatcgaggtctcgggtatcctttcaaagatagtgagaagcagacactgctccttgtgcagctctggtacctcctgcccactgctgtcacttcaagccactggcaatgcttctgtcctcgtgtcttggaggaaaatcacctggggggaggggacttcttgtggtaagagcaagtgcaggtatgaaatgcgaagattgccccagctaaaagtggacaagtccgctttgtgagatgaatacttcctgagaaacttgacaagtatctctccattttaccattatgaaaactatcattaaaaaaaacagtttagatgccttctccttttgagggaaaaagggtgctttttattgtataaagcagcgtcttatgtattttgatataccattgtttgaacttccgtctttagctgatagattctcaaatatccttgattttggatgttcagtatgtttgtgagagaggtttctgggaagactctctttttgccctcgggaaaaagcaaaatatcaatgtttgggtgactgtgtaaagctcagtgtgtaagaacatctttttgtctaggttttctttctgctctttattgaagacaaacactcaccaaaaagaaaaataaaagttttcagagaaactaattttctttggcaagagtattacttaatattttggcctcctaaagtttccctagttagtactcggactcctgtgctaattgtcagcttacatatcattgtatagagactgtttattctgtaccaaactgatttcaaaagtactacattgaaaataaaccggtgactgtttttcttcataaagttctgcgtttggcatcttcactctttccaaaatgtatctgtacatcagaaatgtcactattccaagtgtctttttagtgtggctttagtatggcttccttttaatattgtacatacattgtatctttgttttatggtaataagtaataaaaatgtagacttca

SEQ ID NO: 131360 - DNA, 4304 bp, Artificial Sequence
  derived and/or modified sequence
agcttcatgcctgctgacatcacgaaccagccagttccctccagctgcagagagcttcagtttgtctttttttttttaaactaaaatggaggctggtttcttgccttaaggagcccattgcctttcccgctgaagtctagatgttgacatgtaataaagcgggcagcaggatggtggtggatgcggccaactccaatgggcctttccagcccgtggtccttctccatattcgagatgttcctcctgctgatcaagagaagctttttatccagaagttacgtcagtgttgcgtcctctttgactttgtttctgatccactaagtgacctaaagtggaaggaagtaaaacgagctgctttaagtgaaatggtagaatatatcacccataatcggaatgtgatcacagagcctatttacccagaagtagtccatatgtttgcagttaacatgtttcgaacattaccaccttcctccaatcctacgggagcggaatttgacccggaggaagatgaaccaacgttagaagcagcctggcctcatctacagcttgtttatgaatttttcttaagatttttagagtctccagatttccaacctaatatagcgaagaaatatattgatcagaagtttgtattgcagcttttagagctctttgacagtgaagatcctcgggagagagattttcttaaaaccacccttcacagaatctatgggaaattcctaggcttgagagcttacatcagaaaacagataaataatatattttataggtttatttatgaaacagagcatcataatggcatagcagagttactggaaatattgggaagtataattaatggatttgccttaccactaaaagaagagcacaagattttcttattgaaggtgttactacctttgcacaaagtgaaatctctgagtgtctaccatccccagctggcatactgtgtagtgcagtttttagaaaaggacagcaccctcacggaaccagtggtgatggcacttctcaaatactggccaaagactcacagtccaaaagaagtaatgttcttaaacgaattagaagagattttagatgtcattgaaccatcagaatttgtgaagatcatggaacccctcttccggcagttggccaaatgtgtctccagcccacacttccaggacaatacatggcttgatatacaacgccctgaagctcttcatggagatgaaccaaaagctatttgatgactgtacacaacagttcaaagcagagaaactaaaagagaagctaaaaatgaaagaacgggaagaagcatgggttaaaatagaaaatctagccaaagccaatccccagtacacagtgtatagtcaagccagcaccatgagcattccggttgcaatggagacagatgggcctttatttgaagatgtgcagatgctgagaaagacagtgaaggacgaggctcatcaggcacagaaagatccgaagaaggaccgtcctcttgcacgccgcaagtccgagctgcctcaggacccccacaccaagaaagccttggaagctcactgcagggccgatgagctggcctcccaggacggccgctagcctccggggcgccgcgtcggggccgggcccgccagttcttttccggattctgtagaaaatacatacttcctgtgccataccaatcagttacactcaaagctttcttggaccccgttccgtaggcaataacgtgcgtccgcctcagcgcgagattaggagttcaaacaatggtgacttcccagagcccgctggcagagccgcgggttgacgacggtgtcctcgcagtgtcgccgccaccccagcgtagtccaagtcagactatttcacaaagtcagagcgataggaaagcaccctgcccttcatcttcatgttctcccaaatggaacttaggatcttttaacataggtggttctgtgataacatcagtgttttccaaatcaaaggaacgctttaaaaaataggacctattttttaagactttacagcctttgaaatggtttccacgtgattgttacgccagcagttctcgttttgtttgtttttcaatctcagtgaaatggctctttgctttcgagttctcacgcaacgtactgggcaaatgacaatcctcagccgctggtattttctaaggggtctcttcactttgatgagtgacatgaacaccgtgtctccttctcttgtgtgtacctaaagccatatttccaagtctgtggtactccaggattccaggagtaagcctgtagaagagatttattttaaaagagattgctctgaaatttatcttaaaagagcttgctctgtctaccttgacagaaattggagttttaaaattatgtgttaatatttttatttgcagatttcgtttccgtcaacttaaacattgttgcccttcaacaaggctcttgaattaataaaattatagtctctaagaattccacattttatggaaagttagagcaaaatcattttgagttaagccagttcttagcctaatgcaaactgcagcgcctttaagcataaagtaacacaacagcattgcacggggccggcactgccgctgccttcactgaaggctgcagtgctgttctgagagcttggaggaggcaccagcgaggatgacgtttagtggagctctttctgttgaaaagagctcacgttatcaacaccttgtaaggaaaatacagtgtctgagttttcatcggtcttcacatgctgctatatattccacagagttccttgcatgtactgagcttttgttttagatggaatagcacaaggagaaaaatctttaaacttagtgctttgtctattctttatttctctcagggtggccagtattttgacttatttatcctgcttgaaagctacttgagatgtgtactgctattctaaacacgtgatctagtttctttcatctctggcataagattatataacttaatgttaagtgtcttgaggcataaaagacaaaatgtggcttattttaggatctgttttttcatcgaggtctcgggtatcctttcaaagatagtgagaagcagacactgctccttgtgcagctctggtacctcctgcccactgctgtcacttcaagccactggcaatgcttctgtcctcgtgtcttggaggaaaatcacctggggggaggggacttcttgtggtaagagcaagtgcaggtatgaaatgcgaagattgccccagctaaaagtggacaagtccgctttgtgagatgaatacttcctgagaaacttgacaagtatctctccattttaccattatgaaaactatcattaaaaaaaacagtttagatgccttctccttttgagggaaaaagggtgctttttattgtataaagcagcgtcttatgtattttgatataccattgtttgaacttccgtctttagctgatagattctcaaatatccttgattttggatgttcagtatgtttgtgagagaggtttctgggaagactctctttttgccctcgggaaaaagcaaaatatcaatgtttgggtgactgtgtaaagctcagtgtgtaagaacatctttttgtctaggttttctttctgctctttattgaagacaaacactcaccaaaaagaaaaataaaagttttcagagaaactaattttctttggcaagagtattacttaatattttggcctcctaaagtttccctagttagtactcggactcctgtgctaattgtcagcttacatatcattgtatagagactgtttattctgtaccaaactgatttcaaaagtactacattgaaaataaaccggtgactgtttttcttcataaagttctgcgtttggcatcttcactctttccaaaatgtatctgtacatcagaaatgtcactattccaagtgtctttttagtgtggctttagtatggcttccttttaatattgtacatacattgtatctttgttttatggtaataagtaataaaaatgtagacttcatattttgtacaaaatgtcctatgtacagaataaaaaagttcatagaaacagcaaatataggtaagtggcacaattatttttctttagaaaatatctgtaactttatgcattagtgaaatgttaagtaccgacatattttttaacattttgtaattcaaaactttttgttttgacattgtttatgaagagaaacttcatacacttgccatttaatatgctcttttatctaattttcaaaaactctaaaaaacggtgtatcatatggactaaataaagaacatgtgaattttattgctcatcatg

SEQ ID NO: 131361 - DNA, 1575 bp, Artificial Sequence
  derived and/or modified sequence
atgctgacctgcaacaaggccggcagcagaatggtggtggacgccgccaacagcaacggccccttccagcccgtggtgctgctgcacatcagagacgtgccccccgccgaccaggagaagctgttcatccagaagctgagacagtgctgcgtgctgttcgacttcgtgagcgaccccctgagcgacctgaagtggaaggaggtgaagagagccgccctgagcgagatggtggagtacatcacccacaacagaaacgtgatcaccgagcccatctaccccgaggtggtgcacatgttcgccgtgaacatgttcagaaccctgccccccagcagcaaccccaccggcgccgagttcgaccccgaggaggacgagcccaccctggaggccgcctggccccacctgcagctggtgtacgagttcttcctgagattcctggagagccccgacttccagcccaacatcgccaagaagtacatcgaccagaagttcgtgctgcagctgctggagctgttcgacagcgaggaccccagagagagagacttcctgaagaccaccctgcacagaatctacggcaagttcctgggcctgagagcctacatcagaaagcagatcaacaacatcttctacagattcatctacgagaccgagcaccacaacggcatcgccgagctgctggagatcctgggcagcatcatcaacggcttcgccctgcccctgaaggaggagcacaagatcttcctgctgaaggtgctgctgcccctgcacaaggtgaagagcctgagcgtgtaccacccccagctggcctactgcgtggtgcagttcctggagaaggacagcaccctgaccgagcccgtggtgatggccctgctgaagtactggcccaagacccacagccccaaggaggtgatgttcctgaacgagctggaggagatcctggacgtgatcgagcccagcgagttcgtgaagatcatggagcccctgttcagacagctggccaagtgcgtgagcagcccccacttccaggtggccgagagagccctgtactactggaacaacgagtacatcatgagcctgatcagcgacaacgccgccaagatcctgcccatcatgttccccagcctgtacagaaacagcaagacccactggaacaagaccatccacggcctgatctacaacgccctgaagctgttcatggagatgaaccagaagctgttcgacgactgcacccagcagttcaaggccgagaagctgaaggagaagctgaagatgaaggagagagaggaggcctgggtgaagatcgagaacctggccaaggccaacccccagtacaccgtgtacagccaggccagcaccatgagcatccccgtggccatggagaccgacggccccctgttcgaggacgtgcagatgctgagaaagaccgtgaaggacgaggcccaccaggcccagaaggaccccaagaaggacagacccctggccagaagaaagagcgagctgccccaggacccccacaccaagaaggccctggaggcccactgcagagccgacgagctggccagccaggacggcagatag

SEQ ID NO: 131362 - protein, 307 aa, Artificial Sequence
  derived and/or modified sequence
MAEISDLDRQIEQLRRCELIKESEVKALCAKAREILVEESNVQRVDSPVTVCGDIHGQFYDLKELFRVGGDVPETNYLFMGDFVDRGFYSVETFLLLLALKVRYPDRITLIRGNHESRQITQVYGFYDECLRKYGSVTVWRYCTEIFDYLSLSAIIDGKIFCVHGGLSPSIQTLDQIRTIDRKQEVPHDGPMCDLLWSDPEDTTGWGVSPRGAGYLFGSDVVAQFNAANDIDMICRAHQLVMEGYKWHFNETVLTVWSAPNYCYRCGNVAAILELDEHLQKDFIIFEAAPQETRGIPSKKPVADYFL

SEQ ID NO: 131363 - DNA, 924 bp, Artificial Sequence
  derived and/or modified sequence
atggccgagatctctgacctcgatcggcaaattgagcaactaagacgatgtgagctcattaaggaaagtgaggttaaggccctgtgtgccaaagcccgcgagatcctggtggaagaatcaaacgtgcagagggttgacagccccgttacggtctgcggggacatccatggacagttctatgatttgaaggaattgtttcgcgtgggtggagacgtccccgaaaccaactatctcttcatgggggacttcgtcgaccgaggattttacagcgtcgagacattcctactgctgcttgccctgaaggtgaggtaccctgataggatcactttgatcagggggaaccacgagagccgacagatcacccaggtttacggcttttatgacgagtgcctacgcaaatacggaagcgtgacggtctggcgatactgcacagaaatattcgactacctctctctctctgccattattgatgggaagattttttgtgtgcatggcggcctgtcgccttccatacaaactctggaccagatccggacaatcgaccgcaaacaggaggtgccccacgatggccctatgtgcgatctcctgtggtcggatccagaggatacaactggatggggagtaagtccaagaggcgctggctacctgttcgggtcggacgtggtggcccagttcaatgctgccaatgacatcgatatgatttgcagggcgcaccagctggtgatggagggttacaaatggcacttcaatgagactgtgttgacagtgtggagcgctccaaactactgttacagatgcggcaacgtcgctgcaatcctggagttggacgagcatctgcaaaaggattttatcattttcgaagccgctccccaggaaactagaggcattccctccaaaaagcccgtggccgactatttcctctag

SEQ ID NO: 131364 - DNA, 924 bp, Artificial Sequence
  derived and/or modified sequence
atggccgagatcagtgacctggaccggcagatcgagcagctgcggcgctgtgagctgatcaaggagagcgaggtgaaggccctgtgtgccaaggcccgggagatcctggtggaggagagcaatgtgcagagggtggacagccctgtgacagtgtgtggggacatccacggccagttctatgacctgaaggagctgttccgggtgggcggagatgtgcctgagaccaactacctgttcatgggagactttgtggaccggggcttctacagcgtggagaccttcctgctgctgctggccctgaaggtgcgctacccagaccgcatcaccctcatccggggcaaccacgagagccggcagatcacccaggtgtatggcttctatgatgaatgtctgaggaaatatggctctgtgacagtgtggagatactgcacagagatctttgactacctgagcctgagcgccatcattgatggcaagatcttctgtgtgcacggcggcctgagccccagcatccagaccctggaccagatccgcaccatcgacaggaagcaggaggtgccccatgatggccccatgtgtgacctgctgtggagcgaccctgaggacaccaccggctggggcgtgagccccagaggagctggctacctgtttggaagtgatgtggtggcccagttcaatgctgccaatgacatcgacatgatctgccgggcccaccagctggtgatggagggctacaagtggcacttcaatgagaccgtgctgactgtgtggagcgcccccaactactgctaccgctgtggaaatgtggccgccatcctggagctggatgagcacctgcagaaggacttcatcatctttgaggccgccccccaggagacccggggcatccccagcaagaagcctgtggccgactacttcctgtag

SEQ ID NO: 131365 - DNA, 924 bp, Artificial Sequence
  derived and/or modified sequence
atggccgagatcagcgacctggaccggcagatcgagcagctgcggcgatgcgaactgataaaagagtcagaggtcaaggctttatgtgcaaaagcaagggagatactggtggaggagagtaatgtgcagagagtggattctcccgttaccgtgtgtggagatatccacggacaattttatgacttaaaagaattatttagagtgggcggggacgtgccggagactaattatctgtttatgggtgactttgtggatagaggcttttatagcgttgagacattcttactgttgctggccctgaaggtgcgctaccccgataggattacacttattaggggcaaccacgagagccggcagattacccaggtgtacgggttttatgacgagtgcctgcggaaatacggaagcgtgaccgtctggcgctactgtaccgaaatttttgactatttaagcctgtcagctattattgacgggaagattttctgcgtacacggtgggctgtctccttcgattcaaacactggaccagatacgcactattgatcggaaacaggaagtgccacacgacggacctatgtgcgatctgctctggagcgatcccgaggataccacagggtggggggtttctccgcgtggcgccggctacttgttcggaagtgatgtggtcgcacagttcaatgctgctaacgacatcgatatgatctgcagggcccaccagctagtgatggagggatacaagtggcacttcaatgaaaccgtgctcactgtgtggagtgctcccaattattgttatcgctgcggcaatgttgcagcgattctggagctggatgaacacctgcagaaggacttcattatctttgaagcggctccccaggagacacggggtattccctccaagaaacccgtggcagactacttcctctag

SEQ ID NO: 131366 - DNA, 924 bp, Artificial Sequence
  derived and/or modified sequence
atggctgagatctcagacctggataggcagatcgaacagctccgacgatgcgaacttataaaggaatcggaagtgaaagccctctgtgccaaagccagagaaatattagttgaagaaagtaacgtgcagagagtcgactctcctgtcacagtgtgtggcgacatccacggacagttctacgacttgaaggaactattcagagtaggcggtgatgtgccagagacaaattatctgtttatgggggattttgttgaccgcggtttctactctgtggaaacattcctgctcctcttggcactcaaggtccgctatcccgatcggataaccctgatccggggaaatcatgagtcaagacaaattacccaagtgtacggcttctatgatgagtgtctgaggaagtacggcagtgtcaccgtgtggaggtattgcaccgaaattttcgattacctgtctctaagcgcgattatcgatggaaaaatcttttgcgttcacgggggactgagcccaagcatacagacactggatcaaattaggacaatagaccggaagcaggaggtccctcacgacggacctatgtgcgatctcctgtggtctgaccccgaagatactacaggatggggcgtaagtcctagaggggcaggctacttatttggaagcgacgttgtggcccagtttaatgcagccaatgatattgacatgatctgccgggctcaccagctggtgatggagggctacaaatggcattttaatgagaccgtgctaaccgtgtggtctgctccaaattactgctatcgatgcgggaacgttgccgctatcctcgaactggatgagcatttgcagaaagactttattattttcgaggcagcccctcaggaaacgagggggatcccctccaagaaacctgtcgccgattatttcctgtag

SEQ ID NO: 131367 - DNA, 1407 bp, Artificial Sequence
  derived and/or modified sequence
cggggccggaagtaggagcggcggcggcggcggcggcggcggtcgaaagcggagtgaaagagggaggcagggagccggagagccggaaccggagtcgcagcggcggagacccctgtgcggtgcggagggggcggcggccccgactctgacccgcgccgggggtgggccatggcggagatcagcgacctggaccggcagatcgagcagctgcgtcgctgcgagctcatcaaggagagcgaagtcaaggccctgtgcgctaaggccagagagatcttggtagaggagagcaacgtgcagagggtggactcgccagtcacagtgtgcggcgacatccatggacaattctatgacctcaaagagctgttcagagtaggtggcgacgtccctgagaccaactacctcttcatgggggactttgtggaccgtggcttctatagcgtcgaaacgttcctcctgctgctggcacttaaggttcgctatcctgatcgcatcacactgatccggggcaaccatgagagtcgccagatcacgcaggtctatggcttctacgatgagtgcctgcgcaagtacggctcggtgactgtgtggcgctactgcactgagatctttgactacctcagcctgtcagccatcatcgatggcaagatcttctgcgtgcacgggggcctctccccctccatccagaccctggatcagattcggacaatcgaccgaaagcaagaggtgcctcatgatgggcccatgtgtgacctcctctggtctgacccagaagacaccacaggctggggcgtgagcccccgaggagccggctacctatttggcagtgacgtggtggcccagttcaacgcagccaatgacattgacatgatctgccgtgcccaccaactggtgatggaaggttacaagtggcacttcaatgagacggtgctcactgtgtggtcggcacccaactactgctaccgctgtgggaatgtggcagccatcttggagctggacgagcatctccagaaagatttcatcatctttgaggctgctccccaagagacacggggcatcccctccaagaagcccgtggccgactacttcctgtgaccccgcccggcccctgccccctccaacccttctggccctcgcaccactgtgactctgccatcttcctcagacggaggctgggcgtggggggggctgtcctggctctgctgtcccccaagagggtgcttcgagggtgaggacttctctggagaggcctggagacctagctccatgttcctcctcctctctccccacttgaaccatgaagtttccaataatttttttttctttttttccttcttttttctgtttgtttttagataaaaattttgagaaaaaaaatgaaaaaattctaataaaagaagaaaaatggtt

SEQ ID NO: 131368 - DNA, 924 bp, Artificial Sequence
  derived and/or modified sequence
atggccgagatcagcgacctggacagacagatcgagcagctgagaagatgcgagctgatcaaggagagcgaggtgaaggccctgtgcgccaaggccagagagatcctggtggaggagagcaacgtgcagagagtggacagccccgtgaccgtgtgcggcgacatccacggccagttctacgacctgaaggagctgttcagagtgggcggcgacgtgcccgagaccaactacctgttcatgggcgacttcgtggacagaggcttctacagcgtggagaccttcctgctgctgctggccctgaaggtgagataccccgacagaatcaccctgatcagaggcaaccacgagagcagacagatcacccaggtgtacggcttctacgacgagtgcctgagaaagtacggcagcgtgaccgtgtggagatactgcaccgagatcttcgactacctgagcctgagcgccatcatcgacggcaagatcttctgcgtgcacggcggcctgagccccagcatccagaccctggaccagatcagaaccatcgacagaaagcaggaggtgccccacgacggccccatgtgcgacctgctgtggagcgaccccgaggacaccaccggctggggcgtgagccccagaggcgccggctacctgttcggcagcgacgtggtggcccagttcaacgccgccaacgacatcgacatgatctgcagagcccaccagctggtgatggagggctacaagtggcacttcaacgagaccgtgctgaccgtgtggagcgcccccaactactgctacagatgcggcaacgtggccgccatcctggagctggacgagcacctgcagaaggacttcatcatcttcgaggccgccccccaggagaccagaggcatccccagcaagaagcccgtggccgactacttcctgtag

SEQ ID NO: 131369 - protein, 305 aa, Artificial Sequence
  derived and/or modified sequence
MAPLDLDKYVEIARLCKYLPENDLKRLCDYVCDLLLEESNVQPVSTPVTVCGDIHGQFYDLCELFRTGGQVPDTNYIFMGDFVDRGYYSLETFTYLLALKAKWPDRITLLRGNHESRQITQVYGFYDECQTKYGNANAWRYCTKVFDMLTVAALIDEQILCVHGGLSPDIKTLDQIRTIERNQEIPHKGAFCDLVWSDPEDVDTWAISPRGAGWLFGAKVTNEFVHINNLKLICRAHQLVHEGYKFMFDEKLVTVWSAPNYCYRCGNIASIMVFKDVNTREPKLFRAVPDSERVIPPRTTTPYFL

SEQ ID NO: 131370 - DNA, 918 bp, Artificial Sequence
  derived and/or modified sequence
atggctcctctcgacttagataagtacgtggaaatcgctcggctgtgcaaataccttcccgagaacgacttgaagcgcctttgcgactacgtgtgcgacctgctcttggaagagagcaacgtacagcctgtgtccacacctgtcactgtgtgcggtgatatccatggccagttctacgacctgtgcgaactgttccgcaccggcggtcaggtacccgacaccaattatatatttatgggcgacttcgtcgacagaggatactactctcttgaaacatttacctacctgttggcactgaaagccaaatggcccgaccgcatcacactgcttaggggtaaccacgagtctagacagatcacacaagtctacggcttttatgatgagtgtcagacaaagtatgggaatgccaacgcctggaggtattgtacaaaggtattcgatatgctgactgtggctgctctgattgatgaacaaatattgtgtgtccatgggggactgagccctgatatcaagacactggatcagatacggaccatagagaggaaccaggagatcccccacaagggtgcattctgtgaccttgtgtggtctgaccccgaggatgtggacacctgggcgattagcccgagaggggcagggtggcttttcggcgcgaaggtgactaatgagttcgtgcatatcaataacctgaaattgatatgtagagctcaccagttggtgcatgaaggctacaaattcatgttcgatgagaagctggtgaccgtttggtctgctcctaactattgctaccgatgtggtaatatcgctagcattatggtattcaaagatgtgaataccagagaacccaagctgtttcgcgcagtacctgactcggagagagtgatccctccacgaaccaccacaccctattttctgtag

SEQ ID NO: 131371 - DNA, 918 bp, Artificial Sequence
  derived and/or modified sequence
atggcccccctggacctggacaagtatgtggagatcgcccggctgtgcaagtacctgcctgaaaatgacctgaagaggctgtgtgactatgtgtgtgacctgctgctggaggagagcaatgtgcagcctgtgtccacccctgtgacagtgtgtggggacatccacggccagttctatgacctgtgtgagctgttcagaactggaggccaggtgcctgacaccaactacatcttcatgggagactttgtggaccggggctactacagcctggagaccttcacctacctgctggccctgaaggccaagtggccagaccgcatcaccctgctgcggggcaaccacgagagccggcagatcacccaggtgtatggcttctatgatgagtgccagaccaagtatggaaatgccaatgcctggagatactgcaccaaggtgtttgacatgctgactgtggccgccctgattgatgagcagatcctgtgtgtgcatggaggcctgagcccagacatcaagaccctggaccagatccgcaccattgaaagaaaccaggagatcccccacaagggggccttctgtgacctggtgtggagcgaccctgaagatgtggacacctgggccatcagccccaggggggccggctggctgtttggagccaaggtgaccaatgaatttgtgcacatcaacaacctgaagctgatctgccgggcccaccagctggtgcatgagggctacaagttcatgtttgatgagaagctggtgacagtgtggagcgcccccaactactgctaccgctgtggcaacatcgccagcatcatggtgttcaaggatgtgaacacccgggagcccaagctgttccgggctgtgcctgattctgagagggtcatcccccccaggaccaccaccccctacttcctgtag

SEQ ID NO: 131372 - DNA, 918 bp, Artificial Sequence
  derived and/or modified sequence
atggcccccctggacctggacaagtacgtggagatcgcccggctgtgcaagtacctcccagagaatgatctgaaacgactgtgcgactacgtttgcgatctcctgctggaagagtccaatgtacagcctgtgtccacacctgtgactgtgtgcggagacattcatggccaattttatgatctttgcgaactcttccgtacaggaggtcaagtgcctgacacgaattacatttttatgggcgacttcgttgatcgcgggtattatagcttggagacctttacctacctgctggccctaaaagcaaaatggcccgatcgaattaccctactgcggggcaatcacgagtctcggcagattacccaggtgtatggcttctatgatgaatgccagactaaatatggcaacgcgaacgcctggaggtattgcacgaaggtgtttgacatgcttaccgtcgccgctcttatcgacgagcaaatcctgtgtgtccacggcgggttgtcgcccgatatcaaaaccctggaccagatcagaactatagaacggaaccaggagataccccataagggggccttctgcgatttggtgtggtctgatcctgaagatgtcgatacctgggctatctcaccaaggggagcaggatggctgtttggagctaaggtcactaatgaattcgtgcatatcaataatcttaagcttatctgccgagcacatcagcttgtccatgagggatataagttcatgtttgacgagaagctagtaacagtctggtcagcccccaattactgttatagatgcggaaacattgcatccattatggttttcaaggatgtgaacactcgcgagccaaagctttttcgtgccgtgccagattccgaaagagttatccctccccgcacaacaaccccctatttcctatag

SEQ ID NO: 131373 - DNA, 918 bp, Artificial Sequence
  derived and/or modified sequence
atggccccactggacctggacaagtacgtggagatcgcacgtctttgtaagtatctgccggaaaatgacctgaagcgtctatgtgactatgtgtgcgatctgttattagaagagagtaacgtgcaacctgtgtccactcccgttacagtgtgtggggacattcacggacagttttacgatctgtgcgagcttttcagaacagggggacaggtgcctgacaccaattacattttcatgggtgacttcgttgatcgcggatattactctctggagacatttacctacctcttagccctcaaggccaagtggccagataggattacattactaaggggtaaccatgagagcaggcagatcacccaggtctacggattctatgatgagtgccagaccaaatacgggaatgccaacgcatggcggtattgtactaaggtgtttgatatgctcacagtcgcagctcttattgacgagcagattctctgtgtgcacggcggactttcacctgacatcaagactcttgaccaaatcaggacgatagaacggaaccaggagattccccacaagggtgctttttgcgatctcgtgtggtcagacccggaggatgtggacacctgggcaatctcaccccgaggcgcaggctggctgttcggcgcaaaagttaccaacgaatttgtacacattaataacctgaaactaatctgtcgcgcacaccagctcgtgcacgagggttacaaatttatgtttgatgagaagctggtgaccgtctggtccgcccctaactattgctatagatgcggaaatatcgcttcaattatggtgtttaaggatgtcaacacccgagagccaaaactgttcagggctgttcccgatagcgaacgagtgatcccccctagaaccacaaccccctactttctctag

SEQ ID NO: 131374 - DNA, 4118 bp, Artificial Sequence
  derived and/or modified sequence
ggacgtgacgcagggaaagttccggcttcggcctccgccgctgccgccgccgctgctacagccgccgccgccgctgttgccgcggcttgttattcttaaaatggcgccgctagacctggacaagtatgtggaaatagcgcggctgtgcaagtacctgccagagaacgacctgaagcggctatgtgactacgtttgtgacctcctcttagaagagtcaaatgttcagccagtatcaacaccagtaacagtgtgtggagatatccatggacagttttatgacctttgtgaactgttcagaactggaggtcaggttcctgacacaaactacatatttatgggtgattttgtagacagaggttactatagtttggagaccttcacttaccttcttgcattaaaggctaaatggcctgatcgtattacacttttgcgaggaaatcatgagagtagacagataacacaggtctatggattttatgatgagtgccaaaccaaatatggaaatgctaatgcctggagatactgtaccaaagtttttgacatgctcacagtagcagctttaatagatgagcagattttgtgtgtccatggtggtttatctcctgatatcaaaacactggatcaaattcgaaccatcgaacggaatcaggaaattcctcataaaggagcattttgtgatctggtttggtcagatcctgaagatgtggatacctgggctatcagtccccgaggagcaggttggctttttggagcaaaggtcacaaatgagtttgttcatatcaacaacttaaaactcatctgcagagcacatcaactagtgcacgaaggctataaatttatgtttgatgagaagctggtgacagtatggtctgctcctaattactgctatcgttgtggaaatattgcttcgatcatggtcttcaaagatgtaaatacaagagaaccaaagttattccgggcagttccagattcagaacgtgttattcctcccagaacgacaacgccatatttcctttgaggccttcgcccatcctgctgacccatttttctgccctcttcttaccccaattttcttgtattaccctctacaatatactttttattgagcactttgctgctgaaatgctgcctcttgcctttttttttttaaattttaaattatctaaatttattgtttgttgtggtgtctatagcaaagtttttctatcaattttcccccatcccatccccaccctggactcatttgagaagacttgagaaatgtcttaatactcacactgctgcatgtagctcttgcttatttactggtctgggaaacaggatgtgtttcctttttttaaaagccaattgacagattacacctaaatactcctccttttgtatcattcagccttttgttttagtttggtaagttttaagaaatttcagcagcaaagttgttattcagtgggcacgatggactccaaatgcctcaagttatgtatacctgtcccagatgtaaacttcattgtcctttgttggatgatattttaaatggatataaaataaattggtctaaagggctgccctccttgttgtgtttttaaattttagttaaaaactgctacagcttatgactttgtactttaagataattgtattgatcttttttcagattccttgtattttttaataaagtaatcttaaataaaactcagataggttaagtgttagaaattttaaacagcttacattgttagcgtaaagttatcttttcttttttcctaatcagagttcttgaccctttggttattgagtttaaaacttcaattgaaattcaatagtatttatttttgaaaaaaatcactaaactgtgcctaaagaacataactgccatattaatgttttggtttatatcctctatagtaatagaaaaacatttaatacttgtaatgctgatgtgttaatttgataccagttgagtagaatgtgatcaatccagtttacaatctatcatgagtattattaactaaaatctatgtgcttttcaataggaatcattcttctcttgctgtaacacttgaccttaacttttagaaagtgttcatttttaaactgcaactggaaaggttgaaaagttaggactcttgtatttgtgaactgtaatctgaagcagattatttaaagtgtagaaaaagaaacaagttcttcttttttgcaaaggtctgtgataccatatttcagctttgtgtaagtaatttgaatatccaaagggttgtgatgatcagttctgaatatgcaactgtccacttaataaggacaagtattccagtatctcttatgactgtagtcataaatgatgttggaatgtacattttgtgaaatagttggtatccctttactatgattaatttttgttattccaggaaatacttgtgaagccagccaattaataaagcactttagcatctgttcaggtagttttgaaaacccacttttccccttcaggataagaacttccaggttacctaaaaatgcaataaaaatctttatagtctaagcttcttggcatataatttttcatcagggttttcttttattaattgagcacaatactgttttgatttaatttttttccctcaaaccacccagctccttacatagtttttaattatatagctatatgaaagaggtggctaagacatttgctgcacacacttgaactaatgttgggtcagtagcttcgtgttactgccctgatcccagtgtaattcaggtggaaaggtatttttatctcacagggatatgtagctatgtattttactaattgtgaaacactggaaattaatgatgcagacaacttggtgtggtctttgaacagctctctgcagtatttttttttttcctgttaccataaattgtatttaagtgcttgctttccacttaagttgtactaatagaaccggtaactcccagccctccctgtttgacactccttagcttagattgatgtagttgtttttgttatccctataatgtgacttttatttttaagtcattgtgtactgcatttgtttgtcactagttgggcacgtgccaataatattctctccattccttatctgccatctctgttttgcctgatttctcttcaactgaataatggctttttgcatggaaaaaatagtttttactattagacgtgtaaagggaagagagagctaatgtattggactttgtgagcctacaaggaatattttggatccctccaataaataagggctatgtactatatgtactatatagagttatcatgtggtggaagatacttgcaagtcatagatttatgggcaggaggatttgttactccctatatctaggctgaatgtaaaatcccttatgttgtatcaatgggggtaaaaactatttttatttgcctatgatatacttggtttctaataaagtgccctaggctctagtgagaactgtctactttgaattgccatttactccctttcctcctttggccgatatgctcttggctagctttttataagttaatgtgtttccccaaaaagtttcactactttatattcatttgagtgtgatcctaaaacacctggatcaacagtacatctcatatgcaatctgcatcagctcctattctgtctggatgtctagaactgttggaagattttgacgtcttaagccctaggttttgctttgggaaataaggtttgaaatattgttcattgcattaagatttgtgtgtgtgtgctttgtaagcccagaaccaggttttggaaaatgcctgtactgtgaaagcaaattaggactctttctgagcctctttcattgtcagaaatagaatcactttccatcagcttccaggaaattgtgtatctggagtcgaagagatttgacatcaagaatccagatttttaaatgtaattgttttttaaatgctaatgtttgtaaagcaccttcagttcttcggatgaaaggtgctatattccctcagtgtaaattaataaaaagattacaggaagtttgtcaaaaaattcaatgcatagtctgtagtatgtcctgacaagaagttagcattttatataagaaattaaaaaatgcttattcctcca

SEQ ID NO: 131375 - DNA, 918 bp, Artificial Sequence
  derived and/or modified sequence
atggcccccctggacctggacaagtacgtggagatcgccagactgtgcaagtacctgcccgagaacgacctgaagagactgtgcgactacgtgtgcgacctgctgctggaggagagcaacgtgcagcccgtgagcacccccgtgaccgtgtgcggcgacatccacggccagttctacgacctgtgcgagctgttcagaaccggcggccaggtgcccgacaccaactacatcttcatgggcgacttcgtggacagaggctactacagcctggagaccttcacctacctgctggccctgaaggccaagtggcccgacagaatcaccctgctgagaggcaaccacgagagcagacagatcacccaggtgtacggcttctacgacgagtgccagaccaagtacggcaacgccaacgcctggagatactgcaccaaggtgttcgacatgctgaccgtggccgccctgatcgacgagcagatcctgtgcgtgcacggcggcctgagccccgacatcaagaccctggaccagatcagaaccatcgagagaaaccaggagatcccccacaagggcgccttctgcgacctggtgtggagcgaccccgaggacgtggacacctgggccatcagccccagaggcgccggctggctgttcggcgccaaggtgaccaacgagttcgtgcacatcaacaacctgaagctgatctgcagagcccaccagctggtgcacgagggctacaagttcatgttcgacgagaagctggtgaccgtgtggagcgcccccaactactgctacagatgcggcaacatcgccagcatcatggtgttcaaggacgtgaacaccagagagcccaagctgttcagagccgtgcccgacagcgagagagtgatcccccccagaaccaccaccccctacttcctgtag

SEQ ID NO: 131376 - DNA, 288 bp, Artificial Sequence
  derived and/or modified sequence
atggccgccgcccggttgtgcctgagtctgctgctcctctccacttgtgtggctctactgctgcagccgcttctgggagcccaaggcgcccctttggagcctgtgtaccctggagataacgcgacgccagagcagatggcccagtacgcagcggatttgcgccggtatattaatatgctcactcgaccgagatacggtaagagacataaagaggataccctggctttctctgaatggggctctcctcatgccgctgtgcccagagagttaagtccactagatttgtag

SEQ ID NO: 131377 - DNA, 288 bp, Artificial Sequence
  derived and/or modified sequence
atggctgctgcccggctgtgcctgagcctgctgctgctgagcacctgtgtggccctgctgctgcagcccctgctgggcgcccagggcgcccccctggagcctgtgtacccaggggacaatgccaccccagagcagatggcccagtatgctgctgacctgcggcgctacatcaacatgctgacccggcccaggtatggcaagaggcacaaggaggacaccctggccttcagcgagtggggcagcccccacgccgctgtgccccgggagctgagccccctggacctgtag

SEQ ID NO: 131378 - DNA, 288 bp, Artificial Sequence
  derived and/or modified sequence
atggccgccgcccggctgtgcctgagcctgctgctgctgagcacctgcgtcgctttattactgcagcctcttctgggagcacaaggcgctcccctggaaccggtgtaccctggcgataacgccacacctgagcagatggcccagtacgcggctgacctgcggagatatataaacatgctcacaaggcccagatacgggaagaggcacaaggaagataccctcgctttcagcgagtggggttctccccatgctgctgtacccagggaactgagcccgttggatctgtag

SEQ ID NO: 131379 - DNA, 457 bp, Artificial Sequence
  derived and/or modified sequence
ggcaggtgctcgcttggtctagtgcccatttactctggactccggatggctgccgcacgcctctgcctctccctgctgctcctgtccacctgcgtggctctgttactacagccactgctgggtgcccagggagccccactggagccagtgtacccaggggacaatgccacaccagagcagatggcccagtatgcagctgatctccgtagatacatcaacatgctgaccaggcctaggtatgggaaaagacacaaagaggacacgctggccttctcggagtgggggtccccgcatgctgctgtccccagggagctcagcccgctggacttataatgccaccttctgtctcctacgactccatgagcagcgccagcccagctctcccctctgcacccttggctctggccaaagcttgctccctgctcccacacaggctcaataaagcaagtcaaagcca

SEQ ID NO: 131380 - DNA, 288 bp, Artificial Sequence
  derived and/or modified sequence
atggcggctgctagactgtgcctgtctctgctgctgctctccacatgcgtcgccctcttgctgcagccactccttggagcgcagggcgctcctctcgaacccgtgtatccaggggataatgcaactccggagcagatggcccagtacgccgctgacctgaggcggtacattaacatgctgacgaggcctcgctatggcaagaggcacaaagaggatactttggcctttagcgaatgggggtcaccccacgcagccgttcctcgcgaattatcacccctagacctgtag

SEQ ID NO: 131381 - DNA, 288 bp, Artificial Sequence
  derived and/or modified sequence
atggccgccgccagactgtgcctgagcctgctgctgctgagcacctgcgtggccctgctgctgcagcccctgctgggcgcccagggcgcccccctggagcccgtgtaccccggcgacaacgccacccccgagcagatggcccagtacgccgccgacctgagaagatacatcaacatgctgaccagacccagatacggcaagagacacaaggaggacaccctggccttcagcgagtggggcagcccccacgccgccgtgcccagagagctgagccccctggacctgtag

SEQ ID NO: 131382 - protein, 247 aa, Artificial Sequence
  derived and/or modified sequence
MLLILLSVALLALSSAESSSEDVSQEESLFLISGKPEGRRPQGGNQPQRPPPPPGKPQGPPPQGGNQSQGPPPPPGKPEGRPPQGGNQSQGPPPHPGKPERPPPQGGNQSQGTPPPPGKPERPPPQGGNQSHRPPPPPGKPERPPPQGGNQSQGPPPHPGKPEGPPPQEGNKSRSARSPPGKPQGPPQQEGNKPQGPPPPGKPQGPPPAGGNPQQPQAPPAGKPQGPPPPPQGGRPPRPAQGQQPPQ

SEQ ID NO: 131383 - DNA, 543 bp, Artificial Sequence
  derived and/or modified sequence
atgcagaggggccccctgagccccagccccagtgatggcctgggcgccctgggcaccacctacccaggagtgcaccggggccagagcatggccggcctgcgggtgcctgccttcaatgccggcctgcgggccatcacccccagcagagctgagacccagcaccctgagaccaccagcagcggcatgcaccgggagcccctgagcagcacccccatcgcccactgggagggcgcccagagccctggggcccagagcgtgctggccatgctggtgcacaggacagctgcctacaccctgcaggtgctggagcccaagaaggaccccggccgggagctgcctgccacccccaggtcctgggccccagcccggcagcccagccccctgcacagcatccggcagaccatgcctgccaagcccagcctggtgaagcgggagaggaggaaccaggccctggcccgggaggccccctggttcccccagaggacccagtggaagaccagcgagggccctggcagcagcagcggccggcggggcagaagatag

SEQ ID NO: 131384 - DNA, 744 bp, Artificial Sequence
  derived and/or modified sequence
atgctgctgatcctgctgagcgtggccctgctggccctgagcagcgccgaaagttctagtgaggatgtaagccaagaggagagcctgtttcttatcagcggcaagcccgagggtaggcggccccagggcgggaaccaaccacagagaccaccaccaccaccagggaaaccccagggaccacccccccagggaggcaaccaatctcagggacccccacctccacccggaaagcctgagggacggccccctcaagggggcaatcagagtcaaggtccgccaccacatcccggaaagcccgagaggccgcccccgcagggcggaaatcagagccagggtaccccccctccccccgggaaacccgagagaccccctcctcagggaggcaatcaaagccatcgcccaccaccccccccgggaaagcccgagcggccaccaccccaggggggcaaccagagccaggggccccccccccaccccggaaagcctgaaggcccccccccacaagagggcaataaaagtcggagtgcccgttcccccccgggcaagccccagggcccacctcaacaagaagggaataaaccacagggcccccctccgcccgggaaacctcagggccctccaccagcaggaggaaatccacagcagcctcaggctccacccgctgggaaaccgcagggtcctccaccccctcctcagggaggccgtccaccccgtcccgcgcaggggcaacagccccctcaatag

SEQ ID NO: 131385 - protein, 710 aa, Artificial Sequence
  derived and/or modified sequence
MLSLQYPDVYRDETAVQDYHGHKICDPYAWLEDPDSEQTKAFVEAQNKITVPFLEQCPIRGLYKERMTELYDYPKYSCHFKKGKRYFYFYNTGLQNQRVLYVQDSLEGEARVFLDPNILSDDGTVALRGYAFSEDGEYFAYGLSASGSDWVTIKFMKVDGAKELPDVLERVKFSCMAWTHDGKGMFYNSYPQQDGKSDGTETSTNLHQKLYYHVLGTDQSEDILCAEFPDEPKWMGGAELSDDGRYVLLSIREGCDPVNRLWYCDLQQESSGIAGILKWVKLIDNFEGEYDYVTNEGTVFTFKTNRQSPNYRVINIDFRDPEESKWKVLVPEHEKDVLEWIACVRSNFLVLCYLHDVKNILQLHDLTTGALLKTFPLDVGSIVGYSGQKKDTEIFYQFTSFLSPGIIYHCDLTKEELEPRVFREVTVKGIDASDYQTVQIFYPSKDGTKIPMFIVHKKGIKLDGSHPAFLYGYGGFNISITPNYSVSRLIFVRHMGGILAVANIRGGGEYGETWHKGGILANKQNCFDDFQCAAEYLIKEGYTSPKRLTINGGSNGGLLVAACANQRPDLFGCVIAQVGVMDMLKFHKYTIGHAWTTDYGCSDSKQHFEWLVKYSPLHNVKLPEADDIQYPSMLLLTADHDDRVVPLHSLKFIATLQYIVGRSRKQSNPLLIHVDTKAGHGAGKPTAKVIEEVSDMFAFIARCLNVDWIP

SEQ ID NO: 131386 - DNA, 2133 bp, Artificial Sequence
  derived and/or modified sequence
atgctctctttgcaatatccagacgtttacagagatgagactgcagtgcaggactatcacggccacaaaatatgtgacccatatgcttggctcgaagaccctgacagtgagcaaactaaggcttttgtcgaagctcagaataagatcactgtgccatttctggaacagtgtcctatccggggtctttataaagagcggatgaccgaactgtatgactatccgaagtactcatgtcacttcaagaagggcaaaaggtacttctatttttataacaccggtctgcagaatcaacgcgtactgtacgtacaggactcactcgagggggaggcaagggtgttcctagatccaaatattctgagcgacgatggcacagtcgccctcaggggctacgctttctcggaagatggagagtatttcgcttatggcttgtctgcctcaggcagcgactgggtgactatcaagtttatgaaagtggacggggcaaaggaactgcccgacgtgctggagagggtaaaattttcctgtatggcttggacacatgatgggaaaggcatgttttacaactcatatccccagcaggacgggaagtcagatggtacagagacctccacaaacttgcaccagaagctgtattaccatgtcctgggcactgatcagtcagaagacatactgtgcgctgaatttccagacgagccgaaatggatgggaggcgccgaattatcagatgatggaagatatgtgctgctgtcgattcgggaggggtgtgatccagtaaaccgcctatggtactgtgatttgcagcaggagagttcaggcatcgctggcatcctcaagtgggttaagctcatcgataacttcgaaggtgagtacgactatgtcacaaacgagggtaccgtcttcacctttaaaaccaaccggcaaagtccaaactacagagtcatcaatattgactttcgcgaccccgaggagtctaaatggaaggtgctggtccccgaacacgaaaaggacgtgctcgaatggattgcctgcgtgaggagcaactttctggtcctgtgctacctgcatgacgtcaagaacattctacagctgcacgatctgacaacgggagccctcctaaagaccttccctctggatgtgggctccatcgtggggtattcaggccagaaaaaagacacagagatcttttaccagttcacatcctttctgtcccccggtattatctaccactgcgatctgactaaggaggagctggaacccagagttttccgcgaagtcaccgtcaaaggcatcgacgcatccgactaccagacggtgcagattttttacccctctaaggacgggacaaagatccctatgttcattgtgcacaaaaagggcatcaaactggacggaagccaccctgcattcttatacgggtatggcgggttcaacattagcattaccccaaattattcagttagccgattgatctttgtcagacacatgggaggtatcctggccgtcgcaaacattcggggaggaggcgaatatggagagacatggcacaagggaggaattctagctaataaacagaactgcttcgatgacttccagtgcgccgccgagtacctgatcaaggagggatacaccagccccaaacgactgactatcaacggtgggtcgaatggtgggttgcttgtcgctgcctgcgccaaccagcgacccgatctgtttgggtgcgtgattgcacaggtcggcgttatggacatgctcaaattccacaagtatacaattggacatgcttggacaaccgattacggatgctccgatagcaagcagcactttgaatggcttgtgaagtacagccctttgcacaacgtgaagctgccagaagctgacgacatacagtatcctagcatgctactcctgacagcagatcacgacgaccgggtcgtacctcttcattccctaaagtttattgcaactttgcaatacatcgttgggcgctctagaaagcagagtaacccactccttatccatgtggacaccaaggccggacacggagccggaaagcccaccgctaaggtcatcgaggaggtgagtgatatgttcgcgtttatcgctagatgtttaaacgtagactggatcccttag

SEQ ID NO: 131387 - DNA, 2133 bp, Artificial Sequence
  derived and/or modified sequence
atgctgagcctgcagtacccagatgtgtacagagatgaaacagctgtgcaggactaccacggccacaagatctgtgacccctatgcctggctggaggaccctgacagcgagcagaccaaggcctttgtggaggcccagaacaagatcaccgtgcccttcctggagcagtgccccatccggggcctgtacaaggagaggatgacagagctgtatgactaccccaagtacagctgccacttcaagaagggcaagcgctacttctacttctacaacacaggcctgcagaaccagagggtgctgtatgtgcaggacagcctggagggggaggcccgggtcttcctggaccccaacatcctgagtgatgatggcaccgtggccctgcggggctacgccttctctgaagatggagagtactttgcctacggcctgagcgccagcggcagtgactgggtgaccatcaagttcatgaaggtggatggagccaaggagctgcctgatgtgctggagcgggtgaagttcagctgcatggcctggacccatgatggcaagggcatgttctacaacagctacccccagcaggacggcaagagtgatggaacagagaccagcaccaacctgcaccagaagctgtactaccacgtgctgggcacagaccagagcgaggacatcctgtgtgccgagttcccagatgagcccaagtggatgggcggcgctgagctgagtgatgatggccgctacgtgctgctgagcatccgggagggctgtgaccctgtgaaccggctgtggtactgtgacctgcagcaggagagcagcggcattgctggcatcctgaagtgggtgaagctgattgacaactttgaaggagaatatgactatgtgaccaatgaaggcaccgtcttcaccttcaagaccaaccggcagagccccaactacagagtcatcaacatcgacttccgggaccctgaggagagcaagtggaaggtgctggtgcctgagcacgagaaggatgtgctggagtggatcgcctgtgtgcgcagcaacttcctggtgctgtgctacctgcatgatgtgaagaacatcctgcagctgcatgacctgaccaccggggccctgctgaagaccttccccctggatgtgggcagcatcgtgggctacagcggccagaagaaggacacagagatcttctaccagttcaccagcttcctgagccctggcatcatctaccactgtgacctgaccaaggaggagctggagcccagggtcttccgggaggtgacagtgaagggcattgatgccagtgactaccagacagtgcagatcttctaccccagcaaggatggcaccaagatccccatgttcatcgtgcacaagaagggcatcaagctggatggcagccacccagccttcctgtatggctatggaggcttcaacatcagcatcacccccaactacagcgtgagccgcctcatctttgtgcgccacatgggcggcatcctggccgtggccaacatccggggcggcggggagtatggagagacctggcacaagggcggcatcctggccaacaagcagaactgctttgatgacttccagtgtgccgctgagtacctgatcaaggagggctacaccagccccaagaggctgaccatcaatggaggcagcaatggaggcctgctggtggccgcctgtgccaaccagaggccagacctgtttggctgtgtgattgcccaggtgggcgtgatggacatgctgaagttccacaagtacaccatcggccacgcctggaccacagattatggctgcagcgacagcaagcagcactttgagtggctggtgaagtacagccccctgcacaacgtgaagctgcctgaggctgatgacatccagtaccccagcatgctgctgctgacagctgaccatgatgacagagtggtgcccctgcacagcctgaagttcatcgccaccctgcagtacatcgtgggccgcagcaggaagcagagcaaccccctgctgattcatgtggacaccaaggccggccacggggccggcaagcccacagccaaggtgattgaggaggtgtctgacatgtttgccttcatcgcccgctgcctgaatgtggactggatcccctag

SEQ ID NO: 131388 - DNA, 2133 bp, Artificial Sequence
  derived and/or modified sequence
atgctgagcctgcagtaccccgacgtgtaccgggacgagaccgccgtgcaagactaccatggccacaaaatctgcgacccatacgcgtggctggaagatcccgactctgaacagaccaaggccttcgttgaggcccaaaataaaataacggtaccattcttggagcagtgccctattaggggtctgtataaggagaggatgacagaactgtacgactatccaaaatacagttgtcacttcaagaagggcaagaggtacttttacttctataatacaggtttgcagaatcagcgggtgttatatgtacaagattcactagagggcgaagccagggtattcctcgacccaaatatacttagcgatgatggtaccgtcgctcttagaggttatgcattttccgaggatggagagtacttcgcgtatgggcttagcgcttctggaagcgattgggtgacgattaaatttatgaaggtggacggagcgaaagagctgccagacgtgcttgagagagtaaagttcagttgcatggcatggactcatgacggcaagggaatgttttacaatagctacccccagcaggatggcaagtcggacggcaccgagacaagtaccaatctacatcagaagctgtactaccatgtgcttggaaccgatcagtccgaggacatcttgtgcgctgagtttcccgatgagcccaagtggatggggggggctgagctgtcagacgacggaagatatgtactgctgtctattagagagggttgtgatcccgtaaatcggctttggtactgtgatctgcagcaggaaagctcaggcattgccggcatcctgaagtgggtgaagctaatcgataatttcgaaggcgaatatgactatgtaaccaatgaagggacagtgtttacctttaaaactaaccggcaaagtcccaattatcgagtgattaatatagatttcagagatcccgaggagagcaagtggaaggttttggtccccgaacatgaaaaggatgttctcgagtggattgcgtgtgttcgatccaattttcttgtgctgtgctatctgcatgatgtgaagaacatcctgcagctgcacgacctgaccactggggctcttttgaaaaccttccccctggatgttggaagcatcgtcggatactccggccagaagaaggacacggaaatcttctaccagtttacaagtttcctgagccctggaattatctaccactgtgatctgacgaaagaagagttggagccacgagtctttcgcgaagtaacggtcaaaggaattgacgcttcggactatcagacagtgcagatcttttaccccagcaaggacgggactaagatccctatgttcattgttcataaaaaagggattaagctagacggcagccatcctgcttttttgtatggctacggtggtttcaatatatccattactcctaactattcggtcagccggctaatcttcgttagacacatggggggcattctcgctgtcgcaaatattcggggcggcggagagtatggagaaacctggcacaagggcggcatactagcaaacaagcagaattgcttcgacgacttccagtgtgcagccgagtatctcatcaaggaagggtacacgagccctaaacgcctaactatcaacggaggaagcaatggcggactgttggtggctgcgtgtgcaaatcagcggccagatctgtttggatgcgtgatagcccaggtgggcgtcatggacatgctcaagtttcacaaatacacaataggtcatgcatggaccaccgactatggatgttccgattctaagcagcactttgagtggcttgttaagtattctccactccataatgtcaaactgcccgaggcagatgatatccaatatccaagcatgttgttgctgacggctgatcatgacgatcgcgttgtgccactccatagcctaaaattcattgccacgctacagtacatcgtggggaggtcaagaaagcagtccaacccgctgctgatccatgtggacacgaaagctggacacggagccggcaagccgacagcaaaagtcatcgaagaggtctccgatatgtttgcgttcatcgctcgttgtctgaacgtggactggataccatag

SEQ ID NO: 131389 - DNA, 2133 bp, Artificial Sequence
  derived and/or modified sequence
atgctttcactccagtatccagacgtctaccgggacgagacagctgtccaggactatcatggccacaagatctgcgacccatacgcttggttggaggacccagattcagagcagaccaaagcattcgtcgaagcccagaacaagatcaccgttccttttcttgagcagtgccctattagagggttgtataaggagcggatgacagagctgtacgactatcctaagtatagctgccatttcaagaaggggaagaggtatttctacttctacaacactgggttgcagaaccagcgcgtcttatatgtacaggactcacttgagggtgaagcccgtgtctttctggatccaaacattctgtctgatgacggcacagtcgccctcagagggtacgctttttcggaggatggcgagtattttgcctatggcctcagcgccagtggttcggattgggtgaccatcaagttcatgaaggtggatggagccaaggagctgcctgacgtcctagaacgagttaaattctcatgcatggcatggacccacgacggaaaaggcatgttctacaatagctaccctcagcaagatggcaaatcagatggaacagagacttctacaaatctgcatcagaagctgtactatcacgtcctcggaaccgatcaaagcgaagatatcctgtgtgctgagttcccagatgagccaaagtggatggggggagccgagttatctgacgacgggagatatgtccttctgtcgattcgcgaggggtgtgacccggtcaataggttgtggtactgcgatctgcagcaggagagctcgggaatcgcaggtatcctgaaatgggtgaaactgatcgataatttcgaaggcgaatatgattacgtcacaaatgaggggactgtgttcacgtttaagactaataggcagtcgcctaactaccgagtgatcaatattgacttcagagatcccgaggaatctaagtggaaggtgttggtccccgaacatgagaaagacgtgctcgaatggatcgcctgtgttaggtcaaatttcctagtcttgtgctatctgcacgatgtgaagaatatcctgcagcttcacgatttgaccaccggcgctctgttaaaaacatttcctctggacgtcggctctatcgtaggatacagcgggcagaagaaagacacagaaattttctatcaattcacctctttcctgtcccccggaattatctatcattgcgacctgacgaaagaggagctcgagccaagagtgtttcgcgaagtcacagttaaagggatcgacgcttctgactaccagaccgttcagatattttacccctctaaggatgggaccaaaatacctatgttcatcgtacacaaaaagggtatcaaactggatggatcccatcctgcctttctgtatggatatggaggctttaacatctctattacgcccaactactctgtcagcagactgatcttcgtcagacatatgggcggaatccttgcggtggccaatattaggggtggcggtgaatatggggagacctggcacaaaggtgggatcctggccaacaaacagaattgcttcgacgacttccagtgcgcggcagagtatttaattaaggaaggctacacaagccctaagcgtctgacaattaatggcggtagcaacggcggactgctagtggccgcttgtgcaaatcaaaggccagaccttttcggctgtgtgatcgcacaggtcggtgtgatggacatgctcaagtttcataaatacacaattgggcatgcatggaccaccgactatggatgctctgattccaaacagcactttgagtggctggtaaaatactccccactgcacaatgtcaaacttcctgaggcagacgacatccagtacccttctatgctgctgctcaccgccgatcacgacgatagggtggttcctctgcatagcctcaagttcattgccacactgcagtacattgtggggagatctcgtaagcagagtaatcctctcttaatccatgttgacaccaaagccggacatggcgcaggaaaaccaaccgcaaaagtgattgaagaggtttccgatatgtttgccttcatcgcacgctgcctgaatgtggactggatcccctag

SEQ ID NO: 131390 - DNA, 2905 bp, Artificial Sequence
  derived and/or modified sequence
ctgctttctgcacgtcctcgccgccgcgccgccagtccgtttgtgctagctctggccgtgagccggccgcccgctgccgccggccgccccgcagctgcctgcgccccagccgcgcctcgcggccagcccggctagctcaggtccgctcccggagcccgcgcccctccacgctgccccctgcctgtccccggccatgctgtcccttcagtaccccgacgtgtaccgcgacgagaccgccgtacaggattatcatggtcataaaatttgtgacccttacgcctggcttgaagaccccgacagtgaacagactaaggcctttgtggaggcccagaataagattactgtgccatttcttgagcagtgtcccatcagaggtttatacaaagagagaatgactgaactatatgattatcccaagtatagttgccacttcaagaaaggaaaacggtatttttatttttacaatacaggtttgcagaaccagcgagtattatatgtacaggattccttagagggtgaggccagagtgttcctggaccccaacatactgtctgacgatggcacagtggcactccgaggttatgcgttcagcgaagatggtgaatattttgcctatggtctgagtgccagtggctcagactgggtgacaatcaagttcatgaaagttgatggtgccaaagagcttccagatgtgcttgaaagagtcaagttcagctgtatggcctggacccatgatgggaagggaatgttctacaactcataccctcaacaggatggaaaaagtgatggcacagagacatctaccaatctccaccaaaagctctactaccatgtcttgggaaccgatcagtcagaagatattttgtgtgctgagtttcctgatgaacctaaatggatgggtggagctgagttatctgatgatggccgctatgtcttgttatcaataagggaaggatgtgatccagtaaaccgactctggtactgtgacctacagcaggaatccagtggcatcgcgggaatcctgaagtgggtaaaactgattgacaactttgaaggggaatatgactacgtgaccaatgaggggacggtgttcacattcaagacgaatcgccagtctcccaactatcgcgtgatcaacattgacttcagggatcctgaagagtctaagtggaaagtacttgttcctgagcatgagaaagatgtcttagaatggatagcttgtgtcaggtccaacttcttggtcttatgctacctccatgacgtcaagaacattctgcagctccatgacctgactactggtgctctccttaagaccttcccgctcgatgtcggcagcattgtagggtacagcggtcagaagaaggacactgaaatcttctatcagtttacttcctttttatctccaggtatcatttatcactgtgatcttaccaaagaggagctggagccaagagttttccgagaggtgaccgtaaaaggaattgatgcttctgattaccagacagtccagattttctaccctagcaaggatggtacgaagattccaatgttcattgtgcataaaaaaggcataaaattggatggctctcatccagctttcttatatggctatggcggcttcaacatatccatcacacccaactacagtgtttccaggcttatttttgtgagacacatgggtggtatcctggcagtggccaacatcagaggaggtggcgaatatggagagacgtggcataaaggtggtatcttggccaacaaacaaaactgctttgatgactttcagtgtgctgctgagtatctgatcaaggaaggttacacatctcccaagaggctgactattaatggaggttcaaatggaggcctcttagtggctgcttgtgcaaatcagagacctgacctctttggttgtgttattgcccaagttggagtaatggacatgctgaagtttcataaatataccatcggccatgcttggaccactgattatgggtgctcggacagcaaacaacactttgaatggcttgtcaaatactctccattgcataatgtgaagttaccagaagcagatgacatccagtacccgtccatgctgctcctcactgctgaccatgatgaccgcgtggtcccgcttcactccctgaagttcattgccacccttcagtacatcgtgggccgcagcaggaagcaaagcaaccccctgcttatccacgtggacaccaaggcgggccacggggcggggaagcccacagccaaagtgatagaggaagtctcagacatgtttgcgttcatcgcgcggtgcctgaacgtcgactggattccataaacagttttcgtgcttcctcctgacagcgacagaaaacctcaagggctttcccacgttgacaccaagaaaccactgggcataatgcttccccacgggaacattattcctgcactcacaggctacagttgaacagaactgccgtgggaattttatcttttttaggcttctcctttttagcaaggccttggtgtttctttttccaccctgtctaggcacatgtggttttttggtgttttttttaagggcatgttgggataaatagctaaatggcaacaaacacattgtgaatattagattgctgaattaaggatcatagtcgggcatacttatctatatccataacctctatatctttaaataaatgtgagaactgttctcatggagaagacttctttgcaacaataataaatgttatttaagaatgacaggcttttacttccggtttcttcatattgaggggcaactccagaagtggagttttctgtgagaataaagcatttcacctttctgcaacaagttagttttcaagcagttaagtcatagaatgtttgttagctttgaaaataagttgttcatcca

SEQ ID NO: 131391 - DNA, 2133 bp, Artificial Sequence
  derived and/or modified sequence
atgctgagcctgcagtaccccgacgtgtacagagacgagaccgccgtgcaggactaccacggccacaagatctgcgacccctacgcctggctggaggaccccgacagcgagcagaccaaggccttcgtggaggcccagaacaagatcaccgtgcccttcctggagcagtgccccatcagaggcctgtacaaggagagaatgaccgagctgtacgactaccccaagtacagctgccacttcaagaagggcaagagatacttctacttctacaacaccggcctgcagaaccagagagtgctgtacgtgcaggacagcctggagggcgaggccagagtgttcctggaccccaacatcctgagcgacgacggcaccgtggccctgagaggctacgccttcagcgaggacggcgagtacttcgcctacggcctgagcgccagcggcagcgactgggtgaccatcaagttcatgaaggtggacggcgccaaggagctgcccgacgtgctggagagagtgaagttcagctgcatggcctggacccacgacggcaagggcatgttctacaacagctacccccagcaggacggcaagagcgacggcaccgagaccagcaccaacctgcaccagaagctgtactaccacgtgctgggcaccgaccagagcgaggacatcctgtgcgccgagttccccgacgagcccaagtggatgggcggcgccgagctgagcgacgacggcagatacgtgctgctgagcatcagagagggctgcgaccccgtgaacagactgtggtactgcgacctgcagcaggagagcagcggcatcgccggcatcctgaagtgggtgaagctgatcgacaacttcgagggcgagtacgactacgtgaccaacgagggcaccgtgttcaccttcaagaccaacagacagagccccaactacagagtgatcaacatcgacttcagagaccccgaggagagcaagtggaaggtgctggtgcccgagcacgagaaggacgtgctggagtggatcgcctgcgtgagaagcaacttcctggtgctgtgctacctgcacgacgtgaagaacatcctgcagctgcacgacctgaccaccggcgccctgctgaagaccttccccctggacgtgggcagcatcgtgggctacagcggccagaagaaggacaccgagatcttctaccagttcaccagcttcctgagccccggcatcatctaccactgcgacctgaccaaggaggagctggagcccagagtgttcagagaggtgaccgtgaagggcatcgacgccagcgactaccagaccgtgcagatcttctaccccagcaaggacggcaccaagatccccatgttcatcgtgcacaagaagggcatcaagctggacggcagccaccccgccttcctgtacggctacggcggcttcaacatcagcatcacccccaactacagcgtgagcagactgatcttcgtgagacacatgggcggcatcctggccgtggccaacatcagaggcggcggcgagtacggcgagacctggcacaagggcggcatcctggccaacaagcagaactgcttcgacgacttccagtgcgccgccgagtacctgatcaaggagggctacaccagccccaagagactgaccatcaacggcggcagcaacggcggcctgctggtggccgcctgcgccaaccagagacccgacctgttcggctgcgtgatcgcccaggtgggcgtgatggacatgctgaagttccacaagtacaccatcggccacgcctggaccaccgactacggctgcagcgacagcaagcagcacttcgagtggctggtgaagtacagccccctgcacaacgtgaagctgcccgaggccgacgacatccagtaccccagcatgctgctgctgaccgccgaccacgacgacagagtggtgcccctgcacagcctgaagttcatcgccaccctgcagtacatcgtgggcagaagcagaaagcagagcaaccccctgctgatccacgtggacaccaaggccggccacggcgccggcaagcccaccgccaaggtgatcgaggaggtgagcgacatgttcgccttcatcgccagatgcctgaacgtggactggatcccctag

SEQ ID NO: 131392 - protein, 158 aa, Artificial Sequence
  derived and/or modified sequence
MMQKLLKCSRLVLALALILVLESSVQGYPTRRARYQWVRCNPDSNSANCLEEKGPMFELLPGESNKIPRLRTDLFPKTRIQDLNRIFPLSEDYSGSGFGSGSGSGSGSGSGFLTEMEQDYQLVDESDAFHDNLRSLDRNLPSDSQDLGQHGLEEDFML

SEQ ID NO: 131393 - DNA, 477 bp, Artificial Sequence
  derived and/or modified sequence
atgatgcaaaagttgctgaagtgcagccgattggtgctggctcttgcgctaattttagttctggagtccagcgttcagggttaccccacacggagagcacggtaccagtgggtaaggtgcaatcctgatagtaactctgctaactgcctggaagaaaaggggcccatgttcgagctactgcctggcgaaagcaacaagattcctaggctgcggacggatctttttcccaaaacacgaattcaggacctgaacaggattttcccattgtcagaggattacagtggctcgggctttggtagcgggtcaggttcagggagtggttccggcagcggcttcctgaccgagatggagcaggactaccagctcgtggacgagtccgacgctttccacgataatctgcgctcactggatagaaatctaccttctgatagccaagatctcgggcagcacggccttgaagaggattttatgttatag

SEQ ID NO: 131394 - DNA, 477 bp, Artificial Sequence
  derived and/or modified sequence
atgatgcagaagctgctgaagtgcagccggctggtgctggccctggccctgatcctggtgctggagagctctgtgcagggctaccccacccggcgggcccgctaccagtgggtgcgctgcaacccagacagcaacagcgccaactgcctggaggagaagggccccatgtttgagctgctgcctggagagagcaacaagatcccccggctgaggacagacctcttccccaagacccgcatccaggacctgaaccgcatcttccccctgtctgaggactacagcggcagcggcttcggcagcggcagcggcagcggcagcggcagcggcagcggcttcctgacagagatggagcaggactaccagctggtggatgaaagtgatgccttccatgacaacctgcggagcctggacaggaacctgcccagcgacagccaggacctgggccagcacggcctggaggaggacttcatgctgtag

SEQ ID NO: 131395 - DNA, 477 bp, Artificial Sequence
  derived and/or modified sequence
atgatgcagaagctgctgaagtgcagccggctggtgctggccctggccctgatcctggtgttggagagttcggtgcagggttacccgacccggcgcgcacgctatcaatgggtgagatgtaatccggacagcaattctgccaactgcctggaggagaagggccctatgttcgagctactccctggcgagagcaataagatccctagactgcggaccgaccttttcccaaagacccgaattcaggacctcaatcggatctttcccctctccgaggactactcaggtagtggcttcggatccggatccggttctggctctggctccggatctggctttctcactgagatggagcaggattaccagctggtcgacgaatctgacgcgtttcatgacaacctgcgctccttggataggaacctacccagtgacagtcaagatctcgggcagcacggcttagaggaagacttcatgctgtag

SEQ ID NO: 131396 - DNA, 477 bp, Artificial Sequence
  derived and/or modified sequence
atgatgcagaagctgcttaagtgctcaaggctcgtactggcattggctctgatacttgtgctagaatcttctgtgcagggctatcctaccagaagagcacggtatcagtgggtcaggtgcaacccagattctaatagtgccaactgcctggaggagaagggacctatgttcgagctattacctggagaatccaacaagatcccgaggctgcgcaccgacctctttccaaagacccggatacaggacttgaacagaatctttccgttaagtgaagattactccggttccggcttcggtagcggctccggcagtgggagtggatccggaagtggctttctgacggaaatggagcaagattatcagttggtggatgagtccgacgccttccacgataatctgaggagccttgaccggaatctcccgagcgactcacaagacctgggccagcacgggctggaagaggactttatgctctag

SEQ ID NO: 131397 - DNA, 1208 bp, Artificial Sequence
  derived and/or modified sequence
gaagttggcgtgcagctgggagagctagactaagttggtcatgatgcagaagctactcaaatgcagtcggcttgtcctggctcttgccctcatcctggttctggaatcctcagttcaaggttatcctacgcggagagccaggtaccaatgggtgcgctgcaatccagacagtaattctgcaaactgccttgaagaaaaaggaccaatgttcgaactacttccaggtgaatccaacaagatcccccgtctgaggactgacctttttccaaagacgagaatccaggacttgaatcgtatcttcccactttctgaggactactctggatcaggcttcggctccggctccggctctggatcaggatctgggagtggcttcctaacggaaatggaacaggattaccaactagtagacgaaagtgatgctttccatgacaaccttaggtctcttgacaggaatctgccctcagacagccaggacttgggtcaacatggattagaagaggattttatgttataaaagaggattttcccaccttgacaccaggcaatgtagttagcatattttatgtaccatggttatatgattaatcttgggacaaagaattttatagaaatttttaaacatctgaaaaagaagcttaagttttatcatccttttttttctcatgaattcttaaaggattatgctttaatgctgttatctattttattgttcttgaaaatacctgcattttttggtatcatgttcaaccaacatcattatgaaattaattagattcccatggccataaaatggctttaaagaatatatatatatttttaaagtagcttgagaagcaaattggcaggtaatatttcatacctaaattaagactctgacttggattgtgaattataatgatatgccccttttcttataaaaacaaaaaaaaaaataatgaaacacagtgaatttgtagagtgggggtatttgacatattttacagggtggagtgtactatatactattacctttgaatgtgtttgcagagctagtggatgtgtttgtctacaagtatgattgctgttacataacaccccaaattaactcccaaattaaaacacagttgtgctgtcaatacctcatactgctttacctttttttcctggatatctgtgtattttcaaatgttactatatattaaagcagaaatataaccaaaggttaa

SEQ ID NO: 131398 - DNA, 477 bp, Artificial Sequence
  derived and/or modified sequence
atgatgcagaagctgctgaagtgcagcagactggtgctggccctggccctgatcctggtgctggagagcagcgtgcagggctaccccaccagaagagccagataccagtgggtgagatgcaaccccgacagcaacagcgccaactgcctggaggagaagggccccatgttcgagctgctgcccggcgagagcaacaagatccccagactgagaaccgacctgttccccaagaccagaatccaggacctgaacagaatcttccccctgagcgaggactacagcggcagcggcttcggcagcggcagcggcagcggcagcggcagcggcagcggcttcctgaccgagatggagcaggactaccagctggtggacgagagcgacgccttccacgacaacctgagaagcctggacagaaacctgcccagcgacagccaggacctgggccagcacggcctggaggaggacttcatgctgtag

SEQ ID NO: 131399 - protein, 270 aa, Artificial Sequence
  derived and/or modified sequence
MQYPHPGPAAGAVGVPLYAPTPLLQPAHPTPFYIEDILGRGPAAPTPAPTLPSPNSSFTSLVSPYRTPVYEPTPIHPAFSHHSAAALAAAYGPGGFGGPLYPFPRTVNDYTHALLRHDPLGKPLLWSPFLQRPLHKRKGGQVRFSNDQTIELEKKFETQKYLSPPERKRLAKMLQLSERQVKTWFQNRRAKWRRLKQENPQSNKKEELESLDSSCDQRQDLPSEQNKGASLDSSQCSPSPASQEDLESEISEDSDQEVDIEGDKSYFNAG

SEQ ID NO: 131400 - DNA, 1772 bp, Artificial Sequence
  derived and/or modified sequence
ggataaatgtagcgccgcggcgcgggccagcagctctgcgaggggccggagcgcggcggagccatgcagtacccgcaccccgggccggcggcgggcgccgtgggggtgccgctgtacgcgcccacgccgctgctgcaacccgcacacccgacgcccttttacatcgaggacatcctgggccgcgggcccgccgcgcccacgcccgcccccacgctgccgtcccccaactcctccttcaccagcctcgtgtccccctaccggaccccggtgtacgagcccacgccgatccatccagccttctcgcaccactccgccgccgcgctggccgctgcctacggacccggcggcttcgggggccctctgtaccccttcccgcggacggtgaacgactacacgcacgccctgctccgccacgaccccctgggcaaacctctactctggagccccttcttgcagaggcctctgcataaaaggaaaggcggccaggtgagattctccaacgaccagaccatcgagctggagaagaaattcgagacgcagaaatatctctctccgcccgagaggaagcgtctggccaagatgctgcagctcagcgagagacaggtcaaaacctggtttcagaatcgacgcgctaaatggaggagactaaaacaggagaaccctcaaagcaataaaaaagaagaactggaaagtttggacagttcctgtgatcagaggcaagatttgcccagtgaacagaataaaggtgcttctttggatagctctcaatgttcgccctcccctgcctcccaggaagaccttgaatcagagatttcagaggattctgatcaggaagtggacattgagggcgataaaagctattttaatgctggatgatgaccactggcattggcatgttcagaaaactggatttaggaataatgttttgctacagaaaatcttcatagaagaactggaaggctatataagaaagggaatcaattctctggtattctggaaacctaaaaatatttggtgcactgctcaattaacaaacctacatggagaccttaattttgacttaacaaatagtttatgtactgctcttaggttgttttgataaagtgacattatagtgattaaattcttccccctttaaaaaaacagttagtggttttcactatttataaaaaattaattttgaactttttgttaaatttttaagttatagctttaaaggttttaataggaccttcttgaacgacttttctgtaatctgtttatctcccacttaatggaaaggcaaaggggtaccccaaatccagaggtgcctacatttcaggcagccttggagtattttaaaaggaaaacattctttacttttatatgacattcttatactgctgtctcaaatccaaaaacatttcagagctcttgtctcagagatgtgtgttctttttgtcagagatatggttgatgagaatcttaaatgcttgttttgcactatcacttagtacctgtttgaccaaggtgttaaggggatagtacctcccaattcaagcagagaaactgacctgactaaagttaatcgcagatgaactagaagtcacaggttaattaaatgtaagtagattgtagatactgttttatatcaaacaatgtttataatgtgtatatagaattgttcactgtaaaaaaaatggccaaaatgtgttttttttttaataagtaacttgactataaaataaagccgtccgtgggacgactgacctcgttgcaaaaaaaaaaaaaaa

SEQ ID NO: 131401 - DNA, 813 bp, Artificial Sequence
  derived and/or modified sequence
atgcagtacccgcacccaggacccgctgcaggtgctgtgggtgtgcccctctacgccccaactcctctgcttcagcctgcccatcctacgcctttctatattgaagacatcctgggaaggggaccagcagcccctaccccggcacccaccctgccttcaccgaacagttcattcaccagcctcgtttccccataccgcactccagtctatgaacctactccaatacaccccgctttctcgcatcattccgcagccgctctagctgccgcttatggccctgggggctttggcgggcccttgtacccttttccacggactgtgaatgactatacacatgctctactgagacatgatccccttgggaagccactgttgtggtccccatttcttcagagacctctgcacaaacgcaaaggaggccaggtccggttcagcaatgaccaaaccatcgaactggagaagaagttcgagacacagaaatatctttctccccccgagcgtaaaagattggccaaaatgctccagctctctgagcggcaggttaagacatggttccaaaatagaagggccaagtggaggcgattaaagcaagaaaatccccaatctaataagaaagaggagctcgagagccttgattcttcctgtgaccaaagacaagacttgcctagcgaacagaataaaggggcaagcctagactcatctcagtgtagccccagccctgccagtcaggaagacctcgaatccgaaatttccgaagactccgaccaggaagtggatattgagggcgataagagctactttaatgcgggatag

SEQ ID NO: 131402 - DNA, 3490 bp, Artificial Sequence
  derived and/or modified sequence
caatgttcgttatccttccagagatagtttatatcatggagtaatataaaaatttatgatttatatgtactgtataatagagcaattatattcttacctacccccaacatgctttaactcgaatgatagtgtagtacacttctgagtttgtctgggcttgtagctcttgtctgtcattagattctgaaagatacctattaacaataccctaaaaagatcaggagcctttaggccaagtctcaaacgtttcagatgagaaaaactcagggatggtgacttgacggaagttgcattaactaacaacgctcacatgctattctccggacttggaatgtccaagcaccctgggcttgctgacacccactcacttttcaaacatcaattcttgggaagcttttcccttccttaatgtcccccagataggtgatgtccccttgttacaggttttagaccattatgtacatctccttcctagcacatacatatattaaaatttgtttcctgtctccatgaggagagggactacatctgtccttttcactgctggcacacagtagttgctcaacaaaaatgtgcgaagtgaaactcgaacaggcggtcaggctcacagtccacgcctcttcctactgtggtcccgctgtgtttggacaaatagttccaaattataaactttaaaacctgagaagtctcaatagaaaaagcagggaagtctttccatttccatgattaatggaggaccttagcagaaacggctcaccgcgaggtgtgacgaccgcaggagggcgtcaatcaagaaaatgcccccttgccccggaggcgagtggagccgcacagagccgaggccatacgggccagcagtacggactgcttcaatagaaaacacgtgcaaaaccagagagccagactgcgcacagctgcgaccctcaagagccagcagaaaagacacggagcggcccccactggattgaagactgcacagcctctgcccggcgctgtaggacccgggcctccccttgattgctgctcgcagcggcttctgccagcatcctcgcggaagtggcttgagtccgaggcctccaaatgaaaccaggtggagcggccaagagtccgcagcacctgaactccagccatccgaatcccgccgggccgcagctaagggccgccgagcagccctaggaacccagggcactgtcccgctctgagctcgggaaacggccggtgtgacagccagcgccactgttaatccagggagcgcacccaccgaggaggcgtcttaggccagcggcctctgctcccgccgagtcccgctgctccccgcctggaaacagctgctgccaccccgggcccaggcctggacggcgcccccgaatttcggcagaggtgcctcggggccgcggacagggccgctggagcccgcactccagaaggcggtcttcctcgcgcctcccccgacggacgcggcccagggcttccctcgagggcgtcctcggccggggtgcctggagtccccaggggcgacagccgcggcggggcaccagggcgccagttccccggagcctggtagcaagcgcgtcccgggggcggggagcttggccggcggggcgggccggggtgggggcgggcggctgctcttggggccccgcgccattggccgcagggcccggcggcaggaaggggccagcgagcgcggccccaccccgcggccggcggagcctatcgccgggagcgcggagcgcggataaatgtagcgccgcggcgcgggccagcagctctgcgaggggccggagcgcggcggagccatgcagtacccgcaccccgggccggcggcgggcgccgtgggggtgccgctgtacgcgcccacgccgctgctgcaacccgcacacccgacgcccttttacatcgaggacatcctgggccgcgggcccgccgcgcccacgcccgcccccacgctgccgtcccccaactcctccttcaccagcctcgtgtccccctaccggaccccggtgtacgagcccacgccgatccatccagccttctcgcaccactccgccgccgcgctggccgctgcctacggacccggcggcttcgggggccctctgtaccccttcccgcggacggtgaacgactacacgcacgccctgctccgccacgaccccctgggcaaacctctactctggagccccttcttgcagaggcctctgcataaaaggaaaggcggccaggtgagattctccaacgaccagaccatcgagctggagaagaaattcgagacgcagaaatatctctctccgcccgagaggaagcgtctggccaagatgctgcagctcagcgagagacaggtcaaaacctggtttcagaatcgacgcgctaaatggaggagactaaaacaggagaaccctcaaagcaataaaaaagaagaactggaaagtttggacagttcctgtgatcagaggcaagatttgcccagtgaacagaataaaggtgcttctttggatagctctcaatgttcgccctcccctgcctcccaggaagaccttgaatcagagatttcagaggattctgatcaggaagtggacattgagggcgataaaagctattttaatgctggatgatgaccactggcattggcatgttcagaaaactggatttaggaataatgttttgctacagaaaatcttcatagaagaactggaaggctatataagaaagggaatcaattctctggtattctggaaacctaaaaatatttggtgcactgctcaattaacaaacctacatggagaccttaattttgacttaacaaatagtttatgtactgctcttaggttgttttgataaagtgacattatagtgattaaattcttccccctttaaaaaaacagttagtggttttcactatttataaaaaattaattttgaactttttgttaaatttttaagttatagctttaaaggttttaataggaccttcttgaacgacttttctgtaatctgtttatctcccacttaatggaaaggcaaaggggtaccccaaatccagaggtgcctacatttcaggcagccttggagtattttaaaaggaaaacattctttacttttatatgacattcttatactgctgtctcaaatccaaaaacatttcagagctcttgtctcagagatgtgtgttctttttgtcagagatatggttgatgagaatcttaaatgcttgttttgcactatcacttagtacctgtttgaccaaggtgttaaggggatagtacctcccaattcaagcagagaaactgacctgactaaagttaatcgcagatgaactagaagtcacaggttaattaaatgtaagtagattgtagatactgttttatatcaaacaatgtttataatgtgtatatagaattgttcactgtaaaaaaaatggccaaaatgtgttttttttttaataagtaacttgactataaaataaagccgtccgtgggacgactgacctcgt

SEQ ID NO: 131403 - DNA, 813 bp, Artificial Sequence
  derived and/or modified sequence
atgcagtacccccaccctggccctgctgctggagctgtgggcgtgcccctgtatgcccccacccccctgctgcagcctgcccaccccacccccttctacatcgaggacatcctgggccggggccctgctgcccccaccccagcccccaccctgcccagccccaacagcagcttcaccagcctggtgagcccctaccgcacccctgtgtatgagcccacccccatccacccagccttcagccaccacagcgctgctgccctggccgccgcctacggccctgggggctttggaggccccctgtaccccttccccaggacagtgaatgactacacccacgccctgctgcggcatgaccccctgggcaagcccctgctgtggagccccttcctgcagaggcccctgcacaagaggaagggcggccaggtgcgcttcagcaatgaccagaccatcgagctggagaagaagtttgagacccagaagtacctgagccccccagagaggaagaggctggccaagatgctgcagctgtctgagcggcaggtgaagacctggttccagaacagaagagccaagtggaggcggctgaagcaggagaacccccagagcaacaagaaggaggagctggagagcctggacagcagctgtgaccagaggcaggacctgcccagcgagcagaacaagggggccagcctggacagcagccagtgcagccccagccctgccagccaggaggacctggagagcgagatcagcgaggacagcgaccaggaggtggacatcgagggggacaagagctacttcaatgccggctag

SEQ ID NO: 131404 - DNA, 813 bp, Artificial Sequence
  derived and/or modified sequence
atgcagtacccccaccccggccccgccgccggcgccgtgggcgtgcccttatacgcacctactccccttctacagccagcccatcctacccccttctacattgaggatatcctcggacggggccctgctgcccctacccccgctcccacgctccccagccccaactcctcgttcacatctctggtaagtccatatagaactcctgtgtatgagccaacgccaatccaccctgcattctcacatcattccgccgcggcattagccgctgcatatggtcccggcggattcggtgggccactgtaccctttcccaaggaccgttaatgattatactcatgcactactgaggcatgaccctcttggtaagccgctcctgtggtccccatttctacagcggccactccataaacggaagggcggacaggtccgattctccaacgatcaaacgatagagctggagaagaagttcgaaacacagaaatatctttcaccccctgagaggaagagacttgctaagatgctgcagctctccgagcgtcaagtgaaaacttggtttcaaaatagacgagccaaatggcgcagactgaaacaggaaaatccccagagtaataaaaaagaagagctagaatctctcgattcatcctgcgatcagcgccaggatcttccctcggaacaaaataagggcgcttctctggactcatctcagtgtagccccagccccgctagccaggaagatctcgaaagcgagattagtgaggactctgaccaggaggtcgacatcgaaggtgataaaagctactttaatgcagggtag

SEQ ID NO: 131405 - DNA, 813 bp, Artificial Sequence
  derived and/or modified sequence
atgcagtacccccacccagggccagcagctggagcagtgggggttcccctctacgcaccaacccctcttctgcaaccagcccaccccacgcccttttacatagaagacatcctgggaaggggtcccgctgctcccacacccgctccaactctcccatcccccaatagctcattcacttctcttgtttcaccatacaggacccccgtgtatgagcctacccctattcaccccgctttcagccatcacagtgcggctgcattagccgctgcctatggtcctggcggatttgggggtcccctttacccttttcctcggacagtgaatgactacacgcacgccctgctgagacatgatcccctcggaaagccattgctgtggtctccatttctccagaggcctcttcataagcggaagggcggtcaggttagattctccaatgatcagacaattgagctagagaaaaaatttgagactcagaaatacctgtcccccccagagagaaagcgactggctaaaatgctccaactatcagagcgacaggtgaagacttggtttcagaatcgacgcgctaagtggcgccgactcaagcaggagaacccccagtccaataaaaaggaggaattagagagcctggattcttcttgtgaccaacgacaagatctgcctagcgaacagaacaagggcgcttccctggactccagccaatgcagtccaagccctgcaagccaggaggatctggagtccgaaatcagcgaagatagtgatcaggaggtggacatcgaaggggacaagtcgtactttaacgctgggtag

SEQ ID NO: 131406 - DNA, 813 bp, Artificial Sequence
  derived and/or modified sequence
atgcagtacccccaccccggccccgccgccggcgccgtgggcgtgcccctgtacgcccccacccccctgctgcagcccgcccaccccacccccttctacatcgaggacatcctgggcagaggccccgccgcccccacccccgcccccaccctgcccagccccaacagcagcttcaccagcctggtgagcccctacagaacccccgtgtacgagcccacccccatccaccccgccttcagccaccacagcgccgccgccctggccgccgcctacggccccggcggcttcggcggccccctgtaccccttccccagaaccgtgaacgactacacccacgccctgctgagacacgaccccctgggcaagcccctgctgtggagccccttcctgcagagacccctgcacaagagaaagggcggccaggtgagattcagcaacgaccagaccatcgagctggagaagaagttcgagacccagaagtacctgagcccccccgagagaaagagactggccaagatgctgcagctgagcgagagacaggtgaagacctggttccagaacagaagagccaagtggagaagactgaagcaggagaacccccagagcaacaagaaggaggagctggagagcctggacagcagctgcgaccagagacaggacctgcccagcgagcagaacaagggcgccagcctggacagcagccagtgcagccccagccccgccagccaggaggacctggagagcgagatcagcgaggacagcgaccaggaggtggacatcgagggcgacaagagctacttcaacgccggctag

SEQ ID NO: 131407 - protein, 351 aa, Artificial Sequence
  derived and/or modified sequence
MGNAAAAKKGSEQESVKEFLAKAKEDFLKKWESPAQNTAHLDQFERIKTLGTGSFGRVMLVKHKETGNHYAMKILDKQKVVKLKQIEHTLNEKRILQAVNFPFLVKLEFSFKDNSNLYMVMEYVPGGEMFSHLRRIGRFSEPHARFYAAQIVLTFEYLHSLDLIYRDLKPENLLIDQQGYIQVTDFGFAKRVKGRTWTLCGTPEYLAPEIILSKGYNKAVDWWALGVLIYEMAAGYPPFFADQPIQIYEKIVSGKVRFPSHFSSDLKDLLRNLLQVDLTKRFGNLKNGVNDIKNHKWFATTDWIAIYQRKVEAPFIPKFKGPGDTSNFDDYEEEEIRVSINEKCGKEFSEF

SEQ ID NO: 131408 - protein, 230 aa, Artificial Sequence
  derived and/or modified sequence
MLVKHKETGNHYAMKILDKQKVVKLKQIEHTLNEKRILQAVNFPFLVKLEFSFKDNSNLYMVMEYVPGGEMFSHLRRIGRFSEPHARFYAAQIVLTFEYLHSLDLIYRDLKPENLLIDQQGYIQVTDFGFAKRVKGRTWTLCGTPEYLAPEIILSKGYNKAVDWWALGVLIYEMAAGYPPFFADQPIQIYEKIVSGKVRSGCGDTALEETDRSLLTHPIPWGALLVVRII

SEQ ID NO: 131409 - DNA, 1056 bp, Artificial Sequence
  derived and/or modified sequence
atgggaaatgcagccgcggccaagaagggcagtgagcaggaaagtgtgaaggagtttcttgctaaagccaaggaagactttttgaagaagtgggagagccccgctcaaaatactgcccatcttgaccagtttgagcgcatcaagacattaggcacgggatcttttggccgtgtaatgctggtcaagcacaaggaaaccgggaaccattacgcaatgaagattctagacaaacagaaagtggtgaagctgaagcagatcgagcacacactgaacgaaaaaaggattctgcaggccgtgaattttccattcctggtgaaattagagttctcttttaaggataatagtaacctgtacatggtgatggaatacgtgcctggtggagaaatgtttagccatctgaggaggatcggacgcttttccgagccccatgctcgattttacgctgcacaaattgtgttgaccttcgagtatttacactcccttgacctgatctaccgggatctgaaacctgaaaacctcctgattgaccagcagggctatattcaagttacagacttcgggtttgcaaaaagggtgaaaggcaggacatggaccctctgcggaactccagagtatctagctccggagataattctgtcaaagggatacaacaaagcagtggactggtgggccctcggcgtgctcatttatgagatggcagctggatacccgccatttttcgccgatcagcctattcagatctatgaaaagatcgtgtcaggaaaggtgagattcccttcccatttttcaagcgacttaaaggatcttctgcgcaatctgctgcaggtcgatctgaccaaacggtttgggaacttaaaaaatggggtcaatgacattaagaaccacaagtggttcgctaccaccgattggatcgctatctaccagcgaaaggtggaagctcctttcattcctaagttcaaaggccccggtgacacttcaaatttcgacgactatgaagaggaggaaattcgagtgtccattaacgagaaatgcggaaaggaattttccgaattctag

SEQ ID NO: 131410 - DNA, 1056 bp, Artificial Sequence
  derived and/or modified sequence
atgggcaacgccgccgccgctaagaagggtagtgagcaggaatcagtgaaggagttcctcgccaaggccaaagaggactttctgaagaagtgggagagcccagcccagaataccgcacacctcgaccagttcgagagaataaaaacactcggtacagggtcctttggaagggtgatgctggttaagcataaggagactggcaatcactatgccatgaagattttggataagcaaaaggtggtcaaattgaagcagatcgagcacacgctcaatgagaagcgtatcctccaggccgtgaatttcccgttcctcgtgaaactggaattttctttcaaagacaattccaacctgtatatggtgatggagtacgtccctggaggcgagatgttctcccacctccggagaattggtaggttttctgagccccatgcaaggttttacgcggcccagattgtgttaacattcgagtacctacattcccttgacctgatttatcgggacttaaagccagagaacctgctcattgaccagcaaggttatatacaggtgacggatttcggctttgctaaacgcgtgaaggggagaacgtggacactctgcggaaccccggaatacctggctcccgagataatcctgtccaagggctataataaggctgtggattggtgggcgttaggcgtactgatctacgagatggctgccggttatcccccatttttcgcggaccaacctatccaaatctacgagaaaattgtgtcgggcaaagtgcggttccccagtcatttctcttccgatctcaaagatctcttgcgcaatcttctccaggttgatctcaccaaaagatttggaaatttgaagaatggcgttaatgatatcaagaatcacaagtggtttgctacaaccgactggattgccatttatcagagaaaggtggaagcccccttcattccaaaatttaaaggccctggggatactagtaacttcgacgactatgaagaggaggagattagagtctcaattaacgagaagtgcgggaaagagtttagcgaattctag

SEQ ID NO: 131411 - DNA, 1056 bp, Artificial Sequence
  derived and/or modified sequence
atgggaaatgctgctgctgccaagaagggcagcgagcaggagagcgtgaaggagttcctggccaaggccaaggaggacttcctgaagaagtgggagagccctgcccagaacacagcccacctggaccagtttgagcgcatcaagaccctgggcaccggcagctttggccgggtgatgctggtgaagcacaaggagaccggcaaccactacgccatgaagatcctggacaagcagaaggtggtgaagctgaagcagatcgagcacaccctgaatgagaagaggatcctgcaggccgtgaacttccccttcctggtgaagctggagttctccttcaaggacaacagcaacctgtacatggtgatggagtatgtgcctggaggagagatgttcagccacctgcggcgcatcggccgcttcagcgagccccacgcccgcttctacgccgcccagatcgtgctgacctttgagtacctgcacagcctggacctgatctacagagacctgaagccagagaacctgctgattgaccagcagggctacatccaggtgacagactttggatttgccaagagggtgaagggccgcacctggaccctgtgtggcaccccagagtacctggcccctgagatcatcctgagcaagggctacaacaaggctgtggactggtgggccctgggcgtgctgatctatgagatggccgccggctacccacccttctttgctgaccagcccatccagatctatgagaagatcgtgtctgggaaggtgcgcttccccagccacttcagcagtgacctgaaggacctgctgaggaacctgctgcaggtggacctgaccaagcgcttcggcaacctgaagaatggagtgaatgacatcaagaaccacaagtggtttgccaccacagactggatcgccatctaccagaggaaggtggaggcccccttcatccccaagttcaagggccctggggacaccagcaactttgatgattatgaggaggaggagatccgggtgtccatcaatgaaaaatgtgggaaggagttcagcgagttctag

SEQ ID NO: 131412 - DNA, 1056 bp, Artificial Sequence
  derived and/or modified sequence
atgggcaacgccgccgccgccaagaagggcagcgagcaggagagcgtgaaggaattccttgcgaaggccaaagaggacttcctaaagaaatgggagtctcccgcccagaacaccgctcatcttgaccaatttgaaagaattaaaacattaggtacagggtccttcgggagggtgatgttagtcaagcacaaagagactggaaaccactatgccatgaaaatcttagataagcagaaggttgttaagctgaagcagattgagcacactcttaacgagaagagaattctgcaggctgtgaactttcccttcttggtcaagctggagttcagcttcaaggataattcaaacttgtatatggtgatggaatatgtgcctggcggggagatgtttagtcacctgagacgcattggtaggttctcagagccccatgctcgcttttatgccgcccagattgttcttactttcgagtacctgcatagtctggatctgatctatagggatttaaagccagaaaacctcctcatagaccagcagggatatatacaggtgacggacttcgggttcgcgaagagggttaagggccggacctggacactatgcggcacccctgagtacctggccccggagattattctttctaaaggttataacaaagccgtggactggtgggctcttggggtgctcatctacgaaatggccgccggttatccccctttctttgcagatcagcccatccagatttacgaaaaaatcgtctccggaaaagtccggttcccttcccatttcagctcagacttgaaagatctgttgcgcaacctgctacaagtggacctcacaaaacggtttggtaacctcaaaaatggtgtgaacgacattaaaaatcacaaatggtttgccaccacagattggatcgccatttatcaaaggaaggttgaggcaccctttattccaaaattcaaagggcctggcgatacctcaaatttcgacgactacgaggaggaggagatccgggtcagcatcaatgaaaagtgtggaaaagaattcagtgaattctag

SEQ ID NO: 131413 - DNA, 1056 bp, Artificial Sequence
  derived and/or modified sequence
atgggcaacgccgccgccgccaagaagggcagcgagcaggagagcgttaaggagtttttagcaaaagcaaaggaggacttccttaaaaagtgggaaagccccgctcaaaataccgcacacttggatcagttcgaacgcattaagacactggggaccgggtctttcgggcgcgtcatgctggtgaagcataaagaaacagggaatcactacgccatgaaaatcctggataagcagaaagttgtgaagctcaagcaaatcgaacatacactgaacgagaagaggattttgcaggccgtcaattttccattcctggtaaagttagagttttcattcaaagataattcaaatctttatatggtgatggagtacgtgccgggcggtgagatgttctcgcatctgcggcgaataggcagatttagcgagcctcatgcacgcttttatgctgcccagatcgtgctgacatttgagtatttacactccctcgatttaatatatcgggacctgaaacccgaaaatctgcttatcgatcaacagggctatattcaggtgacagatttcggattcgccaagcgggtgaaaggccggacctggacattatgcgggaccccagaatacctggctcccgagatcatactctcaaaaggctataataaagccgtggactggtgggccctgggggtgctcatctatgaaatggccgcaggctacccgccatttttcgcagatcagccgatccagatctatgaaaaaatcgtgagtggtaaagtgcgcttcccaagccatttcagctccgatctgaaagatctactgcgcaatctactccaagtggacttgactaaaaggttcggcaacctcaagaatggtgttaatgacatcaagaatcacaagtggttcgctactactgattggattgccatttaccagcgcaaggtcgaggcccctttcattcctaaattcaaaggcccaggagacacatccaactttgatgactacgaagaagaggaaatccgcgtgagcattaatgagaagtgtggcaaggagttctcggagttctag

SEQ ID NO: 131414 - DNA, 1056 bp, Artificial Sequence
  derived and/or modified sequence
atgggaaatgcagccgctgcgaagaaggggtctgagcaggagagtgtcaaggagttcctggctaaggcaaaggaagactttctaaaaaagtgggagtctcctgcgcagaatacagcccacctggaccagttcgagcgtatcaaaacactggggacaggctcctttggacgggtgatgctcgttaagcacaaggaaactgggaaccactacgctatgaagatcttagataagcaaaaggtggttaagctgaagcagatcgagcataccctcaatgaaaaaagaatactgcaggccgtcaactttcccttccttgtgaagttggagttctctttcaaggacaatagtaatctgtatatggttatggagtatgtgcctggaggagagatgttctcccacctccgtcgcatcggtcgcttttccgaaccacacgccaggttttatgccgcacagattgtgctgactttcgagtacctccactcgctggacctgatctacagagatctcaagccagagaacctgctgattgatcagcaaggctacatccaggtgaccgatttcgggtttgcaaagcgcgtgaaaggtcgtacctggaccctctgcggaacgcccgaatatctggcgccagagattatactgtccaaaggatataacaaggccgtcgattggtgggctttgggcgtgttaatttatgagatggccgcaggctaccctccctttttcgccgatcaacctatccagatctatgagaaaatcgtgagcggaaaggtgcgtttcccaagtcacttcagcagcgatctgaaagatttgcttcggaacctgctccaggtggatctgacaaaaagattcggaaatctcaaaaatggagttaatgatatcaaaaaccataagtggtttgctaccactgactggattgccatttaccaaagaaaagtggaggccccatttatacccaagttcaagggcccaggtgatacctcaaacttcgacgactatgaagaggaggagatccgtgtcagcattaacgaaaaatgtggaaaagagtttagtgagttttag

SEQ ID NO: 131415 - DNA, 1056 bp, Artificial Sequence
  derived and/or modified sequence
atggggaacgcggcagcggctaaaaaaggctctgagcaggagtctgtgaaggaatttctggccaaagcaaaggaagacttcctcaagaagtgggagtctcccgctcagaacactgctcacttggaccagttcgagcgcattaaaaccctgggtaccggcagtttcgggagagtaatgctggtcaagcacaaagaaacagggaaccattatgccatgaaaatactggataagcagaaggttgtgaaactcaagcagattgagcacacccttaatgagaagagaatactgcaggccgtgaattttcctttcctggttaaacttgagttctcctttaaggacaacagtaacctatatatggtgatggaatatgtcccgggaggggagatgttcagtcatctgaggaggataggcagattcagcgaacctcacgccaggttttacgccgctcaaattgtgctgacatttgaatatctgcactctctcgacttgatttatcgtgacctgaaacctgagaacctgctgatcgaccagcagggatatattcaagtgaccgactttggcttcgcaaagcgggtgaaagggagaacttggactttgtgtggtactccagagtacttagctcctgaaatcattctttccaagggctacaataaagcggtcgactggtgggctctcggagtgctgatatacgaaatggccgctggctatccccctttctttgccgaccagccaatccagatttatgaaaagattgttagcgggaaagtgaggttcccatctcacttcagctctgatcttaaggaccttctgagaaacctcttacaggtggatctcacaaaacgttttggcaaccttaaaaatggcgtcaacgatataaagaaccacaagtggtttgctacaacagactggattgctatctatcagaggaaagtagaagctccattcatcccaaagtttaagggcccaggcgatacgagcaactttgacgattacgaagaagaagagatccgggtgtccatcaacgaaaaatgcggcaaagaatttagtgagttttag

SEQ ID NO: 131416 - DNA, 2671 bp, Artificial Sequence
  derived and/or modified sequence
gatcttgggctgaggttcccgggcgggcgggcgcggagagacgcgggaagcaggggctgggcgggggtcgcggcgccgcagctagcgcagccagcccgagggccgccgccgccgccgcccagcgcgctccggggccgccggccgcagccagcacccgccgcgccgcagctccgggaccggccccggccgccgccgccgcgatgggcaacgccgccgccgccaagaagggcagcgagcaggagagcgtgaaagaattcttagccaaagccaaagaagattttcttaaaaaatgggaaagtcccgctcagaacacagcccacttggatcagtttgaacgaatcaagaccctcggcacgggctccttcgggcgggtgatgctggtgaaacacaaggagaccgggaaccactatgccatgaagatcctcgacaaacagaaggtggtgaaactgaaacagatcgaacacaccctgaatgaaaagcgcatcctgcaagctgtcaactttccgttcctcgtcaaactcgagttctccttcaaggacaactcaaacttatacatggtcatggagtacgtgcccggcggggagatgttctcacacctacggcggatcggaaggttcagtgagccccatgcccgtttctacgcggcccagatcgtcctgacctttgagtatctgcactcgctggatctcatctacagggacctgaagccggagaatctgctcattgaccagcagggctacattcaggtgacagacttcggtttcgccaagcgcgtgaagggccgcacttggaccttgtgcggcacccctgagtacctggcccctgagattatcctgagcaaaggctacaacaaggccgtggactggtgggccctgggggttcttatctatgaaatggccgctggctacccgcccttcttcgcagaccagcccatccagatctatgagaagatcgtctctgggaaggtgcgcttcccttcccacttcagctctgacttgaaggacctgctgcggaacctcctgcaggtagatctcaccaagcgctttgggaacctcaagaatggggtcaacgatatcaagaaccacaagtggtttgccacaactgactggattgccatctaccagaggaaggtggaagctcccttcataccaaagtttaaaggccctggggatacgagtaactttgacgactatgaggaagaagaaatccgggtctccatcaatgagaagtgtggcaaggagttttctgagttttaggggcatgcctgtgcccccatgggttttcttttttcttttttcttttttttggtcgggggggtgggagggttggattgaacagccagagggccccagagttccttgcatctaatttcacccccaccccaccctccagggttagggggagcaggaagcccagataatcagagggacagaaacaccagctgctccccctcatccccttcaccctcctgccccctctcccacttttcccttcctctttccccacagccccccagcccctcagccctcccagcccacttctgcctgttttaaacgagtttctcaactccagtcagaccaggtcttgctggtgtatccagggacagggtatggaaagaggggctcacgcttaactccagcccccacccacacccccatcccacccaaccacaggccccacttgctaagggcaaatgaacgaagcgccaaccttcctttcggagtaatcctgcctgggaaggagagatttttagtgacatgttcagtgggttgcttgctagaatttttttaaaaaaacaacaatttaaaatcttatttaagttccaccagtgcctccctccctccttcctctactcccacccctcccatgtccccccattcctcaaatccattttaaagagaagcagactgactttggaaagggaggcgctggggtttgaacctccccgctgctaatctcccctgggcccctccccggggaatcctctctgccaatcctgcgagggtctaggcccctttaggaagcctccgctctctttttccccaacagacctgtcttcacccttgggctttgaaagccagacaaagcagctgcccctctccctgccaaagaggagtcatcccccaaaaagacagagggggagccccaagcccaagtctttcctcccagcagcgtttccccccaactccttaattttattctccgctagattttaacgtccagccttccctcagctgagtggggagggcatccctgcaaaagggaacagaagaggccaagtccccccaagccacggcccggggttcaaggctagagctgctggggaggggctgcctgttttactcacccaccagcttccgcctcccccatcctgggcgcccctcctccagcttagctgtcagctgtccatcacctctcccccactttctcatttgtgcttttttctctcgtaatagaaaagtggggagccgctggggagccaccccattcatccccgtatttccccctctcataacttctccccatcccaggaggagttctcaggcctggggtggggccccgggtgggtgcgggggcgattcaacctgtgtgctgcgaaggacgagacttcctcttgaacagtgtgctgttgtaaacatatttgaaaactattaccaataaagttttgttt

SEQ ID NO: 131417 - DNA, 1457 bp, Artificial Sequence
  derived and/or modified sequence
acagacagcggcagagatcttgggctgaggttcccgggcgggcgggcgcggagagacgcgggaagcagccgccgccgccgcgatgggcaacgccgccgccgccaagaagggcagcgagcaggagagcgtgaaagaattcttagccaaagccaaagaagattttcttaaaaaatgggaaagtcccgctcagaacacagcccacttggatcagtttgaacgaatcaagaccctcggcacgggctccttcgggcgggtgatgctggtgaaacacaaggagaccgggaaccactatgccatgaagatcctcgacaaacagaaggtggtgaaactgaaacagatcgaacacaccctgaatgaaaagcgcatcctgcaagctgtcaactttccgttcctcgtcaaactcgagttctccttcaaggacaactcaaacttatacatggtcatggagtacgtgcccggcggggagatgttctcacacctacggcggatcggaaggttcagtgagccccatgcccgtttctacgcggcccagatcgtcctgacctttgagtatctgcactcgctggatctcatctacagggacctgaagccggagaatctgctcattgaccagcagggctacattcaggtgacagacttcggtttcgccaagcgcgtgaagggccgcacttggaccttgtgcggcacccctgagtacctggcccctgagattatcctgagcaaaggctacaacaaggccgtggactggtgggccctgggggttcttatctatgaaatggccgctggctacccgcccttcttcgcagaccagcccatccagatctatgagaagatcgtctctgggaaggtgcgcttcccttcccacttcagctctgacttgaaggacctgctgcggaacctcctgcaggtagatctcaccaagcgctttgggaacctcaagaatggggtcaacgatatcaagaaccacaagtggtttgccacaactgactggattgccatctaccagaggaaggtggaagctcccttcataccaaagtttaaaggccctggggatacgagtaactttgacgactatgaggaagaagaaatccgggtctccatcaatgagaagtgtggcaaggagttttctgagttttaggggcatgcctgtgcccccatgggttttcttttttcttttttcttttttttggtcgggggggtgggagggttggattgaacagccagagggccccagagttccttgcatctaatttcacccccaccccaccctccagggttagggggagcaggaagcccagataatcagagggacagaaacaccagctgctccccctcatccccttcaccctcctgccccctctcccacttttcccttcctctttccccacagccccccagcccctcagccctcccagcccacttctgcctgttttaaacgagtttctcaactccagtca

SEQ ID NO: 131418 - DNA, 1056 bp, Artificial Sequence
  derived and/or modified sequence
atgggcaacgccgccgccgccaagaagggcagcgagcaggagagcgtgaaggagttcctggccaaggccaaggaggacttcctgaagaagtgggagagccccgcccagaacaccgcccacctggaccagttcgagagaatcaagaccctgggcaccggcagcttcggcagagtgatgctggtgaagcacaaggagaccggcaaccactacgccatgaagatcctggacaagcagaaggtggtgaagctgaagcagatcgagcacaccctgaacgagaagagaatcctgcaggccgtgaacttccccttcctggtgaagctggagttcagcttcaaggacaacagcaacctgtacatggtgatggagtacgtgcccggcggcgagatgttcagccacctgagaagaatcggcagattcagcgagccccacgccagattctacgccgcccagatcgtgctgaccttcgagtacctgcacagcctggacctgatctacagagacctgaagcccgagaacctgctgatcgaccagcagggctacatccaggtgaccgacttcggcttcgccaagagagtgaagggcagaacctggaccctgtgcggcacccccgagtacctggcccccgagatcatcctgagcaagggctacaacaaggccgtggactggtgggccctgggcgtgctgatctacgagatggccgccggctacccccccttcttcgccgaccagcccatccagatctacgagaagatcgtgagcggcaaggtgagattccccagccacttcagcagcgacctgaaggacctgctgagaaacctgctgcaggtggacctgaccaagagattcggcaacctgaagaacggcgtgaacgacatcaagaaccacaagtggttcgccaccaccgactggatcgccatctaccagagaaaggtggaggcccccttcatccccaagttcaagggccccggcgacaccagcaacttcgacgactacgaggaggaggagatcagagtgagcatcaacgagaagtgcggcaaggagttcagcgagttctag

SEQ ID NO: 131419 - protein, 351 aa, Artificial Sequence
  derived and/or modified sequence
MGNAPAKKDTEQEESVNEFLAKARGDFLYRWGNPAQNTASSDQFERLRTLGMGSFGRVMLVRHQETGGHYAMKILNKQKVVKMKQVEHILNEKRILQAIDFPFLVKLQFSFKDNSYLYLVMEYVPGGEMFSRLQRVGRFSEPHACFYAAQVVLAVQYLHSLDLIHRDLKPENLLIDQQGYLQVTDFGFAKRVKGRTWTLCGTPEYLAPEIILSKGYNKAVDWWALGVLIYEMAVGFPPFYADQPIQIYEKIVSGRVRFPSKLSSDLKHLLRSLLQVDLTKRFGNLRNGVGDIKNHKWFATTSWIAIYEKKVEAPFIPKYTGPGDASNFDDYEEEELRISINEKCAKEFSEF

SEQ ID NO: 131420 - DNA, 1056 bp, Artificial Sequence
  derived and/or modified sequence
atgggcaatgcccctgctaaaaaggataccgaacaggaagagtccgtcaatgagtttttggccaaagcgcgcggagactttctgtaccgctggggaaatcctgctcaaaataccgccagctcggatcagtttgaacgactgagaacactcggaatgggctcttttggtagagtgatgcttgttcgacaccaggaaacgggtggccactacgcaatgaaaattctgaacaagcagaaggtagtgaaaatgaagcaggtcgaacacattctcaatgaaaaaaggatactgcaggccatcgattttccgtttcttgttaaactccaattttcctttaaggacaatagctatctctatctggttatggagtacgtcccggggggggagatgttctcaaggctgcagagagtggggaggttcagcgaaccccatgcctgtttctacgccgcccaggtggttctggccgtgcagtatctccacagtttggacctgatccacagggacttaaagccagaaaatctgcttatcgaccagcagggctatctgcaggtgacagatttcggctttgcaaagagagtgaagggtcggacgtggacgctctgtgggacaccagagtatctggctcccgagatcatcttaagcaagggttacaataaggctgtcgattggtgggcattaggggttctgatctatgagatggccgtgggattccctcctttctacgccgatcagcccattcagatctacgagaagatcgtaagcggcagggtccgattcccctctaaattgtcctcagacttgaaacacctgctgaggagtctgttacaggtggaccttaccaaaaggtttggaaatctgagaaacggtgtcggggacattaaaaaccataaatggttcgccaccaccagctggatcgccatatatgaaaagaaggtcgaggcccccttcatccccaagtacactggacctggggacgctagcaacttcgatgactatgaggaagaagaacttcgaattagcattaatgagaaatgtgccaaagaattctccgagttttag

SEQ ID NO: 131421 - DNA, 1056 bp, Artificial Sequence
  derived and/or modified sequence
atgggaaatgccccagccaagaaggacacagagcaggaggagagcgtgaatgagttcctggccaaggcccggggggacttcctgtaccgctggggcaacccagcccagaacacagccagcagtgaccagtttgagcggctgcggaccctgggcatgggcagctttggccgggtgatgctggtgcgccaccaggagaccggcggccactacgccatgaagatcctgaacaagcagaaggtggtgaagatgaagcaggtggagcacatcctgaatgagaagaggatcctgcaggccatcgacttccccttcctggtgaagctgcagttctccttcaaggacaacagctacctgtacctggtgatggagtatgtgcctggaggagagatgttcagccggctgcagagggtgggccgcttcagcgagccccacgcctgcttctacgccgcccaggtggtgctggccgtgcagtacctgcacagcctggacctgatccaccgggacctgaagccagagaacctgctgattgaccagcagggctacctgcaggtgacagactttggatttgccaagagggtgaagggccgcacctggaccctgtgtggcaccccagagtacctggcccctgagatcatcctgagcaagggctacaacaaggctgtggactggtgggccctgggcgtgctgatctatgagatggctgtgggcttcccccccttctatgctgaccagcccatccagatctatgagaagatcgtgtctggccgggtgcgcttccccagcaagctgagcagtgacctgaagcacctgctgcggagcctgctgcaggtggacctgaccaagcgcttcggcaacctgagaaatggagtgggggacatcaagaaccacaagtggtttgccaccacctcctggatcgccatctatgagaagaaggtggaggcccccttcatccccaagtacacaggccctggagatgccagcaactttgatgattatgaggaggaggagctgcgcatcagcatcaatgaaaaatgtgccaaggagttcagcgagttctag

SEQ ID NO: 131422 - DNA, 1056 bp, Artificial Sequence
  derived and/or modified sequence
atgggcaacgcccccgccaagaaggacaccgagcaggaggagagcgtgaacgagtttctggcaaaagccaggggcgatttcctgtaccgctggggcaaccctgcccaaaacaccgcctccagcgatcagttcgagagactgcggaccttgggcatgggcagttttggacgagttatgctcgtgaggcatcaagaaacaggagggcattatgctatgaaaattttaaacaaacaaaaagtcgtgaagatgaagcaagtggagcacatcttgaacgaaaaacggatcttacaggctatagacttccccttcttggtaaagttacagttctcatttaaggacaactcgtacttgtacctcgttatggaatatgttccagggggggagatgttttcccgcctccaacgtgtgggaagattcagcgaaccgcatgcttgcttttatgccgcacaagtggtgttggcggtacagtacctccactctctcgacttgatccaccgggacctgaaaccagagaacctgctgatcgatcagcagggctacttgcaagtgaccgacttcgggttcgcgaagcgagtgaagggacgcacctggactctgtgcggtacacctgagtacctggccccagaaattattctgtctaaagggtataacaaggctgtggattggtgggccctaggcgtgttaatttacgaaatggcggtgggtttcccaccattttacgccgatcaaccaatccaaatttatgaaaaaattgtgtccggaagggttagatttcccagtaagctgtctagtgacctgaaacacctcctgcgatccctcctccaggtcgatctgacgaagcgcttcggaaatctgcgaaacggcgtaggcgatattaagaaccacaaatggttcgccaccacgtcctggatcgcgatttacgaaaagaaggtcgaggcaccctttatcccaaagtacacaggccccggcgatgcgagcaactttgacgactacgaggaggaggaactgcgtatcagcattaacgagaagtgcgcaaaagagttttctgagttctag

SEQ ID NO: 131423 - DNA, 1056 bp, Artificial Sequence
  derived and/or modified sequence
atgggcaatgcgcctgccaagaaggacaccgagcaggaagagtccgtgaacgagttcctggccaaagcccgaggggactttctttaccggtggggtaatcccgcacaaaacactgcgtcttccgaccagttcgaaagattgaggaccttgggcatgggcagtttcggcagggtgatgctggttcgacaccaggaaaccggcggacattacgcgatgaagatcctcaacaagcagaaggtggtcaaaatgaaacaagtggagcacattcttaatgagaagcgaattttgcaggctatcgacttcccatttctcgtgaaacttcagttcagtttcaaagataactcttacttgtacctagtgatggagtacgtaccaggaggtgagatgttctcacgcctgcagagagtaggacgcttttctgaaccccatgcatgcttttatgctgcacaggtcgtgctcgcagtgcaatacctccacagtctggatcttattcacagggatttaaagcccgaaaacctgttgatagaccagcaggggtatctgcaggttacggacttcggcttcgccaagagagtgaaggggagaacctggactctttgtgggacccccgagtacctcgcaccagaaattattcttagcaaggggtataataaggcagtagactggtgggccttgggtgtgctgatttatgaaatggcagtgggctttccgcctttctacgccgaccagcccatccaaatttatgaaaagattgtgagcggtcgggttaggttcccaagtaagttatcttcggatttgaagcatctcctgagatctcttcttcaggtggatctcactaagcggttcggcaacctaagaaatggcgttggcgacatcaagaatcacaaatggttcgctaccacatcttggatcgcaatttacgagaagaaggtcgaggcccctttcatcccaaaatacacgggccctggcgacgcttcgaattttgatgactacgaagaggaggaactgcgaatctccattaatgagaagtgtgcgaaagagttctcagaattctag

SEQ ID NO: 131424 - DNA, 1571 bp, Artificial Sequence
  derived and/or modified sequence
cgagacccccgcccctgccgccgccaccgccatgggcaacgcccccgccaagaaggacaccgagcaggaggagagcgtgaacgagttcctagccaaagccagaggagatttcctctacagatggggaaaccccgctcaaaacaccgccagctcggatcagttcgaacggctcaggacgctgggcatgggctccttcgggcgggtgatgctggtgaggcaccaggagaccggcggccactacgccatgaagatcctcaacaagcagaaggtggtgaagatgaagcaggtcgagcacatactgaacgagaagcgcatcctgcaggcgatcgactttccgttcctcgtcaagctccagttctcctttaaggacaactcctacctgtacctggtgatggagtacgtgccgggtggggagatgttctcccgcctacagcgcgtcggaaggtttagcgagccccatgcctgtttctatgccgcccaggtcgtcctggccgtccagtacctacactcgctcgacctcatccaccgcgacctgaagcccgagaatctcctcatcgaccagcagggctacctgcaggtgacggacttcggtttcgccaagcgcgtgaagggccgcacttggaccttgtgcgggaccccagagtacctggcccccgagatcatcctgagcaaaggctacaacaaggccgtggactggtgggccctaggggtgctcatctatgagatggccgtgggcttcccacccttctacgccgaccagcccatccagatctacgagaagatcgtctctgggagggtgcggtttccctccaaactcagctctgacctcaagcatctgctgcggagcctgctgcaggtggacctcaccaagcgcttcggaaacctcaggaacggggttggcgacatcaagaaccacaagtggttcgccacaaccagctggatcgccatctatgagaagaaggtggaagctcccttcatcccgaagtacacaggccctggggatgccagtaactttgacgactacgaggaggaagagctccggatctccatcaatgagaagtgtgccaaggagttttctgagttttaggggtgtgcttgtgcccctgtgggttttctttcctttttgtttttggtggtttgggggatgggagggttggattgaacagccagagggccccagagttccttgtatctaatttcatcctcaccccaccctccagggttgggggagcaggaagcccagatatttggaggaacagaaacaccagctgctccctcacccccccccatgccttcctggtccctctgtgcttctctctttctcctcccacagggtcccccttgccccagcccccttctgcctgttttaaacgagtttctcagctctattcaggccaggtcttgctgttgtatcaagggacacggtgtggaaagaggggctcaaacttaactccagccctgaacaggcaccacttactaagagaggatgaatgaaaagcacacctaccctttggcgtaatcctgcctgggaaggagagaggtttagtgccatgttcagtgggctgtttgct

SEQ ID NO: 131425 - DNA, 1056 bp, Artificial Sequence
  derived and/or modified sequence
atgggcaacgcccccgccaagaaggacaccgagcaggaggagagcgtgaacgagttcctggccaaggccagaggcgacttcctgtacagatggggcaaccccgcccagaacaccgccagcagcgaccagttcgagagactgagaaccctgggcatgggcagcttcggcagagtgatgctggtgagacaccaggagaccggcggccactacgccatgaagatcctgaacaagcagaaggtggtgaagatgaagcaggtggagcacatcctgaacgagaagagaatcctgcaggccatcgacttccccttcctggtgaagctgcagttcagcttcaaggacaacagctacctgtacctggtgatggagtacgtgcccggcggcgagatgttcagcagactgcagagagtgggcagattcagcgagccccacgcctgcttctacgccgcccaggtggtgctggccgtgcagtacctgcacagcctggacctgatccacagagacctgaagcccgagaacctgctgatcgaccagcagggctacctgcaggtgaccgacttcggcttcgccaagagagtgaagggcagaacctggaccctgtgcggcacccccgagtacctggcccccgagatcatcctgagcaagggctacaacaaggccgtggactggtgggccctgggcgtgctgatctacgagatggccgtgggcttcccccccttctacgccgaccagcccatccagatctacgagaagatcgtgagcggcagagtgagattccccagcaagctgagcagcgacctgaagcacctgctgagaagcctgctgcaggtggacctgaccaagagattcggcaacctgagaaacggcgtgggcgacatcaagaaccacaagtggttcgccaccaccagctggatcgccatctacgagaagaaggtggaggcccccttcatccccaagtacaccggccccggcgacgccagcaacttcgacgactacgaggaggaggagctgagaatcagcatcaacgagaagtgcgccaaggagttcagcgagttctag

SEQ ID NO: 131426 - protein, 299 aa, Artificial Sequence
  derived and/or modified sequence
MKSHRCYDLIPTSSKLVVFDTSLQVKKAFFALVTNGVRAAPLWDSKKQSFVGMLTITDFINILHRYYKSALVQIYELEEHKIETWREVYLQDSFKPLVCISPNASLFDAVSSLIRNKIHRLPVIDPESGNTLYILTHKRILKFLKLFITEFPKPEFMSKSLEELQIGTYANIAMVRTTTPVYVALGIFVQHRVSALPVVDEKGRVVDIYSKFDVINLAAEKTYNNLDVSVTKALQHRSHYFEGVLKCYLHETLETIINRLVEAEVHRLVVVDENDVVKGIVSLSDILQALVLTGGEKKP

SEQ ID NO: 131427 - protein, 247 aa, Artificial Sequence
  derived and/or modified sequence
MLTITDFINILHRYYKSALVQIYELEEHKIETWREVYLQDSFKPLVCISPNASLFDAVSSLIRNKIHRLPVIDPESGNTLYILTHKRILKFLKLFITEFPKPEFMSKSLEELQIGTYANIAMVRTTTPVYVALGIFVQHRVSALPVVDEKGRVVDIYSKFDVINLAAEKTYNNLDVSVTKALQHRSHYFEGVLKCYLHETLETIINRLVEAEVHRLVVVDENDVVKGIVSLSDILQALVLTGGEKKP

SEQ ID NO: 131428 - protein, 331 aa, Artificial Sequence
  derived and/or modified sequence
METVISSDSSPAVENEHPQETPESNNSVYTSFMKSHRCYDLIPTSSKLVVFDTSLQVKKAFFALVTNGVRAAPLWDSKKQSFVGMLTITDFINILHRYYKSALVQIYELEEHKIETWREVYLQDSFKPLVCISPNASLFDAVSSLIRNKIHRLPVIDPESGNTLYILTHKRILKFLKLFITEFPKPEFMSKSLEELQIGTYANIAMVRTTTPVYVALGIFVQHRVSALPVVDEKGRVVDIYSKFDVINLAAEKTYNNLDVSVTKALQHRSHYFEGVLKCYLHETLETIINRLVEAEVHRLVVVDENDVVKGIVSLSDILQALVLTGGEKKP

SEQ ID NO: 131429 - DNA, 1497 bp, Artificial Sequence
  derived and/or modified sequence
ctcttgcaatggagacggtgaggagtgcaggagggcggtcgggggcgctgtggagcctaagacacccccccaacccttaggagaccgggagggccgggcaggggctggcgctggtgtctagcaaacaaaaagcagccgggtgtctgccctatcccgtgaccctgttcctccgcttcttcgttgggcgcatctcctggaactgggccgcgtccccgccgcctttccgtcatttcttcagatagctccccagctgtggaaaatgagcatcctcaagagaccccagaatccaacaatagcgtgtatacttccttcatgaagtctcatcgctgctatgacctgattcccacaagctccaaattggttgtatttgatacgtccctgcaggtgaagaaagctttttttgctttggtgactaacggtgtacgagctgcccctttatgggatagtaagaagcaaagttttgtgggcatgctgaccatcactgatttcatcaatatcctgcaccgctactataaatcagccttggtacagatctatgagctagaagaacacaagatagaaacttggagagaggtgtatctccaggactcctttaaaccgcttgtctgcatttctcctaatgccagcttgtttgatgctgtctcttcattaattcggaacaagatccacaggctgccagttattgacccagaatcaggcaatactttgtacatcctcacccacaagcgcattctgaagttcctcaaattgtttatcactgagttccccaagccagagttcatgtccaagtctctggaagagctacagattggcacctatgccaatattgctatggttcgcactaccacccccgtctatgtggctctggggatttttgtacagcatcgagtctcagccctgccagtggtggatgagaaggggcgtgtggtggacatctactccaagtttgatgttatcaatctggcagcagaaaagacctacaacaacctagatgtatctgtgactaaagccttgcaacatcgatcacattactttgagggtgttctcaagtgctacctgcatgagactctggagaccatcatcaacaggctagtggaagcagaggttcaccgacttgtagtggtggatgaaaatgatgtggtcaagggaattgtatcactgtctgacatcctgcaggccctggtgctcacaggtggagagaagaagccctgagctgggggaaggggtcatgcagcaccaggggatatgcccaactcactgcctgctggaagctctgtgggaatcagatgaaacttgagggaattgtgactctgttccctgttcagggtcccctgcccttctatctgggagctagggaaggtatgggggaggaaagagaatggatttatagctacccttaccctcacacatacacttgaaaaaactttcagcctagccagttctagcccctgtcctcttagatatatccccctttctgggtgaactataggctctgtg

SEQ ID NO: 131430 - DNA, 996 bp, Artificial Sequence
  derived and/or modified sequence
atggagacagttattagtagcgactcatctcctgccgtagaaaacgagcacccccaagagacccctgagagtaataatagcgtgtacacgtcatttatgaaatcacatagatgctatgacctgatccccactagttccaagctcgtagtcttcgatacttccttgcaggtgaaaaaggcgttcttcgcacttgttactaacggtgtgcgggccgctcctctatgggactccaagaaacagtcgtttgtcgggatgctgaccattacagatttcataaatatattacacagatattataagagcgcactggtgcaaatctatgaactggaagagcataagatagagacttggcgagaagtgtacttgcaggatagctttaaaccactcgtgtgcatctctcccaacgcctcactgttcgacgctgtctctagcctaatcaggaataagatccatagactgcccgtcattgacccggagtcgggaaatacgctctacatccttacacacaagagaatcttgaaatttctcaagttgttcatcaccgagttccctaaacccgagttcatgtctaaaagccttgaggaactccaaatcggcacgtacgcaaatattgccatggtgagaacaaccacacccgtttacgtggccctcggaatcttcgtgcaacacagggtaagcgccctccctgtggtggatgagaagggcagagtggtggacatttactccaaattcgatgtgattaacctggctgccgagaagacctataataatctagacgtaagcgtgacgaaggccctccagcatcggagccattatttcgaaggggtactcaagtgttacctacacgaaacgctagaaactattattaatagattagtcgaggcggaggtgcaccgactggtggtcgttgatgagaacgacgtggtgaaagggatagtctctctgtcggatattctgcaggctttagtgctgaccgggggagaaaagaaaccatag

SEQ ID NO: 131431 - DNA, 996 bp, Artificial Sequence
  derived and/or modified sequence
atggagaccgtcatcagcagtgacagcagccctgctgtggagaatgagcacccccaggagaccccagagagcaacaacagcgtgtacaccagcttcatgaagagccaccgctgctatgacctgatccccaccagcagcaagctggtggtgtttgacaccagcctgcaggtgaagaaggccttctttgccctggtgaccaatggagtgcgggccgcccccctgtgggacagcaagaagcagagctttgtgggcatgctgaccatcacagacttcatcaacatcctgcaccgctactacaagagcgccctggtgcagatctatgagctggaggagcacaagattgagacctggagggaggtgtacctgcaggacagcttcaagcccctggtgtgcatcagccccaatgccagcctgtttgatgctgtgagcagcctcatccggaacaagatccaccggctgcccgtcatcgaccctgagagcggcaacaccctgtacatcctgacccacaagaggatcctgaagttcctgaagctgttcatcacagagttccccaagccagagttcatgagcaagagcctggaggagctgcagatcggcacctacgccaacatcgccatggtgaggaccaccacccctgtgtatgtggccctgggcatctttgtgcagcaccgggtgtctgccctgcctgtggtggatgagaagggccgggtggtggacatctacagcaagtttgatgtgatcaacctggccgctgagaagacctacaacaacctggatgtgtctgtgaccaaggccctgcagcacaggagccactactttgaaggagtgctgaagtgctacctgcacgagaccctggagaccatcatcaaccggctggtggaggccgaggtgcaccggctggtggtggtggatgaaaatgatgtggtgaagggcatcgtgtccctgagtgacatcctgcaggccctggtgctgactggaggagagaagaagccctag

SEQ ID NO: 131432 - DNA, 996 bp, Artificial Sequence
  derived and/or modified sequence
atggagaccgtgatcagcagcgacagcagccccgccgtggagaacgagcacccccaggaaacacctgagtcaaataactccgtgtacacctccttcatgaaatctcaccgctgctatgacctcatacccacttcatcaaaacttgttgtgttcgacaccagcttgcaggtaaagaaagcttttttcgctcttgtgacgaacggagtcagagccgcccctctctgggactccaaaaagcagagtttcgtggggatgcttactattactgacttcatcaatatcctgcatcggtattataaatccgctctggttcagatctatgaactggaggagcacaaaatcgaaacttggcgggaggtgtacctccaggactcttttaagcctctggtgtgcatttctcctaatgcaagcctcttcgacgcagtgtcgagtctgattcggaataagatccacagactgcccgtcatcgaccccgagagtggaaatactctgtacatcttaacacacaaaagaatcttgaaattcttgaaattgtttattacagaattccctaaaccagaattcatgagcaaatcattggaggaactccaaattgggacttatgctaacattgcaatggtccgcacaactaccccagtctatgttgcgctgggtatctttgtccagcatcgcgtgagtgcccttcctgtagtggacgagaaggggcgcgtggtcgatatttattccaagttcgatgtgattaacctggcagccgaaaaaacatataataacctggacgtatccgtcaccaaggcccttcaacaccgcagccactattttgagggcgtgctcaaatgctatctgcatgaaaccctcgagaccattataaataggctagtggaggccgaagtgcacagacttgtcgttgtagatgagaatgatgtggtcaaaggcatagtttctctgtccgacatcctccaggcgctggttctaactggcggggagaaaaaaccttag

SEQ ID NO: 131433 - DNA, 996 bp, Artificial Sequence
  derived and/or modified sequence
atggagaccgtgatatcctcagattccagtccggctgtggagaacgagcatcctcaggagacgccagagagcaataactccgtatatacatcttttatgaaaagccacagatgttacgacctcatacctacctccagtaagctggtggtctttgatacctcactgcaggtgaagaaagccttcttcgcccttgtaaccaacggcgtccgagctgcgcctttgtgggactcgaagaaacagtcttttgttgggatgctgacaatcactgacttcatcaacattctgcatagatactacaagagcgccctcgtgcagatctacgaacttgaggagcacaagattgagacctggagggaagtctaccttcaagatagttttaagccgctggtttgcatatcacctaatgccagcctgtttgatgcagtttcctctctgattagaaacaaaatccatcggctgccagtcatcgatcccgagtcagggaacactttgtacatacttacgcacaaacgcatcctgaagttcttgaagctttttatcacggagttccctaaacctgagttcatgtctaagagcttggaggagctccaaattggaacatatgctaatatcgccatggtgcgtaccacaacaccagtttatgtggctcttggcatcttcgtacagcaccgggtgtctgccctacctgtggtggatgagaagggacgtgtggtggacatctactccaagtttgatgtaattaatctcgccgctgagaagacatataataaccttgatgttagcgttaccaaggcactgcagcacaggagtcactactttgagggagtccttaaatgctacctacacgaaacactggagaccatcataaataggctggtggaggccgaggtccatcgcctggttgtggttgacgaaaatgacgtagtgaaaggaatcgtcagccttagcgatatcctgcaggcactcgtccttactggcggagagaagaaaccttag

SEQ ID NO: 131434 - DNA, 2071 bp, Artificial Sequence
  derived and/or modified sequence
acagcaaggttggtccttcgtaacaacggatgaaatggttcccttttttaaagcgccctctctccctccaccctcagcgcccctgtccttggcatgttttgtatcagcgatcattctgaactgtacatatttatgttgcgagaggcaaagggcaagttttggattttgcttcttccaagtttgtttttaaacgacaaataaaaaaagaacattttaaatacaagcggctccgtcccatgaccctcgccgtcagccggatccgtgcggtccgcgaggacccgggggagggcggttaccgaggcccgccaccgccggaagggtgggttccttgccttccgccccagtctggcgactgccatgacgtgggcggaagtggcgtcgccgcaccggatgtggggcggggcctgccccaagagagtttcctaaagcgaggaaaccaagccgggcgcctcttgcaatggagacggtcatttcttcagatagctccccagctgtggaaaatgagcatcctcaagagaccccagaatccaacaatagcgtgtatacttccttcatgaagtctcatcgctgctatgacctgattcccacaagctccaaattggttgtatttgatacgtccctgcaggtgaagaaagctttttttgctttggtgactaacggtgtacgagctgcccctttatgggatagtaagaagcaaagttttgtgggcatgctgaccatcactgatttcatcaatatcctgcaccgctactataaatcagccttggtacagatctatgagctagaagaacacaagatagaaacttggagagaggtgtatctccaggactcctttaaaccgcttgtctgcatttctcctaatgccagcttgtttgatgctgtctcttcattaattcggaacaagatccacaggctgccagttattgacccagaatcaggcaatactttgtacatcctcacccacaagcgcattctgaagttcctcaaattgtttatcactgagttccccaagccagagttcatgtccaagtctctggaagagctacagattggcacctatgccaatattgctatggttcgcactaccacccccgtctatgtggctctggggatttttgtacagcatcgagtctcagccctgccagtggtggatgagaaggggcgtgtggtggacatctactccaagtttgatgttatcaatctggcagcagaaaagacctacaacaacctagatgtatctgtgactaaagccttgcaacatcgatcacattactttgagggtgttctcaagtgctacctgcatgagactctggagaccatcatcaacaggctagtggaagcagaggttcaccgacttgtagtggtggatgaaaatgatgtggtcaagggaattgtatcactgtctgacatcctgcaggccctggtgctcacaggtggagagaagaagccctgagctgggggaaggggtcatgcagcaccaggggatatgcccaactcactgcctgctggaagctctgtgggaatcagatgaaacttgagggaattgtgactctgttccctgttcagggtcccctgcccttctatctgggagctagggaaggtatgggggaggaaagagaatggatttatagctacccttaccctcacacatacacttgaaaaaactttcagcctagccagttctagcccctgtcctcttagatatatccccctttctgggtgaactataggctctgtgcctctcagacaaattctgatctctaagagatccccagacctcacttgcctctgcctccatcttggccctgattcaaccctaagataatagcacaacaaaattcttcataaagatatttttattcacctgttccgtgctatatggaggaggccaagtccatttagtgacatttcttcccataatgtgagtggggaggattgtggggaggaggggctttgggttcctgtgtttgtgcatatgaagggagatgggggttaggtggaggaggagagcagcgtggttagctaaggttattgctttttgtggcaaatctaattaaatgacaggaatctc

SEQ ID NO: 131435 - DNA, 996 bp, Artificial Sequence
  derived and/or modified sequence
atggagaccgtgatcagcagcgacagcagccccgccgtggagaacgagcacccccaggagacccccgagagcaacaacagcgtgtacaccagcttcatgaagagccacagatgctacgacctgatccccaccagcagcaagctggtggtgttcgacaccagcctgcaggtgaagaaggccttcttcgccctggtgaccaacggcgtgagagccgcccccctgtgggacagcaagaagcagagcttcgtgggcatgctgaccatcaccgacttcatcaacatcctgcacagatactacaagagcgccctggtgcagatctacgagctggaggagcacaagatcgagacctggagagaggtgtacctgcaggacagcttcaagcccctggtgtgcatcagccccaacgccagcctgttcgacgccgtgagcagcctgatcagaaacaagatccacagactgcccgtgatcgaccccgagagcggcaacaccctgtacatcctgacccacaagagaatcctgaagttcctgaagctgttcatcaccgagttccccaagcccgagttcatgagcaagagcctggaggagctgcagatcggcacctacgccaacatcgccatggtgagaaccaccacccccgtgtacgtggccctgggcatcttcgtgcagcacagagtgagcgccctgcccgtggtggacgagaagggcagagtggtggacatctacagcaagttcgacgtgatcaacctggccgccgagaagacctacaacaacctggacgtgagcgtgaccaaggccctgcagcacagaagccactacttcgagggcgtgctgaagtgctacctgcacgagaccctggagaccatcatcaacagactggtggaggccgaggtgcacagactggtggtggtggacgagaacgacgtggtgaagggcatcgtgagcctgagcgacatcctgcaggccctggtgctgaccggcggcgagaagaagccctag

SEQ ID NO: 131436 - protein, 381 aa, Artificial Sequence
  derived and/or modified sequence
MASPPACPSEEDESLKGCELYVQLHGIQQVLKDCIVHLCISKPERPMKFLREHFEKLEKEENRQILARQKSNSQSDSHDEEVSPTPPNPVVKARRRRGGVSAEVYTEEDAVSYVRKVIPKDYKTMTALAKAISKNVLFAHLDDNERSDIFDAMFPVTHIAGETVIQQGNEGDNFYVVDQGEVDVYVNGEWVTNISEGGSFGELALIYGTPRAATVKAKTDLKLWGIDRDSYRRILMGSTLRKRKMYEEFLSKVSILESLEKWERLTVADALEPVQFEDGEKIVVQGEPGDDFYIITEGTASVLQRRSPNEEYVEVGRLGPSDYFGEIALLLNRPRAATVVARGPLKCVKLDRPRFERVLGPCSEILKRNIQRYNSFISLTV

SEQ ID NO: 131437 - protein, 165 aa, Artificial Sequence
  derived and/or modified sequence
MASPPACPSEEDESLKGCELYVQLHGIQQVLKDCIVHLCISKPERPMKFLREHFEKLEKEENRQILARQKSNSQSDSHDEEVSPTPPNPVVKARRRRGGVSAEVYTEEDAVSYVRKVIPKDYKTMTALAKAISKNVLFAHLDDNERSDIFDAMFPVTHIAGETVI

SEQ ID NO: 131438 - protein, 297 aa, Artificial Sequence
  derived and/or modified sequence
MASPPACPSEEDESLKGCELYVQLHGIQQVLKDCIVHLCISKPERPMKFLREHFEKLEKEENRQILARQKSNSQSDSHDEEVSPTPPNPVVKARRRRGGVSAEVYTEEDAVSYVRKVIPKDYKTMTALAKAISKNVLFAHLDDNERSDIFDAMFPVTHIAGETVIQQGNEGDNFYVVDQGEVDVYVNGEWVTNISEGGSFGELALIYGTPRAATVKAKTDLKLWGIDRDSYRRILMGSTLRKRKMYEEFLSKVSILESLEKWERLTVADALEPVQFEDGEKIVVQGEPGDDFYIITE

SEQ ID NO: 131439 - protein, 58 aa, Artificial Sequence
  derived and/or modified sequence
MASPPACPSEEDESLKGCELYVQLHGIQQVLKDCIVHLCISKPERPMKFLREHFEKLE

SEQ ID NO: 131440 - DNA, 1146 bp, Artificial Sequence
  derived and/or modified sequence
atggcttctcctcctgcttgtccgtccgaggaagacgaaagtctgaagggttgcgagctgtacgtccagctgcacgggatccagcaggttctcaaggattgtatagttcacctgtgtatttccaaacctgaacgtccgatgaagttccttcgcgagcacttcgagaaactggaaaaagaagagaaccggcagattctggccaggcagaagtcgaactcccagagtgacagccatgatgaagaagtatcaccaacccctcccaacccagtcgtaaaagcgcgcagaaggcgaggtggggtctctgccgaagtgtacaccgaagaggatgctgtgtcgtacgttcgcaaggttattcccaaagactacaaaaccatgaccgccctggcgaaggcgattagtaagaatgttctgttcgcccacctcgatgacaatgagagaagtgatattttcgacgctatgttcccagtcacgcatatcgcgggtgaaactgttatacagcagggcaatgagggggataacttctacgtagttgatcagggagaggtcgacgtctatgtgaacggggaatgggttacaaatataagcgagggggggtccttcggagaactcgccctgatatatggcaccccacgggccgctaccgtcaaggcgaagacagacttaaagctgtgggggattgatcgggactcctaccggcggattttgatgggcagtaccctccgcaaacgaaagatgtatgaagagtttttatctaaggtgagcattctcgagtctctcgagaaatgggaaagacttactgtagctgatgcattggaacccgtgcaattcgaagatggggaaaagatcgtggttcagggagagccaggggacgatttctacatcataacagaaggtacagccagcgttttgcagaggagatcgcctaatgaggagtatgtcgaagtgggacgtctgggaccttcagattatttcggagaaatcgctctgttgcttaatcggccccgagccgccacagtcgtagccagaggccccctgaaatgtgtgaagctggaccgcccgcgctttgaacgcgttctaggcccatgctcagagatcttaaaaagaaatatacaaaggtacaattcgttcattagccttacagtgtag

SEQ ID NO: 131441 - DNA, 1146 bp, Artificial Sequence
  derived and/or modified sequence
atggcatccccgcctgcctgcccaagcgaggaagatgagtctctcaagggctgtgaactttatgtccagctgcacggcatccaacaagttttgaaggattgcattgtccacctgtgtataagcaaacctgaacggccaatgaaattcctcagggagcactttgaaaaacttgaaaaagaggagaatcgtcagatcctcgcccggcagaagtccaatagtcagtctgacagccacgatgaggaagtgtcacccacccccccaaatccagtagtaaaggccagacggagacgcgggggtgtgagcgctgaggtatatactgaagaagatgccgtatcctatgttagaaaggttattcccaaagactacaaaaccatgactgctcttgctaaagcaatctcgaaaaatgtgctgtttgctcatttagatgataatgagcgctcggatatattcgatgcaatgttcccagtaacccacattgcgggggaaaccgtgatccaacagggcaatgagggagataacttttacgtggtcgatcaaggagaggtggatgtgtacgtgaatggcgagtgggtcaccaatatatcggaaggaggatcctttggcgagctcgcattaatctacgggacacctagggcagctaccgtcaaggcaaaaaccgacctgaaactttgggggatcgatcgcgattcctatcgacggatactgatgggctcgacgctccgcaagcgcaagatgtacgaggaattcttgagcaaggtgtcaatcctcgaatctctcgagaagtgggagcgcctgactgtagcagacgccttggaaccagtgcaatttgaggacggggaaaaaatcgtggtacaaggagagcctggggatgacttttatattatcacagagggaactgcatccgtactgcaaagaaggtcccccaacgaggagtacgtcgaggtcggacggttgggtccaagtgattactttggtgagatagctctgctgttgaatcgtcctcgtgctgccaccgtagttgccaggggacccctgaaatgtgtgaaactggatcgtcctcgcttcgagcgggtactgggtccgtgctccgagatcctaaaacggaatattcaacgttataacagtttcatctctctgacagtatag

SEQ ID NO: 131442 - DNA, 1146 bp, Artificial Sequence
  derived and/or modified sequence
atggcctcgccacctgcttgcccctcagaggaagacgagtcgctcaagggctgtgagctctatgtccagttacacggcatccaacaggtgctgaaggactgtattgtccacctctgtatcagcaaacctgaacgtcctatgaagttccttcgggagcacttcgaaaagctcgagaaagaagaaaataggcagatactggctagacagaagtcaaactctcaatcagatagtcatgacgaggaggtgagtcctacgccgcccaatcctgtggtgaaggcccggcggcgccggggaggtgtgtccgctgaagtgtacactgaggaagatgctgtgagctatgtcaggaaagtcatccctaaagattataaaacaatgaccgcactcgctaaagctatatccaagaatgtcctctttgcacacctggacgataacgagaggagcgacatattcgacgcaatgttccctgtgacccacatcgcaggtgaaactgtcatccagcagggcaacgagggagacaatttctatgtagtagaccagggggaagtggatgtctatgtgaacggagagtgggtaacgaacatttctgagggaggttcctttggggagttagccttaatctatggaaccccccgtgccgcaactgtcaaagcaaagaccgatctaaagctttggggtatagatcgggacagctaccgcaggattttaatgggttctaccctgcggaagcggaaaatgtacgaggagttcctcagtaaagtgtctattctcgagagtctggagaagtgggaacggctcacagtggcggatgctcttgaaccagtgcagttcgaggacggtgagaaaattgtcgtgcagggtgaacccggggatgacttttacatcatcactgaagggacagccagcgttctgcaaagaagatcacccaatgaagagtacgtcgaggtcggacggttgggtcctagcgactatttcggggagatcgctctactcctgaataggccacgggctgctacagtggtggcgcgcgggcctctcaagtgtgtgaagctagataggcctagatttgagcgcgtccttggtccttgttcagaaatccttaagagaaatattcagcgatacaacagctttatcagtctcaccgtgtag

SEQ ID NO: 131443 - DNA, 1146 bp, Artificial Sequence
  derived and/or modified sequence
atggcctctcctccagcttgcccttccgaagaagatgagagtctaaaaggctgcgagctgtatgtgcaactgcacgggatccagcaggtgttgaaagactgtatcgtccacttgtgcatttccaaacccgaacggcctatgaaatttctacgagagcatttcgagaagctggaaaaggaagagaacaggcagatacttgcaaggcaaaagagcaactcccagtcagatagccatgatgaagaagtcagtcctacgccaccaaaccccgtagtgaaagctaggcgccgacgaggcggagtgtctgctgaggtgtatacagaggaagacgcagtgagctacgtgcgcaaggttatcccgaaggactacaagaccatgacagctctcgctaaggccataagtaagaacgtgctcttcgcccacctcgacgacaacgaaaggagcgatatttttgatgccatgttccccgtgacacatattgccggcgagacagtaatacagcaaggcaatgagggggacaacttttacgtcgtggatcagggcgaggttgacgtctatgttaacggggagtgggtcaccaatatctctgaggggggtagttttggtgaactagccctcatttacggcacgccacgggctgctaccgtcaaggctaaaactgatctgaagctgtggggaattgacagagattcatacaggagaatcctcatggggagcactctacgcaagcggaagatgtatgaagagtttctttccaaggtttcaatcttagaatctttggagaaatgggaaagactgacggtggctgatgcattagagccagtgcagtttgaggacggcgaaaaaattgttgtacagggggagcctggagatgacttttacattattactgagggcaccgcttccgtcttgcagcggcgaagcccgaacgaagagtatgttgaggtggggcggctgggcccttccgattattttggcgagattgctttactgttaaatcgaccacgcgccgcaacagtagtcgctagaggaccgcttaagtgtgttaaactggataggccacgatttgagcgggtgttagggccctgtagcgagattctgaaacggaatatccagcggtacaacagctttatctctctcaccgtgtag

SEQ ID NO: 131444 - DNA, 1146 bp, Artificial Sequence
  derived and/or modified sequence
atggcgtcaccccccgcatgtccttctgaggaagacgaatctctgaagggttgcgaactgtatgtccaactccatggcatacagcaggttctgaaagattgtatcgttcacttgtgtatttctaagcccgagcggcctatgaaatttctgagagaacacttcgagaaacttgagaaggaggagaatcggcagatcctggcccgccagaaatctaattcccagagtgatagtcacgatgaggaggtctctccaactccccctaatccagttgtcaaggcaagacggagaagaggaggtgtgtcagctgaagtctatacggaggaggacgccgtctcttacgtgcgcaaggtgatccctaaagattacaagacaatgaccgccctggctaaggccattagtaagaatgtcctgttcgcacatctagacgacaacgaaagatcagacatattcgacgccatgtttccagtgacgcacattgctggtgagacagtgattcagcaggggaatgagggggacaacttttatgttgtggatcagggagaggtagacgtttatgtgaatggagaatgggtgacaaacattagtgaggggggctcatttggcgagctggccctgatctacggaactccacgggcggccactgtcaaggctaaaacagatctcaaactctgggggatcgatagagattcctaccgtcgcatcctgatgggatctacactgcgcaaacgaaaaatgtatgaagaattcctgagtaaggtttcaatactcgagtctttagagaagtgggaacggctaactgttgccgacgcgctggaacctgtccagttcgaggacggtgaaaagattgtggtgcaaggggaacctggtgacgacttttacattattaccgaagggacagcaagtgtgctgcagcgaaggtcacctaacgaagaatatgtagaggtagggcgcttgggcccaagcgattactttggggagatagccctcctattgaataggccacgagcagcaacggtggttgcgagaggacctttaaagtgcgtcaagttggaccggccgcgattcgagagagtgctgggtccctgcagcgaaatcctgaagagaaacatacagcgctataacagcttcatttccctgacggtgtag

SEQ ID NO: 131445 - DNA, 1146 bp, Artificial Sequence
  derived and/or modified sequence
atggccagccccccagcctgccccagtgaagaagatgagagcctgaagggctgtgagctgtatgtgcagctgcacggcatccagcaggtgctgaaggactgcatcgtgcacctgtgcatcagcaagccagagcggcccatgaagttcctgcgggagcactttgagaagctggagaaggaggagaaccggcagatcctggcccggcagaagagcaacagccagagcgacagccatgatgaggaggtgagccccaccccacccaaccctgtggtgaaggccaggagaagaagaggaggagtgtctgctgaggtgtacacagaggaggatgctgtgtcctatgtgaggaaggtgatccccaaggactacaagaccatgacagccctggccaaggccatcagcaagaatgtgctgtttgcccacctggatgacaatgaaagaagtgacatctttgatgccatgtttcctgtgacccacatcgccggggagaccgtcatccagcagggcaatgaaggagacaacttctacgtggtggaccagggcgaggtggatgtgtatgtgaatggagagtgggtgaccaacatcagcgagggcggcagctttggagagctggccctgatctacggcaccccccgggccgccaccgtgaaggccaagacagacctgaagctgtggggcatcgaccgggacagctaccgccgcatcctgatgggcagcaccctgaggaagaggaagatgtatgaggagttcctgagcaaggtgtccatcctggagagcctggagaagtgggagcggctgactgtggctgatgccctggagcctgtgcagtttgaagatggagagaagatcgtggtgcagggcgagcctggagatgacttctacatcatcacagagggcacagcctctgtgctgcagaggaggagccccaatgaggagtatgtggaggtgggccgcctgggccccagcgactactttggagaaattgccctgctgctgaaccggccccgggccgccaccgtggtggcccggggccccctgaagtgtgtgaagctggaccggcccaggtttgagcgggtgctgggcccctgcagcgagatcctgaagaggaacatccagcgctacaacagcttcatcagcctgactgtgtag

SEQ ID NO: 131446 - DNA, 1146 bp, Artificial Sequence
  derived and/or modified sequence
atggccagcccccccgcctgccccagcgaggaggacgagagcctgaagggctgcgaactgtacgttcagctccatgggattcaacaggtcctgaaggactgcatagtccacttgtgtatctcaaaacctgaacggccgatgaagtttttacgggaacactttgaaaagctggaaaaggaggaaaatcggcagatcctggctcgccagaagagtaatagccagagtgattcccacgacgaagaggtcagtcccacaccaccgaaccccgtcgtaaaggccaggcggagacgaggtggagtgtcggctgaggtatacaccgaggaagatgcagtttcttacgtaagaaaggtaattccaaaagactacaagaccatgacagcccttgccaaggccatcagtaagaacgtgctttttgcacacctcgacgacaatgaacgaagcgacattttcgacgccatgttcccggttactcacatcgccggggagaccgtgattcagcaagggaatgagggcgataacttctacgtcgtggatcagggcgaggtggatgtgtacgtgaacggcgaatgggtcacgaatatcagtgagggcggttctttcggcgaactcgcccttatctacggtactcctcgcgccgcgacagtaaaggccaagaccgacttgaaactgtgggggatcgatagggacagctaccgcaggattctcatggggagcactcttcgtaaacgcaagatgtacgaggagttcctgtcaaaggtctcaattctcgaatctctggagaagtgggaacgacttaccgttgcggatgcgcttgagccagtacaatttgaggatggagaaaagattgtcgtgcaaggggaacctggggacgacttctatatcattactgaaggtactgcctcagtcctgcagagaagatctcctaacgaggagtacgtggaggtgggcagacttggaccatccgattactttggcgagatcgccttgctgctgaataggcccagagcggccaccgtcgtggctagggggcctctgaaatgtgtcaaattggatcgtccccgcttcgagagggtattgggaccttgcagtgaaatcctcaaaaggaacatccaacggtataattccttcatcagcttgacagtctag

SEQ ID NO: 131447 - DNA, 1146 bp, Artificial Sequence
  derived and/or modified sequence
atggccagcccccccgcctgccccagcgaggaggacgagagcctgaagggctgtgagctttatgtgcagttgcacggcatccagcaggtcttgaaagactgtattgtgcacctgtgcatcagtaagccagagaggcctatgaagttcctccgagagcatttcgagaaactggagaaagaggagaaccggcaaattttggccagacaaaagtccaactcccaaagtgattcccacgacgaagaggtttccccaaccccaccaaaccccgtggttaaggcacgccgccgccgcgggggagtctctgccgaagtgtacactgaggaagatgccgtgagctacgtgaggaaagtgataccgaaggattacaagacgatgaccgctctagccaaagccattagcaagaacgttctctttgctcatcttgatgacaacgagcggtccgacatctttgacgcaatgtttccagttactcacattgccggagagacagtgattcagcaggggaacgaaggtgacaatttctatgtcgtggaccaaggtgaagttgacgtctatgtgaatggtgaatgggtgactaatattagcgaaggcgggtcgtttggagaattggcactgatttatggcactcctagggccgctacggtcaaagccaaaacagacctgaagctttggggtatcgacagggacagttacagacgcattctgatgggaagcacgttgagaaagagaaaaatgtatgaggagtttctgtctaaagtcagcatcttagaatcgcttgaaaagtgggagcggctaaccgtcgctgacgcgctggagcccgtgcaattcgaggatggcgagaagatcgtagtccagggggagcctggtgacgacttttacataatcacagaagggactgcctccgtcctgcagcgacggagcccgaatgaggagtatgttgaggtgggtagactgggcccatcagattacttcggagagatcgcgctgttgctgaacagaccccgagctgccaccgtagtggcccggggcccactgaaatgtgttaaactcgacagacccaggttcgagagggtgctcggaccctgtagtgagatccttaagcgcaatattcagcgctacaatagctttattagcctgactgtgtag

SEQ ID NO: 131448 - DNA, 1146 bp, Artificial Sequence
  derived and/or modified sequence
atggccagcccccccgcctgccccagcgaggaggacgagagcctgaagggatgcgaactctacgtgcagctccacggcatccagcaagtgttaaaggattgtatcgtccacctgtgcatatccaaacctgaacgccctatgaaatttctgagggagcattttgagaaactcgagaaggaagaaaataggcagatacttgcgcgacagaaaagtaattctcagtcagacagtcatgacgaagaggtgagcccaacaccgccaaatccagtggtcaaggcccggcgacgaaggggtggagtgagtgcagaggtctacaccgaagaagacgctgtgagctacgtccgaaaggtgatccccaaagattacaaaactatgacagctttggctaaggctatcagcaaaaacgtcctctttgcgcacctggatgacaacgaacgatccgatatctttgatgccatgtttccggttacgcacatagccggtgagaccgtaattcagcagggtaacgaaggagataatttctatgtcgtggaccagggcgaggtggatgtgtacgtgaacggcgagtgggttactaatattagcgaaggggggagtttcggagaactcgcactgatctacgggaccccgagagccgctacagtaaaggccaaaacagatctgaagctgtggggcatagatcgggactcttaccgacgaatcctgatggggagtacgctgaggaagcggaagatgtacgaagagtttttgtcaaaggtatcgatcttggagagcctcgaaaagtgggagagactgacagtggccgacgcccttgagcctgtccagtttgaggatggagagaaaatagtcgtgcagggcgaaccaggggacgatttctacataatcactgaggggacagccagcgtgcttcagagacggagccctaacgaagaatatgttgaggtcgggcgcctgggtccttctgactactttggtgaaattgcgctgctgctgaatcgccctcgggctgccactgttgtggcccggggccctctgaagtgtgtaaagttagaccgcccaagattcgagagggtgctgggcccgtgttctgaaatcttgaaaaggaacatccaaaggtacaactccttcatcagtctgactgtgtag

SEQ ID NO: 131449 - DNA, 1146 bp, Artificial Sequence
  derived and/or modified sequence
atggccagcccccccgcctgccccagcgaggaggacgagagcctgaagggttgtgagctgtatgtccagttgcacggcatccagcaggtcctgaaggactgtatagtgcacttatgcatatcaaaacctgaaagaccgatgaaatttttacgcgagcacttcgaaaaactcgagaaggaagaaaatagacagatcctggcacggcagaaaagtaattcacagtccgatagtcatgatgaggaggtatccccaacacccccgaaccctgtggtgaaggcacgacggaggagaggcggcgtttctgctgaagtctataccgaggaagatgccgtcagctatgtccgcaaagtcattcccaaggactacaaaacaatgactgccttagcaaaggcaatttccaaaaacgttctgtttgcacaccttgacgacaacgaacgttccgatatatttgacgctatgttccccgtgacacacattgccggggagaccgtcattcagcagggcaatgaaggcgacaatttttacgtggtggatcagggggaggtggacgtgtatgtgaatggtgagtgggtaactaacatttctgagggtggtagcttcggagagctcgcactgatttatggtacacctcgagcggctacagttaaggccaagacagatctcaagctctggggaattgatagggattcctataggaggatcctgatgggtagtacattgcggaagcgtaagatgtacgaggaattcctctccaaagtcagcatccttgaaagcctcgagaaatgggagcggctaacagtggctgatgctctggagccagtgcagtttgaggatggagagaaaattgtcgtgcaaggcgaacccggcgacgacttctacattattaccgaaggaacagcatccgtgctgcagcggcggtcaccaaacgaagaatatgtcgaggtggggcgtctgggcccaagcgattatttcggggagatcgcactgctactgaaccgccctagagcagccacagtggtggcccggggcccattaaagtgcgtgaaactggatcgccctcggttcgagcgtgtgctcggcccttgcagcgaaatcttaaagagaaatatccagaggtataattcgtttatcagtcttacggtatag

SEQ ID NO: 131450 - DNA, 1146 bp, Artificial Sequence
  derived and/or modified sequence
atggccagcccccccgcctgccccagcgaggaggacgagagcctgaaggggtgcgagctgtacgtgcagctccatgggatccagcaggtgctgaaagattgcatcgtgcacctgtgcattagcaaacccgagcgtcccatgaagtttctgagggaacatttcgagaagctggagaaagaggaaaataggcagatcctcgctagacagaagtccaactctcagtccgacagccacgatgaggaggtgtcccctaccccaccgaatcccgttgtgaaggctcgccggcgaaggggcggagtgtccgctgaggtctacactgaggaagatgcagtcagctatgtgcgtaaagttattccaaaggactataagaccatgaccgccctcgctaaggccattagcaagaatgtgctttttgcgcacttggatgataacgaaaggagcgacatctttgacgctatgtttcctgtcactcatattgcaggagagacagtaattcaacaaggtaacgagggcgataacttctatgtagtagaccagggtgaggtagacgtctatgtgaacggggaatgggtgactaacattagcgagggtgggagcttcggtgagctggccttgatttatggcaccccccgggctgctaccgtgaaggcaaaaactgatctcaaactgtggggcattgacagggatagctatcgtcgaatcttaatgggatctactctgcggaagcgaaaaatgtacgaggagtttctgtccaaggtgtcaatcctggaaagcctggagaagtgggaaaggttgaccgttgccgacgcactggaacccgtgcagttcgaggacggcgagaagattgttgttcagggcgaaccgggtgacgatttttatataattactgaagggacagcctcggtcctgcagcgccgaagccccaacgaggagtacgtggaggtcggcaggctgggaccgtcggactacttcggagaaattgccttacttctcaaccgacctcgagcggccacggtggtagcccgggggccgctaaagtgcgtgaagcttgatcgtccccgttttgagcgagtgctgggaccctgcagtgagatccttaagcggaacattcagcgatacaacagttttatcagtctgactgtatag

SEQ ID NO: 131451 - DNA, 1146 bp, Artificial Sequence
  derived and/or modified sequence
atggcttcaccaccggcatgtccaagcgaagaagacgagagtctgaaggggtgcgagctttatgtacagttgcacgggatacagcaggtactcaaggactgtattgtgcatctgtgcatttctaagcctgagcggcctatgaagtttctgcgcgagcacttcgagaagctggagaaggaagaaaacagacagattttggctagacagaagtctaattcccagtctgattcgcatgacgaagaggtgagtccgactcctcctaacccagtggtgaaggcgcgaaggaggcggggaggcgtgtccgctgaagtttataccgaggaagatgcagtcagctatgttcgcaaagtcatcccaaaggactacaaaactatgacagccctagctaaagcgattagcaagaatgtccttttcgctcacttagatgacaatgagaggagcgacattttcgacgccatgtttcccgttacacacattgccggagaaacagtgatccaacaggggaatgagggggacaatttctacgtggttgaccagggagaggtggacgtgtacgtgaatggtgaatgggtgactaacatttctgagggcggatcttttggagaacttgccttgatctacggaacgcccagggccgctacggtaaaggcgaagacagacctcaaactgtgggggatcgatagagactcataccggaggatcttaatggggtcaacactgcggaaacgtaagatgtatgaagaattcctgtcaaaagtgagtatccttgagtctctggagaagtgggaacgccttaccgtggcggacgcgttggagcccgtgcagttcgaagatggtgagaagatcgtggtccaaggagaaccaggcgacgacttttacattattacagaaggaactgcttccgtgctgcagagaaggagcccaaacgaagagtatgtggaggtcgggagattaggtccttccgactattttggcgaaatcgccctgctcctgaaccgaccacgagcggctaccgtagtggctaggggccctctgaagtgtgttaagttggaccggccacgcttcgaacgtgttctgggaccgtgctctgaaatactgaagcgcaacatccagcggtataattcatttatctctttgacggtgtag

SEQ ID NO: 131452 - DNA, 1146 bp, Artificial Sequence
  derived and/or modified sequence
atggcatccccccctgcgtgcccttccgaagaggatgagagcctcaaaggctgtgaactttatgtgcagctgcacggaattcagcaggttttaaaggactgcatagtgcatctttgtatctcaaaaccggagcgcccaatgaagtttctgagggaacactttgagaagctggaaaaggaagagaaccggcaaatcttggcacggcagaaatccaatagccaaagcgacagtcacgatgaagaggtgagcccgactcctccaaacccagtagtgaaggccagaagaagaaggggtggagtcagcgcagaggtctatactgaggaggatgctgtgagttacgttaggaaggtgatacccaaagattataagacgatgaccgcccttgccaaggcaatcagcaaaaatgtactctttgcccatttagatgacaacgagagaagtgacattttcgacgccatgttccctgtcacgcatattgcaggcgagacagtgattcaacagggtaatgagggcgacaatttttacgtggttgatcaaggggaggtggatgtgtatgtgaacggagagtgggtgacaaacatttccgagggcggaagctttggcgaactggccctcatatacgggacaccacgcgctgcaaccgtgaaggcaaaaactgatctgaagctttggggcatcgaccgcgacagctatagacgaattttgatggggtccaccctgcgaaagagaaaaatgtatgaagagtttttgtctaaggtcagcatcctcgagagcttggagaagtgggagcgcttgacggtggccgatgccctcgaaccagtgcagttcgaggatggtgaaaagatagtagtgcaaggagaaccaggggatgatttttatattattactgaaggtaccgcctctgtccttcagcgcaggagccctaacgaagaatacgtggaagtgggtcggttgggacctagcgactatttcggcgagattgctctgctactgaatcgcccacgggcagctacggtggtcgccagggggcctttgaagtgcgtgaaactggaccgtccgagattcgaaagagtcctggggccatgttctgagattttaaaacggaacattcaacgatataactccttcatctctctgacagtctag

SEQ ID NO: 131453 - DNA, 1146 bp, Artificial Sequence
  derived and/or modified sequence
atggcatcacccccagcttgcccctctgaggaagacgagtctctcaaaggctgtgaactctacgtgcaattacacggcatacaacaggttctgaaagactgcatcgtccacctgtgtatctctaaacctgagagacctatgaaatttttacgggagcatttcgaaaagcttgagaaagaagagaacagacagatccttgccaggcagaaaagcaattctcagagcgattcccacgacgaggaggtgagcccgacaccccctaaccccgtcgtaaaggccaggcggaggcggggaggcgtgagcgctgaagtgtataccgaagaagacgcagtaagttacgtaagaaaggtcatccctaaggattataaaacaatgaccgccctcgcaaaggcgatctctaagaatgtactgttcgcacacctcgatgacaacgaaaggagcgatatctttgatgccatgttcccggtgacccacatcgccggtgaaacggtgatccaacagggcaacgaaggcgacaatttctatgtcgtagatcaaggtgaggtcgacgtctacgtgaatggggaatgggtcacaaatatcagcgaggggggaagttttggagaattagctcttatttacggaacccctagggccgcaaccgtaaaggctaagacagatctaaaactatggggaatcgatcgggatagttacagacgaatcctcatgggcagcaccctgcgaaagaggaaaatgtacgaggaatttcttagtaaggtttctatcctggaatctctggagaagtgggaacggctgaccgtggccgacgccctggagcccgttcaattcgaggacggtgagaaaattgtcgttcagggagaacccggtgatgatttttatataattacagaaggtaccgcaagcgtgctgcagcgaaggtcccctaacgaagaatatgttgaagtcgggcgtctgggcccttcagattactttggtgagatcgccctgctactgaacagaccgcgtgcagccaccgttgtagctagaggtccactaaagtgtgtgaaactggaccggcctcgatttgagcgcgtgctcggcccttgcagtgagattctgaaacggaatattcaaagatacaatagctttataagcttaaccgtctag

SEQ ID NO: 131454 - DNA, 1146 bp, Artificial Sequence
  derived and/or modified sequence
atggccagtccgccagcctgcccctccgaagaggacgaaagcttgaagggctgcgaattgtacgtgcagcttcatggaattcaacaggtgctgaaggattgcattgttcacctgtgcatctcaaaaccagaaaggcccatgaagtttctccgggagcactttgaaaagcttgagaaggaagaaaaccgtcagatcctggctcggcagaaaagcaattcccagtccgactcgcatgacgaggaggtgagtcctacaccccctaaccccgttgtcaaagctcggaggcggcgtggtggggtttccgccgaagtctatacggaagaggatgctgtgtcctacgtacggaaagtcattcctaaggactataaaactatgacagcgttggcaaaggcaattagcaagaatgtgctctttgcccatctggatgacaatgagcgctcagatatcttcgacgctatgttcccagtgacccacatcgccggagagacagtcatccagcaggggaatgagggtgacaatttctatgtggtggaccagggggaagtggatgtgtacgtcaacggagaatgggtgactaatatcagcgagggcggatctttcggcgagctggccctaatctacggaaccccacgggctgccacggtgaaggccaaaaccgacctgaaactttggggaatcgatcgagactcctatagacgtatcctgatgggttccacattacgaaaacgcaaaatgtatgaagagttcctgtccaaggtaagtatcctggagagcctcgagaagtgggaacggctgacggtggcggacgctctcgagcccgtgcagtttgaagatggagagaaaatcgttgtccagggcgagccaggcgatgatttttatattatcaccgaaggtacagcctccgtgcttcaaaggcgctcgccaaacgaggaatacgtcgaagtgggaagattgggcccatccgactatttcggagagattgccttactgctgaataggccgagggccgcaactgtggtggccagaggacctctcaaatgtgtgaaattagatcggccacggttcgagcgcgtgctgggcccatgttctgagattctgaagagaaatatccaaagatataactccttcattagtctgaccgtttag

SEQ ID NO: 131455 - DNA, 1146 bp, Artificial Sequence
  derived and/or modified sequence
atggcaagtcctcccgcatgccccagtgaagaggacgaatccttgaagggttgtgaactgtatgtgcaacttcacgggatccagcaggtactgaaagactgtatcgtccatctttgtattagcaagcctgagaggcccatgaaatttctaagagagcattttgagaagctagaaaaagaggagaataggcagatccttgccaggcaaaagagcaactcgcagtccgactcccacgatgaagaggtgagccccacccctcctaaccccgtggtcaaagcacgacgtcggcgtggcggagtatctgctgaagtgtacactgaagaagatgccgtctcctatgtgcgcaaggtaattcctaaggactataagactatgacggcactagcgaaagccattagcaaaaacgttctgttcgcccacctggacgataacgaacgtagtgatattttcgacgccatgtttcctgtcacccatatcgccggagaaacggttattcagcagggcaacgaaggagataatttctacgtcgtggaccagggggaagtcgatgtctatgtgaacggcgaatgggtaacaaacatcagtgaagggggatcctttggcgaactggcactcatctatggaaccccaagggccgcaaccgtgaaagccaagaccgacctgaaactctggggcatcgaccgggactcataccgcaggatcctgatgggtagcactctgcggaagcgcaaaatgtatgaggagtttctgtctaaagtatctatcctggagagtttggagaaatgggaaaggctgacagttgccgatgcgttagagcccgtccaatttgaagatggggagaaaattgtggtgcagggagagccaggtgacgacttttacatcattaccgaggggactgccagcgtcctgcagcgccgatccccaaatgaggaatatgtggaagtcggacgactggggccatctgactacttcggagaaatagctctactgttgaaccggccaagagccgcaacagtggtggctagaggacctttaaagtgtgtcaaactggatcgtccacggttcgagcgggtcttaggcccttgttcagagatcttgaaacgaaacatccagcggtacaacagcttcatctccctcaccgtctag

SEQ ID NO: 131456 - DNA, 2007 bp, Artificial Sequence
  derived and/or modified sequence
gcgggcggcgttgggggtgcagcagctgcgcgcggcgcgggggcgggcgtggagggcggcgccgctgcagtgcggggacccgctcgctcgctcgccagccgtccccgcgccccgcgtccccgcgcagccgcctcctggcctcgggcgccgcgcatccaggaaggaagcagccaccctcgccatggcctccccgcccgcctgcccctcggaggaggacgagagcctgaagggctgtgagctgtacgtgcagctgcacgggatccagcaggtcctcaaagactgtatcgtccacctctgcatctccaagcccgaacgccccatgaagttcctccgggagcacttcgagaagctggagaaggaagaaaacaggcagattttggcgcggcaaaagtcaaactcacagtcggactcccatgatgaggaggtgtcgcccacccccccgaaccctgtggtgaaggcccgccgccggcgaggaggcgtgagtgccgaggtgtacaccgaggaggacgccgtgtcctacgtcaggaaggtgattcccaaggactacaaaaccatgactgcgctggccaaggccatctccaagaacgtgctcttcgctcacctggatgacaacgagaggagtgacatattcgatgccatgttccctgtcactcacatcgctggggagactgttatacagcaagggaatgaaggagacaacttctatgtcgttgatcaaggggaagtggatgtgtacgtgaacggagagtgggtgaccaacatcagcgagggaggcagcttcggggagctggcgctcatctacggcacccccagggctgcgaccgtgaaagccaagacggacctcaagctctgggggatcgaccgggacagctaccggcgcatccttatgggcagcacgctgaggaaacgcaagatgtacgaggagttcctcagcaaggtctccatcctagagtccctggagaagtgggagcgtctgaccgtggcggatgcgctggagcccgtccagtttgaagatggagagaaaattgtggtccagggagagcctggggacgacttttacatcatcacggagggcaccgcgtccgtgctgcagcgccggtcccccaatgaggagtacgtggaggtggggcgcctgggaccctctgactacttcggggagattgcactgctgctgaaccggccccgggcggccactgtcgtggcccgggggcccctcaagtgtgtgaagctggaccggccccgcttcgagcgtgtgctggggccctgctctgagatcctcaagaggaacattcagcgttacaacagcttcatctccctcaccgtctgagcacagctcccgccctgcagccccagctccccagtgtggtggccgtgccctgctcgtctgtgtcgggggcccgggagccgctgtgtgaggtgtgggccgggtggggctgggtcccggcagcgtgaggactgccccttccccggactcactttttggaataaatgatcaccttgtgcatttccaaatcaaaggacaagcggacaaaatgcatcccaagatcaaggaagggacaggccagcttcctccccacacgcctccccggctgcctctgtgggcttctcctggggggcccaccccacccctgccagtctcctggagatgcttgaggatcggtcctccccagaaccaggccaggacgttgcccctggggcctggtgaccctgtgaggtcaggtcccccagattgaggtctgagtgtgggcaagtgtgtcaaaaggggctgccccccaggggagatgaggctgagagcagggagttgaggccgaagaagtcaaggcccctcccgcaaatgtgtacccctgcccgcgccactgcaccccgccgcacccccacctcccccgggggccctgctgcggatgccggagtgggagagtctctgagctgtgagattgatcttgcccctaattggagaggaagccgggcgccaagacacacggggctcctgccttgggagccagggcc

SEQ ID NO: 131457 - DNA, 1917 bp, Artificial Sequence
  derived and/or modified sequence
gtgagggccaagcaggaacaggggtcacggggcaaggagcacgtggcagcgcaggaaacaggaaggaagcagccaccctcgccatggcctccccgcccgcctgcccctcggaggaggacgagagcctgaagggctgtgagctgtacgtgcagctgcacgggatccagcaggtcctcaaagactgtatcgtccacctctgcatctccaagcccgaacgccccatgaagttcctccgggagcacttcgagaagctggagaaggaagaaaacaggcagattttggcgcggcaaaagtcaaactcacagtcggactcccatgatgaggaggtgtcgcccacccccccgaaccctgtggtgaaggcccgccgccggcgaggaggcgtgagtgccgaggtgtacaccgaggaggacgccgtgtcctacgtcaggaaggtgattcccaaggactacaaaaccatgactgcgctggccaaggccatctccaagaacgtgctcttcgctcacctggatgacaacgagaggagtgacatattcgatgccatgttccctgtcactcacatcgctggggagactgttatacagcaagggaatgaaggagacaacttctatgtcgttgatcaaggggaagtggatgtgtacgtgaacggagagtgggtgaccaacatcagcgagggaggcagcttcggggagctggcgctcatctacggcacccccagggctgcgaccgtgaaagccaagacggacctcaagctctgggggatcgaccgggacagctaccggcgcatccttatgggcagcacgctgaggaaacgcaagatgtacgaggagttcctcagcaaggtctccatcctagagtccctggagaagtgggagcgtctgaccgtggcggatgcgctggagcccgtccagtttgaagatggagagaaaattgtggtccagggagagcctggggacgacttttacatcatcacggagggcaccgcgtccgtgctgcagcgccggtcccccaatgaggagtacgtggaggtggggcgcctgggaccctctgactacttcggggagattgcactgctgctgaaccggccccgggcggccactgtcgtggcccgggggcccctcaagtgtgtgaagctggaccggccccgcttcgagcgtgtgctggggccctgctctgagatcctcaagaggaacattcagcgttacaacagcttcatctccctcaccgtctgagcacagctcccgccctgcagccccagctccccagtgtggtggccgtgccctgctcgtctgtgtcgggggcccgggagccgctgtgtgaggtgtgggccgggtggggctgggtcccggcagcgtgaggactgccccttccccggactcactttttggaataaatgatcaccttgtgcatttccaaatcaaaggacaagcggacaaaatgcatcccaagatcaaggaagggacaggccagcttcctccccacacgcctccccggctgcctctgtgggcttctcctggggggcccaccccacccctgccagtctcctggagatgcttgaggatcggtcctccccagaaccaggccaggacgttgcccctggggcctggtgaccctgtgaggtcaggtcccccagattgaggtctgagtgtgggcaagtgtgtcaaaaggggctgccccccaggggagatgaggctgagagcagggagttgaggccgaagaagtcaaggcccctcccgcaaatgtgtacccctgcccgcgccactgcaccccgccgcacccccacctcccccgggggccctgctgcggatgccggagtgggagagtctctgagctgtgagattgatcttgcccctaattggagaggaagccgggcgccaagacacacggggctcctgccttgggagccagggccgcggccgc

SEQ ID NO: 131458 - DNA, 2553 bp, Artificial Sequence
  derived and/or modified sequence
agtttctgccgccgccaccctggcaggatggggcaacggtgtgcggtaggaggatgaggttgattccctttcctgcagggctgggcttgtgggttaggaccgtcaccaagaggctcctcctaggcctccgtgacctctggatccccaagaaaggaaggaagcagccaccctcgccatggcctccccgcccgcctgcccctcggaggaggacgagagcctgaagggctgtgagctgtacgtgcagctgcacgggatccagcaggtcctcaaagactgtatcgtccacctctgcatctccaagcccgaacgccccatgaagttcctccgggagcacttcgagaagctggagaaggaagaaaacaggcagattttggcgcggcaaaagtcaaactcacagtcggactcccatgatgaggaggtgtcgcccacccccccgaaccctgtggtgaaggcccgccgccggcgaggaggcgtgagtgccgaggtgtacaccgaggaggacgccgtgtcctacgtcaggaaggtgattcccaaggactacaaaaccatgactgcgctggccaaggccatctccaagaacgtgctcttcgctcacctggatgacaacgagaggagtgacatattcgatgccatgttccctgtcactcacatcgctggggagactgttatacagcaagggaatgaaggagacaacttctatgtcgttgatcaaggggaagtggatgtgtacgtgaacggagagtgggtgaccaacatcagcgagggaggcagcttcggggagctggcgctcatctacggcacccccagggctgcgaccgtgaaagccaagacggacctcaagctctgggggatcgaccgggacagctaccggcgcatccttatgggcagcacgctgaggaaacgcaagatgtacgaggagttcctcagcaaggtctccatcctagagtccctggagaagtgggagcgtctgaccgtggcggatgcgctggagcccgtccagtttgaagatggagagaaaattgtggtccagggagagcctggggacgacttttacatcatcacggagggcaccgcgtccgtgctgcagcgccggtcccccaatgaggagtacgtggaggtggggcgcctgggaccctctgactacttcggggagattgcactgctgctgaaccggccccgggcggccactgtcgtggcccgggggcccctcaagtgtgtgaagctggaccggccccgcttcgagcgtgtgctggggccctgctctgagatcctcaagaggaacattcagcgttacaacagcttcatctccctcaccgtctgagcacagctcccgccctgcagccccagctccccagtgtggtggccgtgccctgctcgtctgtgtcgggggcccgggagccgctgtgtgaggtgtgggccgggtggggctgggtcccggcagcgtgaggactgccccttccccggactcactttttggaataaatgatcaccttgtgcatttccaaatcaaaggacaagcggacaaaatgcatcccaagatcaaggaagggacaggccagcttcctccccacacgcctccccggctgcctctgtgggcttctcctggggggcccaccccacccctgccagtctcctggagatgcttgaggatcggtcctccccagaaccaggccaggacgttgcccctggggcctggtgaccctgtgaggtcaggtcccccagattgaggtctgagtgtgggcaagtgtgtcaaaaggggctgccccccaggggagatgaggctgagagcagggagttgaggccgaagaagtcaaggcccctcccgcaaatgtgtacccctgcccgcgccactgcaccccgccgcacccccacctcccccgggggccctgctgcggatgccggagtgggagagtctctgagctgtgagattgatcttgcccctaattggagaggaagccgggcgccaagacacacggggctcctgccttgggagccagggccgcggccgcaggtagaccccagtagggggggccgggctcgaagttcctttgggaggggctggcgggactccagcaggccgtcctcacctttcttagaaagtccacccagggcaagttgatgttgggggaaagcagaagtcaagccagccgcgggccccacacgccccgacccgctcaaccgacttgtcccttaaatgtgtcttggatcccgcagtgatgacgtgagccagccaggcccgaaagggtgaggccagtgcagagaagcttcccaggggattcctgggttcccccgaaagacaagcgaggtcattgcagttcacctgatgttgctcctgtcccgtgcgtcccggggaggctgtccttggtccgaggctgctcgttgcagcccctcccctgctggcggttacgatgcgtggggtccccctccccacccagccccggccacgtcgccgtgtcccgcctgtgcctgtgacgtccctgtggacctgtgagccatccccccccttatctctgctctgaatactgcatgaagcattaaacgtgcaatgaagta

SEQ ID NO: 131459 - DNA, 2533 bp, Artificial Sequence
  derived and/or modified sequence
gtgggagcggggcccggggtgctcaccgggcgtggcctgcgccagggcggcggcgcagctgcagctctcgcggcgcacggcggcgaaggggtcgagcagggagcagcgcagcgcgcgcagagcgtcgtccaggaaggaagcagccaccctcgccatggcctccccgcccgcctgcccctcggaggaggacgagagcctgaagggctgtgagctgtacgtgcagctgcacgggatccagcaggtcctcaaagactgtatcgtccacctctgcatctccaagcccgaacgccccatgaagttcctccgggagcacttcgagaagctggagaaggaagaaaacaggcagattttggcgcggcaaaagtcaaactcacagtcggactcccatgatgaggaggtgtcgcccacccccccgaaccctgtggtgaaggcccgccgccggcgaggaggcgtgagtgccgaggtgtacaccgaggaggacgccgtgtcctacgtcaggaaggtgattcccaaggactacaaaaccatgactgcgctggccaaggccatctccaagaacgtgctcttcgctcacctggatgacaacgagaggagtgacatattcgatgccatgttccctgtcactcacatcgctggggagactgttatacagcaagggaatgaaggagacaacttctatgtcgttgatcaaggggaagtggatgtgtacgtgaacggagagtgggtgaccaacatcagcgagggaggcagcttcggggagctggcgctcatctacggcacccccagggctgcgaccgtgaaagccaagacggacctcaagctctgggggatcgaccgggacagctaccggcgcatccttatgggcagcacgctgaggaaacgcaagatgtacgaggagttcctcagcaaggtctccatcctagagtccctggagaagtgggagcgtctgaccgtggcggatgcgctggagcccgtccagtttgaagatggagagaaaattgtggtccagggagagcctggggacgacttttacatcatcacggagggcaccgcgtccgtgctgcagcgccggtcccccaatgaggagtacgtggaggtggggcgcctgggaccctctgactacttcggggagattgcactgctgctgaaccggccccgggcggccactgtcgtggcccgggggcccctcaagtgtgtgaagctggaccggccccgcttcgagcgtgtgctggggccctgctctgagatcctcaagaggaacattcagcgttacaacagcttcatctccctcaccgtctgagcacagctcccgccctgcagccccagctccccagtgtggtggccgtgccctgctcgtctgtgtcgggggcccgggagccgctgtgtgaggtgtgggccgggtggggctgggtcccggcagcgtgaggactgccccttccccggactcactttttggaataaatgatcaccttgtgcatttccaaatcaaaggacaagcggacaaaatgcatcccaagatcaaggaagggacaggccagcttcctccccacacgcctccccggctgcctctgtgggcttctcctggggggcccaccccacccctgccagtctcctggagatgcttgaggatcggtcctccccagaaccaggccaggacgttgcccctggggcctggtgaccctgtgaggtcaggtcccccagattgaggtctgagtgtgggcaagtgtgtcaaaaggggctgccccccaggggagatgaggctgagagcagggagttgaggccgaagaagtcaaggcccctcccgcaaatgtgtacccctgcccgcgccactgcaccccgccgcacccccacctcccccgggggccctgctgcggatgccggagtgggagagtctctgagctgtgagattgatcttgcccctaattggagaggaagccgggcgccaagacacacggggctcctgccttgggagccagggccgcggccgcaggtagaccccagtagggggggccgggctcgaagttcctttgggaggggctggcgggactccagcaggccgtcctcacctttcttagaaagtccacccagggcaagttgatgttgggggaaagcagaagtcaagccagccgcgggccccacacgccccgacccgctcaaccgacttgtcccttaaatgtgtcttggatcccgcagtgatgacgtgagccagccaggcccgaaagggtgaggccagtgcagagaagcttcccaggggattcctgggttcccccgaaagacaagcgaggtcattgcagttcacctgatgttgctcctgtcccgtgcgtcccggggaggctgtccttggtccgaggctgctcgttgcagcccctcccctgctggcggttacgatgcgtggggtccccctccccacccagccccggccacgtcgccgtgtcccgcctgtgcctgtgacgtccctgtggacctgtgagccatccccccccttatctctgctctgaatactgcatgaagcattaaacgtgcaatgaagtac

SEQ ID NO: 131460 - DNA, 2494 bp, Artificial Sequence
  derived and/or modified sequence
ctctggccgctaaggcagagtgagaccccagggaacgggcgtgcttgctgggtaccgggtgtcctgcagaggcagggatgtgatcccctaggtgaaggaagcagccaccctcgccatggcctccccgcccgcctgcccctcggaggaggacgagagcctgaagggctgtgagctgtacgtgcagctgcacgggatccagcaggtcctcaaagactgtatcgtccacctctgcatctccaagcccgaacgccccatgaagttcctccgggagcacttcgagaagctggagaaggaagaaaacaggcagattttggcgcggcaaaagtcaaactcacagtcggactcccatgatgaggaggtgtcgcccacccccccgaaccctgtggtgaaggcccgccgccggcgaggaggcgtgagtgccgaggtgtacaccgaggaggacgccgtgtcctacgtcaggaaggtgattcccaaggactacaaaaccatgactgcgctggccaaggccatctccaagaacgtgctcttcgctcacctggatgacaacgagaggagtgacatattcgatgccatgttccctgtcactcacatcgctggggagactgttatacagcaagggaatgaaggagacaacttctatgtcgttgatcaaggggaagtggatgtgtacgtgaacggagagtgggtgaccaacatcagcgagggaggcagcttcggggagctggcgctcatctacggcacccccagggctgcgaccgtgaaagccaagacggacctcaagctctgggggatcgaccgggacagctaccggcgcatccttatgggcagcacgctgaggaaacgcaagatgtacgaggagttcctcagcaaggtctccatcctagagtccctggagaagtgggagcgtctgaccgtggcggatgcgctggagcccgtccagtttgaagatggagagaaaattgtggtccagggagagcctggggacgacttttacatcatcacggagggcaccgcgtccgtgctgcagcgccggtcccccaatgaggagtacgtggaggtggggcgcctgggaccctctgactacttcggggagattgcactgctgctgaaccggccccgggcggccactgtcgtggcccgggggcccctcaagtgtgtgaagctggaccggccccgcttcgagcgtgtgctggggccctgctctgagatcctcaagaggaacattcagcgttacaacagcttcatctccctcaccgtctgagcacagctcccgccctgcagccccagctccccagtgtggtggccgtgccctgctcgtctgtgtcgggggcccgggagccgctgtgtgaggtgtgggccgggtggggctgggtcccggcagcgtgaggactgccccttccccggactcactttttggaataaatgatcaccttgtgcatttccaaatcaaaggacaagcggacaaaatgcatcccaagatcaaggaagggacaggccagcttcctccccacacgcctccccggctgcctctgtgggcttctcctggggggcccaccccacccctgccagtctcctggagatgcttgaggatcggtcctccccagaaccaggccaggacgttgcccctggggcctggtgaccctgtgaggtcaggtcccccagattgaggtctgagtgtgggcaagtgtgtcaaaaggggctgccccccaggggagatgaggctgagagcagggagttgaggccgaagaagtcaaggcccctcccgcaaatgtgtacccctgcccgcgccactgcaccccgccgcacccccacctcccccgggggccctgctgcggatgccggagtgggagagtctctgagctgtgagattgatcttgcccctaattggagaggaagccgggcgccaagacacacggggctcctgccttgggagccagggccgcggccgcaggtagaccccagtagggggggccgggctcgaagttcctttgggaggggctggcgggactccagcaggccgtcctcacctttcttagaaagtccacccagggcaagttgatgttgggggaaagcagaagtcaagccagccgcgggccccacacgccccgacccgctcaaccgacttgtcccttaaatgtgtcttggatcccgcagtgatgacgtgagccagccaggcccgaaagggtgaggccagtgcagagaagcttcccaggggattcctgggttcccccgaaagacaagcgaggtcattgcagttcacctgatgttgctcctgtcccgtgcgtcccggggaggctgtccttggtccgaggctgctcgttgcagcccctcccctgctggcggttacgatgcgtggggtccccctccccacccagccccggccacgtcgccgtgtcccgcctgtgcctgtgacgtccctgtggacctgtgagccatccccccccttatctctgctctgaatactgcatgaagcattaaacgtgcaatgaagtac

SEQ ID NO: 131461 - DNA, 1146 bp, Artificial Sequence
  derived and/or modified sequence
atggccagcccccccgcctgccccagcgaggaggacgagagcctgaagggctgcgagctgtacgtgcagctgcacggcatccagcaggtgctgaaggactgcatcgtgcacctgtgcatcagcaagcccgagagacccatgaagttcctgagagagcacttcgagaagctggagaaggaggagaacagacagatcctggccagacagaagagcaacagccagagcgacagccacgacgaggaggtgagccccaccccccccaaccccgtggtgaaggccagaagaagaagaggcggcgtgagcgccgaggtgtacaccgaggaggacgccgtgagctacgtgagaaaggtgatccccaaggactacaagaccatgaccgccctggccaaggccatcagcaagaacgtgctgttcgcccacctggacgacaacgagagaagcgacatcttcgacgccatgttccccgtgacccacatcgccggcgagaccgtgatccagcagggcaacgagggcgacaacttctacgtggtggaccagggcgaggtggacgtgtacgtgaacggcgagtgggtgaccaacatcagcgagggcggcagcttcggcgagctggccctgatctacggcacccccagagccgccaccgtgaaggccaagaccgacctgaagctgtggggcatcgacagagacagctacagaagaatcctgatgggcagcaccctgagaaagagaaagatgtacgaggagttcctgagcaaggtgagcatcctggagagcctggagaagtgggagagactgaccgtggccgacgccctggagcccgtgcagttcgaggacggcgagaagatcgtggtgcagggcgagcccggcgacgacttctacatcatcaccgagggcaccgccagcgtgctgcagagaagaagccccaacgaggagtacgtggaggtgggcagactgggccccagcgactacttcggcgagatcgccctgctgctgaacagacccagagccgccaccgtggtggccagaggccccctgaagtgcgtgaagctggacagacccagattcgagagagtgctgggcccctgcagcgagatcctgaagagaaacatccagagatacaacagcttcatcagcctgaccgtgtag

SEQ ID NO: 131462 - protein, 418 aa, Artificial Sequence
  derived and/or modified sequence
MSIEIPAGLTELLQGFTVEVLRHQPADLLEFALQHFTRLQQENERKGTARFGHEGRTWGDLGAAAGGGTPSKGVNFAEEPMQSDSEDGEEEEAAPADAGAFNAPVINRFTRRASVCAEAYNPDEEEDDAESRIIHPKTDDQRNRLQEACKDILLFKNLDPEQMSQVLDAMFEKLVKDGEHVIDQGDDGDNFYVIDRGTFDIYVKCDGVGRCVGNYDNRGSFGELALMYNTPRAATITATSPGALWGLDRVTFRRIIVKNNAKKRKMYESFIESLPFLKSLEFSERLKVVDVIGTKVYNDGEQIIAQGDSADSFFIVESGEVKITMKRKGKSEVEENGAVEIARCSRGQYFGELALVTNKPRAASAHAIGTVKCLAMDVQAFERLLGPCMEIMKRNIATYEEQLVALFGTNMDIVEPTA

SEQ ID NO: 131463 - protein, 405 aa, Artificial Sequence
  derived and/or modified sequence
MSIEIPAGLTELLQGFTVEVLRHQPADLLEFALQHFTRLQQENERKGTARFGHEGRTWGDLGAAAGGGTPSKGVNFAEEAAPADAGAFNAPVINRFTRRASVCAEAYNPDEEEDDAESRIIHPKTDDQRNRLQEACKDILLFKNLDPEQMSQVLDAMFEKLVKDGEHVIDQGDDGDNFYVIDRGTFDIYVKCDGVGRCVGNYDNRGSFGELALMYNTPRAATITATSPGALWGLDRVTFRRIIVKNNAKKRKMYESFIESLPFLKSLEFSERLKVVDVIGTKVYNDGEQIIAQGDSADSFFIVESGEVKITMKRKGKSEVEENGAVEIARCSRGQYFGELALVTNKPRAASAHAIGTVKCLAMDVQAFERLLGPCMEIMKRNIATYEEQLVALFGTNMDIVEPTA

SEQ ID NO: 131464 - DNA, 1257 bp, Artificial Sequence
  derived and/or modified sequence
atgagcatcgaaatcccagcagggttaacagaactgcttcaggggtttacagtcgaggtcctgaggcatcaaccagcagatctgctggagttcgcattacagcactttacaagattgcagcaggagaatgagcgcaagggcactgcgcgatttggtcatgagggccgtacctggggggacctcggagccgctgcaggtggaggcaccccaagtaaaggagtgaactttgccgaggaacccatgcaaagcgattctgaggatggtgaggaggaggaggccgccccggctgatgctggcgccttcaatgcccctgttatcaaccggtttactcggagggcctctgtctgtgcagaagcttacaaccccgacgaggaagaagacgacgcagaatctcgcatcatccaccctaagacagacgaccaaaggaaccggctgcaggaggcgtgcaaagatattcttttgtttaagaacttggatccagaacagatgtcacaggttcttgacgctatgttcgagaagcttgtgaaagacggcgaacacgtcatagaccagggagacgatggcgacaacttttacgtcattgaccgcggtacatttgacatatacgtgaaatgcgatggcgtgggacggtgcgtgggaaattacgacaatcgtggctccttcggggagctcgcactcatgtacaacaccccaagagccgccacaatcactgctaccagccctggagctctgtgggggttggatcgggtcacgttcagaagaatcatcgttaagaataatgcaaaaaagaggaaaatgtacgaatccttcatcgaaagccttccctttcttaaatcactcgagttttccgaaaggctgaaagttgtcgacgtcataggcactaaggtatataacgatggggagcagatcatcgcacagggcgactcggccgacagcttctttatcgtggagtccggcgaggtgaagatcacaatgaagcgcaaaggtaagtctgaagtcgaggaaaatggcgccgtcgaaattgcccgctgtagcagaggccagtactttggagaacttgccctggtgactaacaaaccgcgggctgcttccgctcacgcaatcggtacagtgaagtgtctggcgatggacgtgcaggccttcgaacgacttctgggcccatgcatggaaattatgaaacgcaacatcgccacttacgaggagcagctggtagctctcttcggaactaacatggatattgttgagccaacagcttag

SEQ ID NO: 131465 - DNA, 1218 bp, Artificial Sequence
  derived and/or modified sequence
atgagcattgaaatccctgccggccttacagagctcctgcaagggttcactgtagaggtgctccgacatcaaccggccgacctgctcgagtttgcattgcaacatttcacccgtctgcagcaggagaatgagcgtaaggggactgcccgctttggacacgaggggaggacatggggggacctgggagccgcagccggaggcggcactccaagcaagggggtgaatttcgcagaggaggcggcacctgcagatgcgggcgcgttcaatgccccagtgataaatagatttacccggcgagcttctgtgtgcgctgaagcctataacccggacgaggaagaggatgacgctgagtcaaggattattcatccgaagacagacgaccagcggaatcggctgcaggaagcctgcaaggatattttactgtttaagaacctcgatcccgaacaaatgtcccaggtcttggatgcgatgtttgaaaaattggtgaaggatggagaacacgtaatcgatcagggagacgacggtgacaacttttacgtgatcgacaggggcactttcgacatctatgtaaaatgtgacggggtcggtcggtgcgtagggaactacgataatagggggagctttggggaactggcactgatgtacaacactccacgggcagctactattaccgccactagccccggggccctttggggcctggaccgagttacatttaggcgaatcatcgtgaagaataacgccaagaagaggaaaatgtacgagtcctttatcgagagtcttccatttctgaagagtctagagttcagcgagcgcctcaaggtggtggatgtgattgggaccaaggtttacaacgatggggagcaaatcattgctcaaggtgatagcgccgactcttttttcattgtagagagcggcgaggtcaaaattacaatgaagcggaagggcaaaagtgaagtggaggaaaatggagcagtagagattgcaaggtgtagccggggtcaatacttcggtgagttggccctggttactaacaagccaagagcagcctccgctcatgctattggtaccgtaaagtgcctggcaatggacgtgcaggcctttgaacgactgctcggaccttgcatggaaatcatgaaacggaatattgcaacctatgaggagcagcttgttgcattgttcgggaccaatatggacatcgttgagcctaccgcttag

SEQ ID NO: 131466 - DNA, 1257 bp, Artificial Sequence
  derived and/or modified sequence
atgtcgattgaaatccctgccggtctgactgagttactccagggatttacagtggaagtgctacgtcatcagccagccgatctcctggaattcgctctgcaacactttaccagactacaacaggagaatgaaagaaaaggcaccgctagatttgggcacgaggggagaacctggggagatcttggcgcggccgcgggcggcggcacccccagcaagggcgtgaatttcgcagaagagccgatgcagagcgacagtgaagacggagaggaggaggaggccgcacctgccgacgctggtgcctttaatgcccccgtaataaaccggtttacccggcgagcttccgtctgtgcggaggcatacaatcctgacgaagaagaggacgacgccgaatctcgaatcatccaccctaagactgacgaccagcgtaatcgcctgcaagaagcttgtaaagatattttactgttcaagaatttagatccagaacaaatgagtcaggtgctggatgccatgttcgagaagctggtcaaagacggggaacacgtgatcgatcagggcgacgatggcgacaacttttacgtgatcgatagggggacctttgacatttacgtcaagtgcgatggtgtaggtagatgtgtgggaaattatgacaaccggggctcattcggggagctggcactgatgtacaatactcctagggccgccacaatcacggctacctcgcctggcgccttgtggggtcttgaccgggtcacatttcgacgcatcatcgtgaagaataacgcgaagaaaagaaaaatgtacgagtctttcatcgaatctttgccatttcttaagtccctggaattcagtgagagactgaaggtggtggacgtgataggtactaaggtgtacaacgatggagagcagattattgcccagggcgactctgcagatagctttttcatcgttgagagcggtgaggtgaagataaccatgaaaaggaaagggaagtctgaagtggaggagaacggcgccgtagagatcgcacgatgtagtcgggggcagtacttcggggaacttgcccttgtgacaaataagccgcgcgccgcaagcgcccacgccatcgggactgttaagtgcctggccatggatgtccaggcctttgagcggctgctgggcccttgtatggagataatgaagaggaacattgctacgtacgaggagcaattggttgccctgttcggaactaatatggacatcgtagagccaaccgcttag

SEQ ID NO: 131467 - DNA, 1257 bp, Artificial Sequence
  derived and/or modified sequence
atgagcattgagatcccagctggcctgacagagctgctgcagggcttcaccgtggaggtgctgcggcaccagcctgctgacctgctggagtttgccctgcagcacttcacccggctgcagcaggagaatgaaaggaagggcacagccaggtttggacatgagggccgcacctggggagacctgggcgctgctgctgggggcggcacccccagcaagggcgtgaactttgctgaggagcccatgcagagcgacagtgaagatggagaggaggaggaggccgccccagcagatgctggggccttcaatgcccctgtgatcaaccgcttcacccggcgggcctctgtgtgtgccgaggcctacaacccagatgaggaggaggatgatgctgagagccgcatcatccaccccaagacagatgaccagaggaaccggctgcaggaggcctgcaaggacatcctgctcttcaagaacctggaccctgagcagatgagccaggtgctggatgccatgtttgagaagctggtgaaggatggagagcacgtgattgaccagggagatgatggagacaacttctacgtgattgaccggggcacctttgacatctacgtgaagtgtgatggagtgggccgctgtgtgggcaactatgacaacagaggcagctttggagagctggccctgatgtacaacacccccagggctgccaccatcacagccaccagccctggggccctgtggggcctggacagagtgaccttccgccgcatcatcgtgaagaacaatgccaagaagaggaagatgtatgagagcttcatcgagagcctgcccttcctgaagagcctggagttcagcgagcggctgaaggtggtggatgtgattggcaccaaggtgtacaatgatggagagcagatcatcgcccagggcgacagcgctgacagcttcttcatcgtggagagcggggaggtgaagatcaccatgaagaggaagggcaagtctgaggtggaggagaatggagctgtggagatcgcccgctgcagccggggccagtactttggagagctggccctggtgaccaacaagccccgggccgccagcgcccacgccatcggcaccgtgaagtgcctggccatggatgtgcaggcctttgagcggctgctgggcccctgcatggagatcatgaagaggaacatcgccacctatgaggagcagctggtggccctgtttggcaccaacatggacatcgtggagcccacagcctag

SEQ ID NO: 131468 - DNA, 1218 bp, Artificial Sequence
  derived and/or modified sequence
atgagcattgagatcccagctggcctgacagagctgctgcagggcttcaccgtggaggtgctgcggcaccagcctgctgacctgctggagtttgccctgcagcacttcacccggctgcagcaggagaatgaaaggaagggcacagccaggtttggacatgagggccgcacctggggagacctgggcgctgctgctgggggcggcacccccagcaagggcgtgaactttgctgaggaggccgccccagcagatgctggggccttcaatgcccctgtgatcaaccgcttcacccggcgggcctctgtgtgtgccgaggcctacaacccagatgaggaggaggatgatgctgagagccgcatcatccaccccaagacagatgaccagaggaaccggctgcaggaggcctgcaaggacatcctgctcttcaagaacctggaccctgagcagatgagccaggtgctggatgccatgtttgagaagctggtgaaggatggagaacatgtgattgaccagggagatgatggagacaacttctacgtgattgaccggggcacctttgacatctacgtgaagtgtgatggagtgggccgctgtgtgggcaactatgacaacagaggcagctttggagagctggccctgatgtacaacaccccccgggccgccaccatcacagccaccagccctggggccctgtggggcctggacagagtgaccttccgccgcatcatcgtgaagaacaatgccaagaagaggaagatgtatgagagcttcatcgagagcctgcccttcctgaagagcctggagttcagcgagcggctgaaggtggtggatgtgattggcaccaaggtgtacaatgatggagagcagatcatcgcccagggcgacagcgctgacagcttcttcatcgtggagagcggggaggtgaagatcaccatgaagaggaagggcaagtctgaggtggaggagaatggagctgtggagatcgcccgctgcagccggggccagtactttggagagctggccctggtgaccaacaagcccagggctgccagcgcccacgccatcggcaccgtgaagtgcctggccatggatgtgcaggcctttgagcggctgctgggcccctgcatggagatcatgaagagaaatattgccacctatgaggagcagctggtggccctgtttggcaccaacatggacatcgtggagcccacagcctag

SEQ ID NO: 131469 - DNA, 1257 bp, Artificial Sequence
  derived and/or modified sequence
atgagcatcgagatccccgccggcctgaccgagctgctgcagggcttcacggttgaagtcttgaggcaccagccggcggatctactagagttcgcccttcagcacttcacccgcctgcagcaggagaatgagagaaaggggactgctcggtttgggcacgaggggcggacatggggtgatcttggagcagctgccgggggagggacacctagcaagggagtaaactttgcggaggagccaatgcagtcagactcggaagacggggaagaagaagaagccgcaccagcggatgctggcgcatttaacgcccctgtgataaataggtttacgcgacgtgcaagcgtctgtgcagaggcttataaccccgatgaggaagaagacgacgcagagtcaaggattattcacccaaaaaccgatgaccaaaggaaccgcctccaggaggcttgtaaagatatccttctgttcaaaaacctggatccggaacaaatgtcgcaggtgctggacgccatgttcgagaagttagtaaaagatggggaacatgtaatcgatcagggcgatgacggagataatttctacgtgatagaccgcgggacctttgacatctacgtaaagtgcgacggagttggccgttgtgtgggcaattacgataaccgggggtcctttggcgaactcgcactgatgtacaacactccaagagccgccaccatcacagccaccagtcctggggctctctgggggttggacagagtcactttcaggcggattattgttaaaaacaacgctaagaagagaaagatgtatgaaagctttatcgagtcactaccctttctgaaatccctggagttctcggagaggttaaaagttgtggacgtcatcgggactaaggtttataatgacggggagcagattatcgctcagggcgattcagccgattctttttttatcgtggagtctggggaggtgaagatcactatgaagcgtaagggcaagtcggaggtggaagaaaatggagctgtcgaaatagcgcgctgtagccgcggccagtattttggggaactggccctggttacaaataaaccccgtgccgctagcgcacacgctataggcacagtgaagtgtttggccatggatgtacaggcttttgagcgtttgctgggcccatgcatggagatcatgaagcgtaatattgccacctatgaggagcagttagtggctctgtttggcactaatatggacattgtggagcctacagcgtag

SEQ ID NO: 131470 - DNA, 1218 bp, Artificial Sequence
  derived and/or modified sequence
atgagcatcgagatccccgccggcctgaccgagctgctgcagggcttcacagttgaggtgctcaggcaccagccggcagaccttttggaatttgctctccagcatttcactagactccagcaggaaaacgaacgcaagggaactgcgcggtttgggcatgagggccgtacatggggagacctcggcgccgccgctgggggcgggacgcctagcaaaggggttaactttgcagaagaggcagcacctgcggatgccggggcgttcaacgccccagtgatcaacaggtttacccggcgtgcttccgtttgtgcggaggcatacaatccggacgaggaggaggatgacgccgagtcaagaattatccaccccaaaactgacgaccaacggaaccgacttcaagaggcctgcaaagacattctcttgttcaagaacctcgatccagagcaaatgtctcaggtgctggacgctatgtttgagaaactggtcaaggacggcgagcatgtgattgaccaaggcgacgatggggataacttttacgtgatcgatcgcggaacgttcgacatttatgtgaagtgcgacggagtaggacgctgcgtaggaaattatgataatagggggagttttggcgagttggccttaatgtacaacaccccacgagcagcaaccatcacggcgacaagccccggggcactttggggactggatagggtcaccttcagaaggataatcgtaaaaaacaatgctaagaaacgtaaaatgtatgaatcctttatcgaaagcctcccctttcttaagagccttgaattcagtgaacgcctgaaagtcgtggacgtcatcggaaccaaggtctataacgatggagagcaaattatcgcccagggtgacagtgcagactctttctttattgttgagagtggggaagtcaaaattactatgaagcgcaagggaaagagcgaagtcgaagaaaatggagcagttgaaattgcgcgctgctcccgagggcagtatttcggcgagctcgccttggttaccaataagcctagagccgcctctgctcatgctataggcactgttaagtgccttgccatggacgtacaggcgtttgaaaggctccttgggccctgcatggagataatgaaaagaaatatcgccacgtatgaagagcagcttgtcgcgttattcgggactaacatggacatagtggaaccgaccgcctag

SEQ ID NO: 131471 - DNA, 1257 bp, Artificial Sequence
  derived and/or modified sequence
atgagcatcgagatccccgccggcctgaccgagctgctgcagggcttcaccgtggaggtcctgcgccatcagccagcagacctcctcgagtttgccctgcagcatttcacgcgactgcagcaggagaatgagaggaagggtacagcaagattcgggcacgagggccgcacatggggggacttgggcgctgctgccggcggcggtacaccatctaagggagtaaattttgctgaggaaccaatgcagtcagactccgaagatggtgaagaagaagaagcggcccctgccgatgctggtgccttcaacgcacctgtcatcaacaggttcacgagaagggcaagcgtgtgcgcagaagcatacaaccctgacgaggaggaggacgacgctgaatcgaggatcattcaccctaaaaccgacgatcagcggaaccgactccaggaggcctgtaaggacatactgctgttcaagaatctggaccccgagcaaatgtctcaagtgctagacgcaatgttcgagaagttagttaaggacggagaacatgtgatagatcagggcgacgatggggacaacttctatgtcatagatcgaggaaccttcgacatttatgttaagtgcgatggagtgggaagatgcgtggggaattacgacaaccgaggcagttttggcgaacttgccctgatgtacaatactccaagagctgcgacgataaccgccacttcccctggtgccctgtggggcctggatcgcgtgacgttccgcagaattatagtgaagaacaatgccaagaagcggaagatgtatgagagctttatagagagcttaccctttttgaagtctctagaattttccgaacgcctcaaagtggtggatgtgattggcactaaagtgtacaatgatggcgagcagataatagcacagggggattccgccgatagcttctttattgtggagagcggtgaggtaaaaataactatgaaacggaaaggaaaatctgaggtcgaggagaacggggctgttgaaatcgcccggtgtagccgtggccaatactttggagagctggccctagttaccaacaaaccaagggctgcatctgcccacgccattggtacagtaaaatgccttgccatggacgtgcaggcttttgagcgtcttctgggcccttgcatggaaatcatgaagaggaatattgcaacttacgaagagcagctggtggcactgtttggaactaacatggacattgtggaaccgactgcatag

SEQ ID NO: 131472 - DNA, 1257 bp, Artificial Sequence
  derived and/or modified sequence
atgtccattgagattccagctggcctcacggagcttctacagggattcaccgtcgaggtgctcagacatcaacctgctgacctcttggaattcgccctgcagcattttacccggctccagcaggaaaacgaacggaaagggactgcgcgatttgggcatgaggggcgaacctggggtgatctgggggcagccgctggcggaggcacaccttcaaaaggcgtgaacttcgcggaagagccaatgcagagcgattctgaggatggcgaagaggaagaagccgcacccgctgacgcgggagccttcaatgccccagtgatcaaccgcttcacaaggcgtgcgagcgtgtgtgcagaggcctacaatccagacgaggaggaggatgatgctgaatctagaatcattcaccctaagacagatgaccagagaaatcgcttgcaggaagcgtgtaaagatatattattgtttaaaaatctggacccggagcagatgtcacaggtgttggacgctatgttcgagaagctggttaaggatggcgagcacgtaatcgatcagggagatgacggcgataatttttacgtaatcgataggggtaccttcgacatatatgtaaaatgcgacggggtggggcgatgcgtcggcaattacgacaatagaggatcctttggtgagttagctctgatgtacaacacaccccgagccgcaaccatcaccgctacaagcccaggagcactgtggggcctggaccgcgtaaccttcagaagaattatagtgaagaataacgccaaaaagcgaaaaatgtacgagagcttcattgagtcactgccctttttgaaaagcttagaattctctgaaaggttgaaagtggtcgatgtcatcggcaccaaggtgtataacgatggtgagcaaattatcgcccagggagattcagccgattcattctttattgttgaaagcggtgaagtcaaaattaccatgaaaagaaaaggcaagagtgaggtcgaagagaatggtgccgtagagatcgctcggtgttcccgcggacagtatttcggtgagcttgccctcgttacaaataagcccagggccgcaagcgcacatgccatcgggaccgttaaatgcttggccatggacgtgcaggccttcgaaagactgctggggccatgcatggaaattatgaaacgcaacatcgccacgtacgaagagcagttggtggcactcttcgggaccaacatggacattgtggagcccactgcttag

SEQ ID NO: 131473 - DNA, 1218 bp, Artificial Sequence
  derived and/or modified sequence
atgtccattgagatcccagccggactcacagagctcctccagggtttcaccgtagaagttctgcggcaccagccagccgatctcttagagttcgccctgcagcacttcactagactgcaacaggagaatgagaggaaaggtactgcacgattcggccacgaagggcgtacttggggcgatctgggcgcagcagctggagggggaaccccgagtaaaggggttaatttcgcggaggaggcagctccagctgacgccggagcgttcaacgcgccagttatcaaccgctttactcggcgtgccagcgtgtgcgcagaagcatacaacccagatgaggaagaagatgacgctgaaagcagaattatccaccctaagaccgacgaccagaggaatagattgcaggaggcctgcaaggacatcttgttgtttaaaaatttggaccctgagcagatgtcccaggtcctggacgcaatgtttgagaaactagtgaaggacggagaacacgtgattgaccagggcgacgacggagacaacttctacgtaatagatcgcggaacatttgatatctacgtgaagtgcgatggagtgggcagatgtgtcggtaattacgacaatcgcggatcctttggcgagctggcactgatgtataacacccctagggcggcaacgatcactgccacctcccctggtgcactctggggactggaccgagtcacatttaggaggataatagtgaagaacaacgccaaaaaacgtaaaatgtatgaaagtttcattgaatccctgccctttctcaagtctttggagttctcggagcggctcaaggttgtagacgtgatcggaacaaaagtttataacgacggggagcagatcatcgctcagggcgatagcgcagattcattctttatcgttgagtctggcgaagtgaagattactatgaagagaaagggcaaatctgaagtcgaagaaaacggagccgtggagattgcgcgatgcagtcgcggtcaatatttcggggagctcgctctggttacaaacaaaccccgagcagcctcagcccacgccatcggcacagtaaagtgcctcgcaatggatgtgcaggctttcgagcggctgttagggccatgcatggaaatcatgaaacgaaacatcgcaacatacgaggagcagctggtcgcattgtttggaacgaatatggatattgtggagccaaccgcttag

SEQ ID NO: 131474 - DNA, 1257 bp, Artificial Sequence
  derived and/or modified sequence
atgtcaattgaaattcctgcgggactcactgaactgctccaaggattcacagtcgaagttctgcgacatcagccggctgacttattagagttcgcactgcagcatttcacccgcttacagcaagaaaatgagcggaagggcaccgcacgttttggacacgagggcaggacttggggagacttgggcgcagcggcagggggagggaccccctctaaaggtgtgaactttgccgaggaacctatgcaaagcgactcagaagacggagaggaggaagaagccgcaccggcagatgcaggagcattcaacgctccggtcatcaacagattcacacgcagagcatctgtttgtgccgaggcctacaaccctgacgaggaggaggatgatgcggagtctcgcatcatccatccgaaaacggacgatcagcggaaccgccttcaggaagcttgcaaggacatcctcctgtttaagaacttggatcctgaacagatgtcccaggtcctggacgctatgtttgaaaagctggttaaagatggcgagcacgttatcgaccagggggatgatggggataacttttatgtgatagacaggggcacttttgacatctacgtgaagtgcgatggtgtgggcaggtgtgtgggaaactacgataaccggggatcgtttggggaacttgcgcttatgtataacacgcccagagccgcaacgatcactgccaccagtcccggagctctatggggactggacagagtgaccttcaggagaatcatcgttaagaacaatgctaaaaagcggaaaatgtatgaatcctttatcgagtccctaccttttctgaaatctctggaattcagcgagcgcttaaaagtggtcgacgtgattggaaccaaagtgtacaatgatggcgagcagatcattgcccagggtgattcagcagactctttctttatagtcgaaagtggcgaagtgaaaatcactatgaaacgaaagggcaagtctgaggtggaagagaacggcgctgtcgagattgctaggtgttcaaggggccagtattttggtgagcttgcattggtaacaaataaaccccgagctgccagtgcgcatgccattggcaccgtgaagtgcctggctatggatgttcaagccttcgagcgcctgctcggtccctgcatggaaattatgaagcggaacatagcaacatacgaagagcaactcgtggcgctctttggtacaaatatggatatcgtcgagcctactgcctag

SEQ ID NO: 131475 - DNA, 3745 bp, Artificial Sequence
  derived and/or modified sequence
gccgcggctggagcgggaggagcaggagatgctgccagccctcccggggccgcgctcgctcagccgccgccaccacacggagcagacgcgcgccgggagccgcgggccgggccagccgggccgccggggcccagtgcgccgcgctcgcagccggtagcgcgccagcgccgtaggcgctcgctcggcagccgcggggccctaggccgtgccggggagggggcgagggcggcgcccaggcgcctgccgccccggaggcaggatgagcatcgagatcccggcgggactgacggagctgctgcagggcttcacggtggaggtgctgaggcaccagcccgcggacctgctggagttcgcgctgcagcacttcacccgcctgcagcaggagaacgagcgcaaaggcaccgcgcgcttcggccatgagggcaggacctggggggacctgggcgccgctgccgggggcggcacccccagcaagggggtcaacttcgccgaggagcccatgcagtccgactccgaggacggggaggaggaggaggcggcgcccgcggacgcaggggcgttcaatgctccagtaataaaccgattcacaaggcgtgcctcagtatgtgcagaagcttataatcctgatgaagaagaagatgatgcagagtccaggattatacatccaaaaactgatgatcaaagaaataggttgcaagaggcttgcaaagacatcctgctgtttaagaatctggatccggagcagatgtctcaagtattagatgccatgtttgaaaaattggtcaaagatggggagcatgtaattgatcaaggtgacgatggtgacaacttttatgtaattgatagaggcacatttgatatttatgtgaaatgtgatggtgttggaagatgtgttggtaactatgataatcgtgggagtttcggcgaactggccttaatgtacaatacacccagagcagctacaatcactgctacctctcctggtgctctgtggggtttggacagggtaaccttcaggagaataattgtgaaaaacaatgccaaaaagagaaaaatgtatgaaagctttattgagtcactgccattccttaaatctttggagttttctgaacgcctgaaagtagtagatgtgataggcaccaaagtatacaacgatggagaacaaatcattgctcagggagattcggctgattcttttttcattgtagaatctggagaagtgaaaattactatgaaaagaaagggtaaatcagaagtggaagagaatggtgcagtagaaatcgctcgatgctcgcggggacagtactttggagagcttgccctggtaactaacaaacctcgagcagcttctgcccacgccattgggactgtcaaatgtttagcaatggatgtgcaagcatttgaaaggcttctgggaccttgcatggaaattatgaaaaggaacatcgctacctatgaagaacagttagttgccctgtttggaacgaacatggatattgttgaacccactgcatgaagcaaaagtatggagcaagacctgtagtgacaaaattacacagtagtggttagtccactgagaatgtgtttgtgtagatgccaagcattttctgtgatttcaggttttttcctttttttacatttacaacgtatcaataaacagtagtgatttaatagtcaataggctttaacatcactttctaaagagtagttcataaaaaaatcaacatactgataaaatgactttgtactccacaaaattatgactgaaaggtttattaaaatgattgtaatatatagaaagtatctgtgtttaagaagataattaaaggatgttatcataggctatatgtgttttacttattcagactgataatcatattagtgactatccccatgtaagagggcacttggcaattaaacatgctacacagcatggcatcacttttttttataactcattaaacacagtaaaattttaatcatttttgttttaaagttttctagcttgataagttatgtgctggccttggcctattggtgaaatggtataaaatatcatatgcagttttaaaactttttatatttttgcaataaagtacattttgactttgttggcataatgtcagtaacatacatattccagtggttttatggacaggcaatttagtcattatgataataaggaaaacagtgttttagatgagagatcattaatgcatttttccctcatcaagcatatatctgcttttttttattttgcaattctctgtattctatgtctttaaaaatttgatcttgacatttaatgtcacaaagttttgtttttttaaaaagtgatttaaacttaagatccgacattttttgtattctttaagattttacacctaaaaaatctctcctatcccaaaaataatgtgggatccttatcagcatgcccacagtttatttctttgttcttcactaggcctgcataatacagtcctatgtagacatctgttcccttgggtttccgttctttcttaggatggttgccaacccacaatctcattgatcagcagccaatatgggtttgtttggtttttttaattcttaaaaacatcctctagaggaatagaaacaaatttttatgagcataaccctatataaagacaaaatgaatttctgaccttaccatatataccattaggccttgccattgctttaatgtagactcatagttgaaattagtgcagaaagaactcagatgtactagattttcattgttcattgatatgctcagtatgctgccacataagatgaatttaattatattcaaccaaagcaatatactcttacatgatttctaggccccatgacccagtgtctagagacattaattctaaccagttgtttgcttttaaatgagtgatttcattttgggaaacaggtttcaaatgaatatatatacatgggtaaaattactctgtgctagtgtagtcttactagagaatgtttatggtcccacttgtatatgaaaatgtggttagaatgttaattggataatgtatatataagaagttaaagtatgtaaagtataacttcagccacatttttagaacactgtttaacatttttgcaaaaccttcttgtaggaaaagagagctctctacatgaagatgacttgttttatatttcagattttattttaaaagccatgtctgttaaacaagaaaaaacacaaaagaactccagattcctggttcatcattctgtattcttactcactttttcaagttatctattttgttgcataaactaattgttaactattcatggaacagcaaacgcctgtttaataaagaactttgaccaaggctataaatgccacgtacattattttcagtattgttggttatatttaaattttccttacaataaagcacacttttataataaaatacatgaattattgtttttcatacttttttgcttgtttctttaaagttttctgacgtgcataatgcataattcattgaaaagcatgatagcaatgtggcatgtggaagcgaacccccagggcataacatagtaagaaagtatggttctgtatggcaataggtttttaaaattattagctattcatcatgtgtgggagaaataattgtggtgtgttgcagatttatttggccatttagaataaccaaatcaatctggctaactaggaatttatgtgtaaaattatctgattaaaacagctcaagtttga

SEQ ID NO: 131476 - DNA, 3468 bp, Artificial Sequence
  derived and/or modified sequence
cgcctgccgccccggaggcaggatgagcatcgagatcccggcgggactgacggagctgctgcagggcttcacggtggaggtgctgaggcaccagcccgcggacctgctggagttcgcgctgcagcacttcacccgcctgcagcaggagaacgagcgcaaaggcaccgcgcgcttcggccatgagggcaggacctggggggacctgggcgccgctgccgggggcggcacccccagcaagggggtcaacttcgccgaggaggcggcgcccgcggacgcaggggcgttcaatgctccagtaataaaccgattcacaaggcgtgcctcagtatgtgcagaagcttataatcctgatgaagaagaagatgatgcagagtccaggattatacatccaaaaactgatgatcaaagaaataggttgcaagaggcttgcaaagacatcctgctgtttaagaatctggatccggagcagatgtctcaagtattagatgccatgtttgaaaaattggtcaaagatggggagcatgtaattgatcaaggtgacgatggtgacaacttttatgtaattgatagaggcacatttgatatttatgtgaaatgtgatggtgttggaagatgtgttggtaactatgataatcgtgggagtttcggcgaactggccttaatgtacaatacacccagagcagctacaatcactgctacctctcctggtgctctgtggggtttggacagggtaaccttcaggagaataattgtgaaaaacaatgccaaaaagagaaaaatgtatgaaagctttattgagtcactgccattccttaaatctttggagttttctgaacgcctgaaagtagtagatgtgataggcaccaaagtatacaacgatggagaacaaatcattgctcagggagattcggctgattcttttttcattgtagaatctggagaagtgaaaattactatgaaaagaaagggtaaatcagaagtggaagagaatggtgcagtagaaatcgctcgatgctcgcggggacagtactttggagagcttgccctggtaactaacaaacctcgagcagcttctgcccacgccattgggactgtcaaatgtttagcaatggatgtgcaagcatttgaaaggcttctgggaccttgcatggaaattatgaaaaggaacatcgctacctatgaagaacagttagttgccctgtttggaacgaacatggatattgttgaacccactgcatgaagcaaaagtatggagcaagacctgtagtgacaaaattacacagtagtggttagtccactgagaatgtgtttgtgtagatgccaagcattttctgtgatttcaggttttttcctttttttacatttacaacgtatcaataaacagtagtgatttaatagtcaataggctttaacatcactttctaaagagtagttcataaaaaaatcaacatactgataaaatgactttgtactccacaaaattatgactgaaaggtttattaaaatgattgtaatatatagaaagtatctgtgtttaagaagataattaaaggatgttatcataggctatatgtgttttacttattcagactgataatcatattagtgactatccccatgtaagagggcacttggcaattaaacatgctacacagcatggcatcacttttttttataactcattaaacacagtaaaattttaatcatttttgttttaaagttttctagcttgataagttatgtgctggccttggcctattggtgaaatggtataaaatatcatatgcagttttaaaactttttatatttttgcaataaagtacattttgactttgttggcataatgtcagtaacatacatattccagtggttttatggacaggcaatttagtcattatgataataaggaaaacagtgttttagatgagagatcattaatgcatttttccctcatcaagcatatatctgcttttttttattttgcaattctctgtattctatgtctttaaaaatttgatcttgacatttaatgtcacaaagttttgtttttttaaaaagtgatttaaacttaagatccgacattttttgtattctttaagattttacacctaaaaaatctctcctatcccaaaaataatgtgggatccttatcagcatgcccacagtttatttctttgttcttcactaggcctgcataatacagtcctatgtagacatctgttcccttgggtttccgttctttcttaggatggttgccaacccacaatctcattgatcagcagccaatatgggtttgtttggtttttttaattcttaaaaacatcctctagaggaatagaaacaaatttttatgagcataaccctatataaagacaaaatgaatttctgaccttaccatatataccattaggccttgccattgctttaatgtagactcatagttgaaattagtgcagaaagaactcagatgtactagattttcattgttcattgatatgctcagtatgctgccacataagatgaatttaattatattcaaccaaagcaatatactcttacatgatttctaggccccatgacccagtgtctagagacattaattctaaccagttgtttgcttttaaatgagtgatttcattttgggaaacaggtttcaaatgaatatatatacatgggtaaaattactctgtgctagtgtagtcttactagagaatgtttatggtcccacttgtatatgaaaatgtggttagaatgttaattggataatgtatatataagaagttaaagtatgtaaagtataacttcagccacatttttagaacactgtttaacatttttgcaaaaccttcttgtaggaaaagagagctctctacatgaagatgacttgttttatatttcagattttattttaaaagccatgtctgttaaacaagaaaaaacacaaaagaactccagattcctggttcatcattctgtattcttactcactttttcaagttatctattttgttgcataaactaattgttaactattcatggaacagcaaacgcctgtttaataaagaactttgaccaaggctataaatgccacgtacattattttcagtattgttggttatatttaaattttccttacaataaagcacacttttataataaaatacatgaattattgtttttcatacttttttgcttgtttctttaaagttttctgacgtgcataatgcataattcattgaaaagcatgatagcaatgtggcatgtggaagcgaacccccagggcataacatagtaagaaagtatggttctgtatggcaataggtttttaaaattattagctattcatcatgtgtgggagaaataattgtggtgtgttgcagatttatttggccatttagaataaccaaatcaatctggctaactaggaatttatgtgtaaaattatctgattaaaacagctcaagtttg

SEQ ID NO: 131477 - DNA, 1385 bp, Artificial Sequence
  derived and/or modified sequence
agccgccgccaccacacggaggcaggatgagcatcgagatcccggcgggactgacggagctgctgcagggcttcacggtggaggtgctgaggcaccagcccgcggacctgctggagttcgcgctgcagcacttcacccgcctgcagcaggagaacgagcgcaaaggcaccgcgcgcttcggccatgagggcaggacctggggggacctgggcgccgctgccgggggcggcacccccagcaagggggtcaacttcgccgaggagcccatgcagtccgactccgaggacggggaggaggaggaggcggcgcccgcggacgcaggggcgttcaatgctccagtaataaaccgattcacaaggcgtgcctcagtatgtgcagaagcttataatcctgatgaagaagaagatgatgcagagtccaggattatacatccaaaaactgatgatcaaagaaataggttgcaagaggcttgcaaagacatcctgctgtttaagaatctggatccggagcagatgtctcaagtattagatgccatgtttgaaaaattggtcaaagatggggagcatgtaattgatcaaggtgacgatggtgacaacttttatgtaattgatagaggcacatttgatatttatgtgaaatgtgatggtgttggaagatgtgttggtaactatgataatcgtgggagtttcggcgaactggccttaatgtacaatacacccagagcagctacaatcactgctacctctcctggtgctctgtggggtttggacagggtaaccttcaggagaataattgtgaaaaacaatgccaaaaagagaaaaatgtatgaaagctttattgagtcactgccattccttaaatctttggagttttctgaacgcctgaaagtagtagatgtgataggcaccaaagtatacaacgatggagaacaaatcattgctcagggagattcggctgattcttttttcattgtagaatctggagaagtgaaaattactatgaaaagaaagggtaaatcagaagtggaagagaatggtgcagtagaaatcgctcgatgctcgcggggacagtactttggagagcttgccctggtaactaacaaacctcgagcagcttctgcccacgccattgggactgtcaaatgtttagcaatggatgtgcaagcatttgaaaggcttctgggaccttgcatggaaattatgaaaaggaacatcgctacctatgaagaacagttagttgccctgtttggaacgaacatggatattgttgaacccactgcatgaagcaaaagtatggagcaagacctgtagtgacaaaattacacagtagtggttagtccactgagaatgtgtttgtgtagatgccaagcattttctgtgatttca

SEQ ID NO: 131478 - DNA, 1257 bp, Artificial Sequence
  derived and/or modified sequence
atgagcatcgagatccccgccggcctgaccgagctgctgcagggcttcaccgtggaggtgctgagacaccagcccgccgacctgctggagttcgccctgcagcacttcaccagactgcagcaggagaacgagagaaagggcaccgccagattcggccacgagggcagaacctggggcgacctgggcgccgccgccggcggcggcacccccagcaagggcgtgaacttcgccgaggagcccatgcagagcgacagcgaggacggcgaggaggaggaggccgcccccgccgacgccggcgccttcaacgcccccgtgatcaacagattcaccagaagagccagcgtgtgcgccgaggcctacaaccccgacgaggaggaggacgacgccgagagcagaatcatccaccccaagaccgacgaccagagaaacagactgcaggaggcctgcaaggacatcctgctgttcaagaacctggaccccgagcagatgagccaggtgctggacgccatgttcgagaagctggtgaaggacggcgagcacgtgatcgaccagggcgacgacggcgacaacttctacgtgatcgacagaggcaccttcgacatctacgtgaagtgcgacggcgtgggcagatgcgtgggcaactacgacaacagaggcagcttcggcgagctggccctgatgtacaacacccccagagccgccaccatcaccgccaccagccccggcgccctgtggggcctggacagagtgaccttcagaagaatcatcgtgaagaacaacgccaagaagagaaagatgtacgagagcttcatcgagagcctgcccttcctgaagagcctggagttcagcgagagactgaaggtggtggacgtgatcggcaccaaggtgtacaacgacggcgagcagatcatcgcccagggcgacagcgccgacagcttcttcatcgtggagagcggcgaggtgaagatcaccatgaagagaaagggcaagagcgaggtggaggagaacggcgccgtggagatcgccagatgcagcagaggccagtacttcggcgagctggccctggtgaccaacaagcccagagccgccagcgcccacgccatcggcaccgtgaagtgcctggccatggacgtgcaggccttcgagagactgctgggcccctgcatggagatcatgaagagaaacatcgccacctacgaggagcagctggtggccctgttcggcaccaacatggacatcgtggagcccaccgcctag

SEQ ID NO: 131479 - DNA, 1218 bp, Artificial Sequence
  derived and/or modified sequence
atgagcatcgagatccccgccggcctgaccgagctgctgcagggcttcaccgtggaggtgctgagacaccagcccgccgacctgctggagttcgccctgcagcacttcaccagactgcagcaggagaacgagagaaagggcaccgccagattcggccacgagggcagaacctggggcgacctgggcgccgccgccggcggcggcacccccagcaagggcgtgaacttcgccgaggaggccgcccccgccgacgccggcgccttcaacgcccccgtgatcaacagattcaccagaagagccagcgtgtgcgccgaggcctacaaccccgacgaggaggaggacgacgccgagagcagaatcatccaccccaagaccgacgaccagagaaacagactgcaggaggcctgcaaggacatcctgctgttcaagaacctggaccccgagcagatgagccaggtgctggacgccatgttcgagaagctggtgaaggacggcgagcacgtgatcgaccagggcgacgacggcgacaacttctacgtgatcgacagaggcaccttcgacatctacgtgaagtgcgacggcgtgggcagatgcgtgggcaactacgacaacagaggcagcttcggcgagctggccctgatgtacaacacccccagagccgccaccatcaccgccaccagccccggcgccctgtggggcctggacagagtgaccttcagaagaatcatcgtgaagaacaacgccaagaagagaaagatgtacgagagcttcatcgagagcctgcccttcctgaagagcctggagttcagcgagagactgaaggtggtggacgtgatcggcaccaaggtgtacaacgacggcgagcagatcatcgcccagggcgacagcgccgacagcttcttcatcgtggagagcggcgaggtgaagatcaccatgaagagaaagggcaagagcgaggtggaggagaacggcgccgtggagatcgccagatgcagcagaggccagtacttcggcgagctggccctggtgaccaacaagcccagagccgccagcgcccacgccatcggcaccgtgaagtgcctggccatggacgtgcaggccttcgagagactgctgggcccctgcatggagatcatgaagagaaacatcgccacctacgaggagcagctggtggccctgttcggcaccaacatggacatcgtggagcccaccgcctag

SEQ ID NO: 131480 - protein, 672 aa, Artificial Sequence
  derived and/or modified sequence
MADVFPGNDSTASQDVANRFARKGALRQKNVHEVKDHKFIARFFKQPTFCSHCTDFIWGFGKQGFQCQVCCFVVHKRCHEFVTFSCPGADKGPDTDDPRSKHKFKIHTYGSPTFCDHCGSLLYGLIHQGMKCDTCDMNVHKQCVINVPSLCGMDHTEKRGRIYLKAEVADEKLHVTVRDAKNLIPMDPNGLSDPYVKLKLIPDPKNESKQKTKTIRSTLNPQWNESFTFKLKPSDKDRRLSVEIWDWDRTTRNDFMGSLSFGVSELMKMPASGWYKLLNQEEGEYYNVPIPEGDEEGNMELRQKFEKAKLGPAGNKVISPSEDRKQPSNNLDRVKLTDFNFLMVLGKGSFGKVMLADRKGTEELYAIKILKKDVVIQDDDVECTMVEKRVLALLDKPPFLTQLHSCFQTVDRLYFVMEYVNGGDLMYHIQQVGKFKEPQAVFYAAEISIGLFFLHKRGIIYRDLKLDNVMLDSEGHIKIADFGMCKEHMMDGVTTRTFCGTPDYIAPEIIAYQPYGKSVDWWAYGVLLYEMLAGQPPFDGEDEDELFQSIMEHNVSYPKSLSKEAVSVCKGLMTKHPAKRLGCGPEGERDVREHAFFRRIDWEKLENREIQPPFKPKVCGKGAENFDKFFTRGQPVLTPPDQLVIANIDQSDFEGFSYVNPQFVHPILQSAV

SEQ ID NO: 131481 - DNA, 2019 bp, Artificial Sequence
  derived and/or modified sequence
atggccgacgtgttccccggcaacgacagcaccgccagccaggacgtggccaacagattcgccagaaagggcgccctgagacagaagaacgtgcacgaggtgaaggaccacaagttcatcgccagattcttcaagcagcccaccttctgcagccactgcaccgacttcatctggggcttcggcaagcagggcttccagtgccaggtgtgctgcttcgtggtgcacaagagatgccacgagttcgtgaccttcagctgccccggcgccgacaagggccccgacaccgacgaccccagaagcaagcacaagttcaagatccacacctacggcagccccaccttctgcgaccactgcggcagcctgctgtacggcctgatccaccagggcatgaagtgcgacacctgcgacatgaacgtgcacaagcagtgcgtgatcaacgtgcccagcctgtgcggcatggaccacaccgagaagagaggcagaatctacctgaaggccgaggtggccgacgagaagctgcacgtgaccgtgagagacgccaagaacctgatccccatggaccccaacggcctgagcgacccctacgtgaagctgaagctgatccccgaccccaagaacgagagcaagcagaagaccaagaccatcagaagcaccctgaacccccagtggaacgagagcttcaccttcaagctgaagcccagcgacaaggacagaagactgagcgtggagatctgggactgggacagaaccaccagaaacgacttcatgggcagcctgagcttcggcgtgagcgagctgatgaagatgcccgccagcggctggtacaagctgctgaaccaggaggagggcgagtactacaacgtgcccatccccgagggcgacgaggagggcaacatggagctgagacagaagttcgagaaggccaagctgggccccgccggcaacaaggtgatcagccccagcgaggacagaaagcagcccagcaacaacctggacagagtgaagctgaccgacttcaacttcctgatggtgctgggcaagggcagcttcggcaaggtgatgctggccgacagaaagggcaccgaggagctgtacgccatcaagatcctgaagaaggacgtggtgatccaggacgacgacgtggagtgcaccatggtggagaagagagtgctggccctgctggacaagccccccttcctgacccagctgcacagctgcttccagaccgtggacagactgtacttcgtgatggagtacgtgaacggcggcgacctgatgtaccacatccagcaggtgggcaagttcaaggagccccaggccgtgttctacgccgccgagatcagcatcggcctgttcttcctgcacaagagaggcatcatctacagagacctgaagctggacaacgtgatgctggacagcgagggccacatcaagatcgccgacttcggcatgtgcaaggagcacatgatggacggcgtgaccaccagaaccttctgcggcacccccgactacatcgcccccgagatcatcgcctaccagccctacggcaagagcgtggactggtgggcctacggcgtgctgctgtacgagatgctggccggccagccccccttcgacggcgaggacgaggacgagctgttccagagcatcatggagcacaacgtgagctaccccaagagcctgagcaaggaggccgtgagcgtgtgcaagggcctgatgaccaagcaccccgccaagagactgggctgcggccccgagggcgagagagacgtgagagagcacgccttcttcagaagaatcgactgggagaagctggagaacagagagatccagccccccttcaagcccaaggtgtgcggcaagggcgccgagaacttcgacaagttcttcaccagaggccagcccgtgctgaccccccccgaccagctggtgatcgccaacatcgaccagagcgacttcgagggcttcagctacgtgaacccccagttcgtgcaccccatcctgcagagcgccgtgtag

SEQ ID NO: 131482 - DNA, 2019 bp, Artificial Sequence
  derived and/or modified sequence
atggcggacgtcttccccggcaatgatagtaccgcaagccaggacgtggcaaatcgttttgccagaaagggcgcgctgcggcaaaaaaacgtgcacgaggtcaaagaccacaaattcatcgcgcgtttcttcaagcaaccaaccttttgtagccattgcacagatttcatttggggttttggcaagcaggggtttcaatgccaggtgtgctgctttgtggttcacaaacggtgccacgagttcgtgaccttttcgtgtccaggggctgataaaggacccgatacagatgatccacgttctaagcacaaattcaagatccatacttacggttctccaaccttctgtgaccattgcggctcactgttgtatggcttgattcatcagggcatgaagtgcgacacttgcgatatgaatgtgcacaaacagtgcgtgatcaacgtcccatctctgtgtggtatggatcacaccgagaaacgcggaagaatatatctgaaggccgaggttgccgacgaaaaactgcatgtaacagttagggacgcaaagaatctaatcccgatggatcccaatggactgtctgacccctatgtgaaactgaagttaatcccggaccctaagaacgaatccaagcaaaagacaaaaaccattagatcgaccctgaacccgcagtggaatgagtccttcacctttaagctgaagccatccgacaaggataggcggctcagtgtggaaatttgggactgggatcgaacaacacgcaatgattttatggggagcttatctttcggcgttagcgagctcatgaagatgcccgcctccgggtggtacaagctgcttaatcaggaagaaggcgagtattataacgtgccaattcctgagggtgacgaggagggtaacatggagctgcgacagaagttcgaaaaagctaaattgggcccagctggtaataaggtgatctctccatcagaggacaggaaacagccgagcaacaacctggaccgggtgaaactgactgacttcaatttccttatggttctgggtaaaggatctttcggcaaggtgatgttggctgatagaaagggaactgaggaactgtacgccatcaagatcctcaagaaagacgtggtgatccaagacgatgacgttgagtgtacaatggttgagaaacgagtgctggctctgcttgacaagccacctttcctgacccagctccattcatgttttcagacagtagacagactgtacttcgtgatggaatatgtaaatggcggagacctcatgtatcacatccaacaagtgggtaaatttaaggagcctcaggcagtgttctatgccgctgaaatctccatcggactgtttttcctgcacaagcggggcattatctaccgggacctcaagctggataatgttatgctggattcagagggtcacatcaaaatcgctgacttcggcatgtgcaaagaacacatgatggatggggtgaccacgcggaccttttgcgggacaccagactacattgctccggaaattattgcataccaaccctacgggaagagcgtggattggtgggcctacggagtcctcctctatgagatgctcgccgggcagccaccattcgatggtgaagacgaagacgagctgttccaaagcattatggagcataacgtctcataccccaaatccttgtctaaagaagctgtaagcgtgtgcaaaggcctaatgactaagcaccccgctaagcgattgggatgtggtcccgagggagagcgcgatgtcagggagcatgccttcttcaggagaatcgactgggagaagctggagaatcgagaaattcagccgccgttcaaacccaaggtgtgtggcaagggagctgagaacttcgacaagttttttacacggggtcagccggtgttgactccccccgaccaattagtcatcgctaatatcgatcagagcgactttgagggcttcagctatgtcaatccacagtttgtgcaccctatattgcaatcagcagtctag

SEQ ID NO: 131483 - DNA, 2019 bp, Artificial Sequence
  derived and/or modified sequence
atggctgatgtgtttcctggaaatgacagcacagccagccaggatgtggccaacagatttgccaggaaaggagccctgcggcagaagaatgtgcatgaggtgaaggaccacaagttcatcgcccgcttcttcaagcagcccaccttctgcagccactgcacagacttcatctggggctttgggaagcagggcttccagtgccaggtgtgctgctttgtggtgcacaagcgctgccatgaatttgtgaccttcagctgccctggagctgacaagggccctgacacagatgaccccaggagcaagcacaagttcaagatccacacctacggcagccccaccttctgtgaccactgcggcagcctgctgtatggcctcatccaccagggcatgaagtgtgacacctgtgacatgaatgtgcacaagcagtgtgtgatcaacgtgcccagcctgtgtggcatggaccacacagagaagaggggccgcatctacctgaaggccgaggtggctgatgagaagctgcacgtgacagtgagagatgccaagaacctgatccccatggaccccaacggcctgagtgacccctacgtgaagctgaagctgatcccagaccccaagaatgaaagcaagcagaagaccaagaccatccgcagcaccctgaacccccagtggaatgaaagcttcaccttcaagctgaagcccagcgacaaggaccggcggctgtctgtggagatctgggactgggacaggaccaccagaaatgacttcatgggcagcctgagctttggagtgtctgagctgatgaagatgcctgccagcggctggtacaagctgctgaaccaggaggagggggagtactacaacgtgcccatcccagaaggagatgaggagggcaacatggagctgcggcagaagtttgagaaggccaagctgggccctgctggcaacaaggtgatcagccccagcgaggacaggaagcagcccagcaacaacctggacagagtgaagctgacagacttcaacttcctgatggtgctgggcaagggcagctttgggaaggtgatgctggccgacagaaaaggaacagaggagctgtatgccatcaagatcctgaagaaggatgtggtgatccaggatgatgatgtggagtgcaccatggtggagaagagggtgctggccctgctggacaagccacccttcctgacccagctgcacagctgcttccagacagtggaccggctgtactttgtgatggagtatgtgaatggaggagacctgatgtaccacatccagcaggtgggcaagttcaaggagccccaggccgtgttctacgccgctgagatcagcatcggcctcttcttcctgcacaagaggggcatcatctacagagacctgaagctggacaacgtgatgctggacagcgagggccacatcaagattgctgactttggcatgtgcaaggagcacatgatggatggagtgaccaccaggaccttctgtggcaccccagactacatcgcccctgagatcatcgcctaccagccctacggcaagtctgtggactggtgggcctacggcgtgctgctgtatgagatgctggccggccagcccccatttgatggagaagatgaagatgagctgttccagagcatcatggagcacaacgtgtcctaccccaagagcctgagcaaggaggccgtgtctgtgtgcaagggcctgatgaccaagcacccagccaagaggctgggctgcggccctgagggggagagagatgtgcgggagcacgccttcttcagaagaattgactgggagaagctggagaaccgggagatccagccccccttcaagcccaaggtgtgtgggaaaggagctgagaactttgacaagttcttcacccggggccagcctgtgctgaccccaccagaccagctggtgattgccaacatcgaccagagcgactttgagggcttctcctatgtgaacccccagtttgtgcaccccatcctgcagagcgctgtgtag

SEQ ID NO: 131484 - DNA, 2019 bp, Artificial Sequence
  derived and/or modified sequence
atggccgacgtgttccccggcaacgacagcaccgccagccaggacgttgccaatcggttcgcacgtaagggagcactgagacagaaaaacgtacacgaggttaaggaccacaaatttatagcacgattctttaagcagcccaccttttgctctcactgtactgactttatctggggcttcgggaagcaaggcttccagtgtcaggtgtgttgcttcgttgtgcataaaagatgtcacgagttcgtgactttttcttgtcctggtgctgataaggggccagatactgatgatccacggagcaaacacaaatttaagattcacacctacgggtcaccaactttttgtgatcattgtgggagccttctttacggcctcattcaccaggggatgaaatgtgacacctgtgatatgaacgtccacaagcaatgtgtgattaacgtaccctctctatgcggcatggatcatacggaaaagaggggccgtatttacttgaaagcagaagtcgccgatgagaaactacatgttacagtcagagacgcaaaaaatctgattcctatggatccgaatggactgtccgacccatacgtgaaattgaaattgataccagatccaaagaacgagtccaagcagaagactaagacaattagatccaccctcaaccctcagtggaacgaaagttttaccttcaaacttaaacctagtgataaggacagacggctgagtgtggaaatctgggattgggaccggactacacgtaatgattttatggggtcattgtcttttggcgtgagcgagctcatgaagatgcctgcttcaggatggtataagctgctgaaccaggaggaaggcgagtattacaacgtcccaatccccgaaggagatgaagaggggaatatggagctgcgtcagaaatttgagaaagctaagctcggaccagcaggtaataaagtgatcagcccctctgaggatcgaaagcaaccctctaataacttagaccgggtcaagttaaccgacttcaacttccttatggtattgggcaagggttcattcggcaaagtgatgctggctgaccggaaaggaacagaagagctgtacgctatcaaaatcctgaaaaaggatgtggtcatccaggatgacgatgttgaatgcacaatggtcgagaagagagtgcttgccctgttggacaagcctccatttttgacacaactacacagctgttttcagacagttgatcggctttatttcgtgatggaatatgtaaatggtggggatttgatgtatcacattcaacaggtcggaaaattcaaagagcctcaggcagtcttttacgctgccgagatctccatcggactcttcttcttgcacaagagggggatcatctatcgtgatttgaagctcgataatgttatgcttgatagcgagggtcacataaagatcgccgacttcggaatgtgtaaagagcacatgatggatggtgtgaccacacgtaccttctgcgggactcccgactacatagctccagagatcatagcctatcaaccttatggcaaatccgtggactggtgggcctatggggtcctgctctacgagatgctggcaggacagccgccattcgacggcgaggatgaagacgagctattccagagcattatggagcataatgtgagttatccaaaatccctgagcaaggaagccgtcagcgtctgcaagggcttgatgaccaagcatcccgctaagaggctgggctgcggcccggagggtgaaagggatgtcagagagcacgcctttttcaggcgtatcgattgggaaaaactggaaaatcgtgagatccagccgccattcaagcccaaggtgtgtggcaagggagcggagaacttcgataaattcttcacccgcggccagcccgtgctcacccccccagatcaactcgtaattgctaatatcgatcaatctgatttcgaggggtttagttacgtcaacccccaattcgtacatcccattttgcagagcgcggtttag

SEQ ID NO: 131485 - DNA, 2019 bp, Artificial Sequence
  derived and/or modified sequence
atggccgatgtttttcccggaaatgatagcacggcctcacaagatgtggctaaccggttcgcgaggaagggagccctgagacagaagaacgtacatgaggtgaaggatcacaagtttatcgcgagattctttaagcaacccacattttgttcacactgcacagacttcatctgggggtttggtaagcaagggttccagtgccaggtatgctgtttcgttgtgcacaagaggtgtcatgaattcgtgacttttagctgtcccggagcagacaagggacctgacacagatgatccaagatcaaagcataaatttaaaatccatacgtatggctcaccgactttttgcgaccactgtgggtcgcttctgtacggcctgattcatcaagggatgaaatgcgacacatgcgacatgaacgtgcataagcaatgcgtgataaatgtgccttcgctgtgtggtatggatcatacagagaagcgcggacgaatctaccttaaggccgaggtggctgatgagaaactgcacgtgacagtgcgcgacgctaaaaacctcattccgatggatccaaacggacttagcgatccgtacgtgaagctgaagctgattcctgatccaaagaatgagtctaaacaaaaaaccaagacaattcggagtaccctgaatccccagtggaatgagtcttttacctttaaattgaaaccttccgacaaagatcggaggctttctgtggagatctgggactgggataggacgacacggaatgactttatggggtctctatcgtttggcgtatcggagctgatgaaaatgcctgcaagcgggtggtataagctcttaaaccaggaggagggagagtattataacgtgcctattcctgaaggggatgaggaggggaatatggaactgcgacagaagttcgaaaaagccaaacttgggccagctgggaataaggtgatcagcccctccgaagaccgaaaacaacccagcaataatctcgatagggtcaaactgacagatttcaatttccttatggttctcggcaaaggctccttcggaaaagtgatgctggctgacaggaaaggcaccgaggaactctacgccatcaaaattttaaaaaaggatgtcgtgatccaagatgatgatgtagaatgcactatggtagaaaaacgggtcttggcccttcttgacaagccgcctttccttacccagctgcacagctgcttccagaccgtggaccgcctttactttgtaatggaatacgttaacggaggggatctgatgtaccacattcagcaggtggggaaattcaaggagccacaggcagtgttttatgctgctgagatttcaataggattattctttttacacaagcgcggaattatttatcgagaccttaagctcgataacgtcatgctcgacagtgaaggtcacattaagattgccgacttcgggatgtgcaaggaacatatgatggacggtgtgaccacccggacattttgtggaacaccggattacatcgctccagaaataatcgcttatcaaccatacggaaagtcagtggattggtgggcttacggcgttctgctatatgagatgctggcaggccagcctcccttcgatggcgaagatgaggatgaacttttccaatctataatggagcataacgtgagttatcctaaatccctgagcaaagaggcagtatccgtctgcaagggattgatgaccaaacatccagctaaacgccttggatgtggtccggagggcgagcgtgatgtcagggagcatgcgttttttagacgtatcgattgggaaaaacttgagaaccgagaaattcagcccccattcaagcccaaggtctgcggaaagggggctgagaattttgataagttttttactcggggacagccagtgctcactccacccgaccagctcgtgatagcaaacatcgatcagagcgacttcgagggcttttcgtatgttaacccccagttcgtgcatcccattctgcagtcagcagtttag

SEQ ID NO: 131486 - DNA, 3004 bp, Artificial Sequence
  derived and/or modified sequence
gaggcaagaggtggttgggggggaccatggctgacgttttcccgggcaacgactccacggcgtctcaggacgtggccaaccgcttcgcccgcaaaggggcgctgaggcagaagaacgtgcacgaggtgaaggaccacaaattcatcgcgcgcttcttcaagcagcccaccttctgcagccactgcaccgacttcatctgggggtttgggaaacaaggcttccagtgccaagtttgctgttttgtggtccacaagaggtgccatgaatttgttactttttcttgtccgggtgcggataagggacccgacactgatgaccccaggagcaagcacaagttcaaaatccacacttacggaagccccaccttctgcgatcactgtgggtcactgctctatggacttatccatcaagggatgaaatgtgacacctgcgatatgaacgttcacaagcaatgcgtcatcaatgtccccagcctctgcggaatggatcacactgagaagagggggcggatttacctaaaggctgaggttgctgatgaaaagctccatgtcacagtacgagatgcaaaaaatctaatccctatggatccaaacgggctttcagatccttatgtgaagctgaaacttattcctgatcccaagaatgaaagcaagcaaaaaaccaaaaccatccgctccacactaaatccgcagtggaatgagtcctttacattcaaattgaaaccttcagacaaagaccgacgactgtctgtagaaatctgggactgggatcgaacaacaaggaatgacttcatgggatccctttcctttggagtttcggagctgatgaagatgccggccagtggatggtacaagttgcttaaccaagaagaaggtgagtactacaacgtacccattccggaaggggacgaggaaggaaacatggaactcaggcagaaattcgagaaagccaaacttggccctgctggcaacaaagtcatcagtccctctgaagacaggaaacaaccttccaacaaccttgaccgagtgaaactcacggacttcaatttcctcatggtgttgggaaaggggagttttggaaaggtgatgcttgccgacaggaagggcacagaagaactgtatgcaatcaaaatcctgaagaaggatgtggtgattcaggatgatgacgtggagtgcaccatggtagaaaagcgagtcttggccctgcttgacaaacccccgttcttgacgcagctgcactcctgcttccagacagtggatcggctgtacttcgtcatggaatatgtcaacggtggggacctcatgtaccacattcagcaagtaggaaaatttaaggaaccacaagcagtattctatgcggcagagatttccatcggattgttctttcttcataaaagaggaatcatttatagggatctgaagttagataacgtcatgttggattcagaaggacatatcaaaattgctgactttgggatgtgcaaggaacacatgatggatggagtcacgaccaggaccttctgtgggactccagattatatcgccccagagataatcgcttatcagccgtatggaaaatctgtggactggtgggcctatggcgtcctgttgtatgaaatgcttgccgggcagcctccatttgatggtgaagatgaagacgagctatttcagtctatcatggagcacaacgtttcctatccaaaatccttgtccaaggaggctgtttctgtctgcaaaggactgatgaccaaacacccagccaagcggctgggctgtgggcctgagggggagagggacgtgagagagcatgccttcttccggaggatcgactgggaaaaactggagaacagggagatccagccaccattcaagcccaaagtgtgtggcaaaggagcagagaactttgacaagttcttcacacgaggacagcccgtcttaacaccacctgatcagctggttattgctaacatagaccagtctgattttgaagggttctcgtatgtcaacccccagtttgtgcaccccatcttacagagtgcagtatgaaactcaccagcgagaacaaacacctccccagcccccagccctccccgcagtgggaagtgaatccttaaccctaaaattttaaggccacggccttgtgtctgattccatatggaggcctgaaaattgtagggttattagtccaaatgtgatcaactgttcagggtctctctcttacaaccaagaacattatcttagtggaagatggtacgtcatgctcagtgtccagtttaattctgtagaagttacgtctggctctaggttaacccttcctagaaagcaagcagactgttgccccattttgggtacaatttgatatactttccataccctccatctgtggatttttcagcattggaatcccccaaccagagatgttaaagtgagcctgtcccaggaaacatctccacccaagacgtctttggaatccaagaacaggaagccaagagagtgagcagggagggattgggggtgggggaggcctcaaaataccgactgcgtccattctctgcctccatggaaacagcccctagaatctgaaaggccgggataaacctaatcactgttcccaaacattgacaaatcctaacccaaccatggtccagcagttaccagtttaaacaaaaaaacctcagatgagtgttgggtgaatctgtcatctggtaccctccttggttgataactgtcttgatacttttcattctttgtaagaggccaaatcgtctaaggacgttgctgaacaagcgtgtgaaatcatttcagatcaaggataagccagtgtgtacatatgttcattttaatctctgggagattatttttccatccagggtgccatcagtaatcatgccactactcaccagtgttgttcaccaacacccacccccacacacaccaacattttgctgcctaccttgttatccttctcaagaagctgaagtgtacgccctctccccttttgtgct

SEQ ID NO: 131487 - protein, 673 aa, Artificial Sequence
  derived and/or modified sequence
MADPAAGPPPSEGEESTVRFARKGALRQKNVHEVKNHKFTARFFKQPTFCSHCTDFIWGFGKQGFQCQVCCFVVHKRCHEFVTFSCPGADKGPASDDPRSKHKFKIHTYSSPTFCDHCGSLLYGLIHQGMKCDTCMMNVHKRCVMNVPSLCGTDHTERRGRIYIQAHIDRDVLIVLVRDAKNLVPMDPNGLSDPYVKLKLIPDPKSESKQKTKTIKCSLNPEWNETFRFQLKESDKDRRLSVEIWDWDLTSRNDFMGSLSFGISELQKASVDGWFKLLSQEEGEYFNVPVPPEGSEANEELRQKFERAKISQGTKVPEEKTTNTVSKFDNNGNRDRMKLTDFNFLMVLGKGSFGKVMLSERKGTDELYAVKILKKDVVIQDDDVECTMVEKRVLALPGKPPFLTQLHSCFQTMDRLYFVMEYVNGGDLMYHIQQVGRFKEPHAVFYAAEIAIGLFFLQSKGIIYRDLKLDNVMLDSEGHIKIADFGMCKENIWDGVTTKTFCGTPDYIAPEIIAYQPYGKSVDWWAFGVLLYEMLAGQAPFEGEDEDELFQSIMEHNVAYPKSMSKEAVAICKGLMTKHPGKRLGCGPEGERDIKEHAFFRYIDWEKLERKEIQPPYKPKACGRNAENFDRFFTRHPPVLTPPDQEVIRNIDQSEFEGFSFVNSEFLKPEVKS

SEQ ID NO: 131488 - DNA, 2022 bp, Artificial Sequence
  derived and/or modified sequence
atggccgaccccgccgccggccccccccccagcgagggcgaggagagcaccgtgagattcgccagaaagggcgccctgagacagaagaacgtgcacgaggtgaagaaccacaagttcaccgccagattcttcaagcagcccaccttctgcagccactgcaccgacttcatctggggcttcggcaagcagggcttccagtgccaggtgtgctgcttcgtggtgcacaagagatgccacgagttcgtgaccttcagctgccccggcgccgacaagggccccgccagcgacgaccccagaagcaagcacaagttcaagatccacacctacagcagccccaccttctgcgaccactgcggcagcctgctgtacggcctgatccaccagggcatgaagtgcgacacctgcatgatgaacgtgcacaagagatgcgtgatgaacgtgcccagcctgtgcggcaccgaccacaccgagagaagaggcagaatctacatccaggcccacatcgacagagacgtgctgatcgtgctggtgagagacgccaagaacctggtgcccatggaccccaacggcctgagcgacccctacgtgaagctgaagctgatccccgaccccaagagcgagagcaagcagaagaccaagaccatcaagtgcagcctgaaccccgagtggaacgagaccttcagattccagctgaaggagagcgacaaggacagaagactgagcgtggagatctgggactgggacctgaccagcagaaacgacttcatgggcagcctgagcttcggcatcagcgagctgcagaaggccagcgtggacggctggttcaagctgctgagccaggaggagggcgagtacttcaacgtgcccgtgccccccgagggcagcgaggccaacgaggagctgagacagaagttcgagagagccaagatcagccagggcaccaaggtgcccgaggagaagaccaccaacaccgtgagcaagttcgacaacaacggcaacagagacagaatgaagctgaccgacttcaacttcctgatggtgctgggcaagggcagcttcggcaaggtgatgctgagcgagagaaagggcaccgacgagctgtacgccgtgaagatcctgaagaaggacgtggtgatccaggacgacgacgtggagtgcaccatggtggagaagagagtgctggccctgcccggcaagccccccttcctgacccagctgcacagctgcttccagaccatggacagactgtacttcgtgatggagtacgtgaacggcggcgacctgatgtaccacatccagcaggtgggcagattcaaggagccccacgccgtgttctacgccgccgagatcgccatcggcctgttcttcctgcagagcaagggcatcatctacagagacctgaagctggacaacgtgatgctggacagcgagggccacatcaagatcgccgacttcggcatgtgcaaggagaacatctgggacggcgtgaccaccaagaccttctgcggcacccccgactacatcgcccccgagatcatcgcctaccagccctacggcaagagcgtggactggtgggccttcggcgtgctgctgtacgagatgctggccggccaggcccccttcgagggcgaggacgaggacgagctgttccagagcatcatggagcacaacgtggcctaccccaagagcatgagcaaggaggccgtggccatctgcaagggcctgatgaccaagcaccccggcaagagactgggctgcggccccgagggcgagagagacatcaaggagcacgccttcttcagatacatcgactgggagaagctggagagaaaggagatccagcccccctacaagcccaaggcctgcggcagaaacgccgagaacttcgacagattcttcaccagacacccccccgtgctgaccccccccgaccaggaggtgatcagaaacatcgaccagagcgagttcgagggcttcagcttcgtgaacagcgagttcctgaagcccgaggtgaagagctag

SEQ ID NO: 131489 - DNA, 2022 bp, Artificial Sequence
  derived and/or modified sequence
atggcagacccggctgcgggtcccccaccaagcgagggggaggaaagtaccgtgagattcgctcgaaagggcgcacttcggcagaagaatgttcatgaggtgaaaaaccataagttcacagcaaggttcttcaaacagccgaccttctgtagccattgtaccgactttatatggggctttggcaagcaagggttccagtgtcaagtgtgttgctttgtggtgcataaaaggtgtcacgagtttgttacattcagttgcccaggggccgataaagggcccgccagtgacgatccccgctccaaacacaagtttaagatccacacctactcctctccgaccttctgcgatcactgcggctcccttttgtatggcctgatccatcaggggatgaagtgtgacacgtgcatgatgaacgtacataagcgctgcgtcatgaatgtccctagcctgtgcggcactgaccatacagagcgtaggggaagaatttacatccaggcccacattgatcgcgatgtccttatcgtgctggtaagagacgcaaaaaacctcgtacctatggatcctaacggcctctctgacccctacgtgaagcttaaactgattcctgatcctaagtccgaaagcaaacaaaaaaccaaaactatcaagtgttctctgaatcccgaatggaacgagacattcagattccagctcaaggaatccgacaaagatagaaggctgagcgtagagatctgggattgggacctaacctctaggaacgatttcatgggttctttgtctttcggcatctccgaattgcagaaagctagcgtggacggttggttcaagctgttgtctcaggaagagggagagtattttaacgtgccggtgccccccgaggggagtgaggccaacgaagagcttaggcagaagtttgagcgtgcaaaaattagccaggggactaaggtccctgaagaaaaaacgaccaataccgtgtctaagttcgacaacaacggaaaccgtgatcggatgaagttgaccgacttcaacttcctcatggtgctcggtaaaggcagctttggcaaggtcatgctctccgaacggaagggcacagacgagctgtacgcagtaaaaatactgaagaaggacgtggtaatccaagatgacgatgtggaatgtaccatggtggaaaaacgcgtgcttgccctgcccgggaaacccccttttctgacacaattgcatagctgttttcagacaatggaccgactgtattttgtgatggaatacgttaatggcggtgacctgatgtaccatattcagcaggttggacggttcaaggagcctcatgccgtcttttatgcagcagaaatcgctatcggccttttctttttgcagtcaaagggcatcatttacagagacctcaaactggataacgtgatgttagactctgagggccatattaaaattgccgattttggcatgtgtaaagagaacatctgggatggcgtgaccacaaagacattctgcggtacgccagattacatcgctccagaaattatcgcctaccaaccatatggcaaatctgtggattggtgggcgttcggcgtcttattatatgagatgctcgcgggccaagctccctttgagggtgaggatgaggacgagttatttcagtctattatggagcacaacgtcgcatatccaaaatccatgagcaaagaggctgtcgctatctgcaaaggactcatgaccaagcatcccggaaaacgcctcggttgcggaccagagggggagcgtgatatcaaggaacatgccttcttccggtacattgattgggagaaactggagagaaaagagatacagccaccctataaaccaaaggcttgcgggaggaacgcggagaatttcgacagattctttactcgccatccacccgtgctgactcctcctgatcaagaggtgataaggaatatagaccaatccgagtttgaagggttctcctttgtgaatagcgaattcctgaagccagaagtcaaatcttag

SEQ ID NO: 131490 - DNA, 2022 bp, Artificial Sequence
  derived and/or modified sequence
atggctgaccctgctgctggccccccaccttctgagggggaggagagcacagtgcgctttgccaggaaaggagccctgcggcagaagaatgtgcatgaggtgaagaaccacaagttcaccgcccgcttcttcaagcagcccaccttctgcagccactgcacagacttcatctggggctttgggaagcagggcttccagtgccaggtgtgctgctttgtggtgcacaagcgctgccatgaatttgtgaccttcagctgccctggagctgacaagggccctgccagtgatgaccccaggagcaagcacaagttcaagatccacacctacagcagccccaccttctgtgaccactgcggcagcctgctgtatggcctcatccaccagggcatgaagtgtgacacctgcatgatgaatgtgcacaagagatgtgtgatgaatgtgcccagcctgtgtggcacagaccacacagagcggcggggccgcatctacatccaggcccacatcgacagagatgtgctgattgtgctggtgagagatgccaagaacctggtgcccatggaccccaacggcctgagtgacccctacgtgaagctgaagctgatcccagaccccaagtctgagagcaagcagaagaccaagaccatcaagtgcagcctgaaccctgagtggaatgagaccttccgcttccagctgaaggagagtgacaaggaccggcggctgtctgtggagatctgggactgggacctgaccagcagaaatgacttcatgggcagcctgagctttggcatcagcgagctgcagaaggcctctgtggatggctggttcaagctgctgagccaggaggagggggagtacttcaacgtgcctgtgcccccagagggcagcgaggccaatgaggagctgcggcagaagtttgagcgggccaagatcagccagggcaccaaggtgcctgaggagaagaccaccaacacagtgtccaagtttgacaacaatggaaacagagacaggatgaagctgacagacttcaacttcctgatggtgctgggcaagggcagctttgggaaggtgatgctgtctgagaggaagggcacagatgagctgtatgctgtgaagatcctgaagaaggatgtggtgatccaggatgatgatgtggagtgcaccatggtggagaagagggtgctggccctgcccgggaagccacccttcctgacccagctgcacagctgcttccagaccatggaccggctgtactttgtgatggagtatgtgaatggaggagacctgatgtaccacatccagcaggtgggccgcttcaaggagccccatgctgtgttctatgctgctgagatcgccatcggcctcttcttcctgcagagcaagggcatcatctacagagacctgaagctggacaacgtgatgctggacagcgagggccacatcaagattgctgactttggcatgtgcaaggagaacatctgggatggagtgaccaccaagaccttctgtggcaccccagactacatcgcccctgagatcatcgcctaccagccctacggcaagtctgtggactggtgggcctttggagtgctgctgtatgagatgctggccggccaggccccctttgaaggagaagatgaagatgagctgttccagagcatcatggagcacaacgtggcctaccccaagtccatgagcaaggaggccgtggccatctgcaagggcctgatgaccaagcaccctgggaagaggctgggctgcggccctgagggggagcgggacatcaaggagcacgccttcttccgctacatcgactgggagaagctggagaggaaggagatccagcccccctacaagcccaaggcctgtggcagaaatgcagaaaattttgaccgcttcttcaccaggcacccccctgtgctgaccccaccagaccaggaggtgatcagaaatattgaccagagcgagtttgagggcttctcctttgtgaacagcgagttcctgaagccagaggtgaagagctag

SEQ ID NO: 131491 - DNA, 2022 bp, Artificial Sequence
  derived and/or modified sequence
atggccgaccccgccgccggccccccccccagcgagggcgaggagagtaccgttcggttcgctaggaagggggcactgaggcagaagaacgttcacgaagtgaagaaccacaaatttacagctaggttctttaaacaacctaccttctgttcccattgtaccgatttcatctggggctttggcaaacagggctttcagtgtcaagtttgctgcttcgttgtgcataagcgctgccacgaatttgtcacattcagttgtcctggcgcagacaagggtccagccagtgatgatccacggtcaaagcacaaattcaagatccacacttactctagtcccaccttttgcgatcactgtggatccctactctacggcctgattcatcagggtatgaaatgtgacacttgtatgatgaatgtgcacaaaagatgcgtcatgaacgtgcctagtctgtgtggtactgatcacactgaaaggagagggaggatctatatccaggcacacatcgacagagatgtattgattgtcttggttagggatgctaagaatttggttcccatggatcctaacggactgtcagacccatacgtcaaactcaaattaattcctgatccgaagtcggagagcaagcagaaaacaaaaactattaagtgcagcttgaatcctgagtggaacgaaacttttaggttccaactcaaggaaagcgacaaagatcgccgactctccgttgagatctgggactgggacctgacttccagaaacgatttcatggggtccctcagcttcgggatatccgagttgcagaaagctagtgtagatggatggttcaagctgctctcacaggaagagggtgaatactttaatgtgccggtgccgcctgagggaagcgaggccaatgaagagctgaggcaaaagtttgagcgggcaaaaatcagccaagggacaaaggtgccggaagagaagaccaccaacacagtctcaaagttcgataataatgggaatcgtgaccggatgaagttgactgactttaacttcttaatggtgcttggcaaagggtcatttgggaaggtaatgcttagtgaacgtaagggtacagacgaactctacgcggtcaagatcctgaagaaagacgtggttatacaagatgacgacgtagaatgtacaatggtggagaagcgagtgctggctttacccgggaagccgccctttctcacacagctgcattcttgctttcagaccatggaccgtctgtacttcgtaatggaatatgttaatggaggtgacctgatgtatcacatacaacaggtgggccgtttcaaggagcctcacgcagtcttctatgccgccgagatcgcaatcggcctgtttttcctgcagagcaaagggattatttatagagatttgaaactcgataatgtgatgctggacagcgaaggacacatcaaaatcgcagacttcggcatgtgtaaagagaacatatgggacggcgttaccactaaaacgttttgcggcactcccgactacattgctccggaaattattgcctaccagccctacggcaagagcgtggactggtgggctttcggcgtgttactgtacgagatgctcgcaggacaggccccttttgaaggcgaggacgaagatgaattattccagtctatcatggagcataatgtagcctaccccaaatcgatgtccaaagaagcagtggcgatctgcaaaggcctgatgactaagcaccctgggaaacggcttggctgcggccctgagggtgagagggatattaaggaacatgccttcttccggtatatcgattgggaaaaactggagagaaaagaaattcagcccccttacaagcccaaagcctgcgggcgaaatgccgagaacttcgataggttttttaccaggcaccctcctgtgttgacacccccggaccaggaagtgatccgaaacattgatcagagcgagtttgaaggattctcatttgtgaatagcgagttcctgaaacctgaggtgaagtcctag

SEQ ID NO: 131492 - DNA, 2022 bp, Artificial Sequence
  derived and/or modified sequence
atggccgaccctgccgcaggccctccaccgtctgagggagaggagtctacggtcaggtttgccagaaagggagccctccgtcagaaaaatgtccatgaggtgaaaaatcataagttcacagctaggttttttaagcagcctacattctgcagccattgcacggattttatctggggtttcggcaaacaggggtttcagtgtcaggtttgctgcttcgtggtgcacaagagatgccatgaattcgttacattcagctgcccgggtgccgacaagggccctgcctcggacgaccccagatcaaagcataagttcaaaattcacacgtatagtagcccaaccttttgcgaccactgtggatcactgttatacggcctcatacaccagggaatgaagtgcgacacttgtatgatgaatgtacataaacggtgtgtgatgaatgtgccaagtctgtgtggtaccgatcacacagagagaagaggcaggatatatatccaggctcatatcgatagggacgttttgatcgtgctggtgagggatgccaaaaacctggtccccatggacccaaatgggctgtctgacccctatgtgaaacttaaattaattcctgatccgaaatccgagtctaagcagaaaacaaagacaatcaaatgctctctgaacccagagtggaacgagacattccgttttcagcttaaagaatccgataaggatcggagattgtctgtggagatctgggactgggatcttacgtctaggaacgacttcatgggaagcttgtcttttggaatctctgagctccaaaaggcctccgttgatggatggttcaagctgctgagccaagaggaaggagaatattttaatgtgcctgtccccccagaggggagtgaggctaatgaagaactgagacaaaaattcgagcgcgctaagataagtcaaggcaccaaagttcccgaagaaaaaacaactaacaccgtgagtaaattcgataataacgggaatagggatcggatgaagctgacagactttaattttctcatggttcttggaaaaggatccttcggaaaagtgatgcttagtgaaagaaaagggacagacgagctgtatgccgtgaagatattgaaaaaggacgtcgttatccaggatgacgacgtggagtgtaccatggtggagaaaagggtcctggccctccccggaaaacctccatttttgacacagctgcactcttgctttcagacaatggatcgtttatacttcgtaatggaatacgttaacggaggggacctgatgtaccatatacaacaagtgggtcgattcaaggaaccccacgctgtattctatgcggctgaaattgcaattggcttgttttttttacaatcaaaagggatcatctatagagatcttaagttggacaatgtaatgctagattcagaggggcacataaagatagcagactttggaatgtgcaaagagaatatctgggacggcgtgacaaccaagaccttttgtggcacgccagattacattgctcctgaaatcatcgcataccagccctacgggaaatccgtggactggtgggcctttggagtgctactttatgaaatgcttgcaggacaagccccatttgagggtgaggacgaagatgaactttttcaatccatcatggaacataatgtggcataccccaaaagtatgtctaaggaggctgtcgctatttgtaaaggattgatgactaaacaccccggaaagagattgggatgtgggccagagggagagagggatatcaaggagcacgctttttttcggtacattgactgggaaaaacttgagagaaaggagatacaaccaccttacaagcctaaggcctgtggacgaaatgccgagaatttcgaccggttcttcactcgccacccccctgttctgacacctcccgaccaagaggtgatacggaacattgaccaaagcgaatttgagggctttagctttgttaactccgaatttttgaaacccgaggtcaagagttag

SEQ ID NO: 131493 - DNA, 7969 bp, Artificial Sequence
  derived and/or modified sequence
gcgcgccgcggccgccagagccggcgcaggggaagcgcccgcggccccgggtgcagcagcggccgccgcctcccgcgcctccccggcccgcagcccgcggtcccgcggccccggggccggcacctctcgggctccggctccccgcgcgcaagatggctgacccggctgcggggccgccgccgagcgagggcgaggagagcaccgtgcgcttcgcccgcaaaggcgccctccggcagaagaacgtgcatgaggtcaagaaccacaaattcaccgcccgcttcttcaagcagcccaccttctgcagccactgcaccgacttcatctggggcttcgggaagcagggattccagtgccaagtttgctgctttgtggtgcacaagcggtgccatgaatttgtcacattctcctgccctggcgctgacaagggtccagcctccgatgacccccgcagcaaacacaagtttaagatccacacgtactccagccccacgttttgtgaccactgtgggtcactgctgtatggactcatccaccaggggatgaaatgtgacacctgcatgatgaatgtgcacaagcgctgcgtgatgaatgttcccagcctgtgtggcacggaccacacggagcgccgcggccgcatctacatccaggcccacatcgacagggacgtcctcattgtcctcgtaagagatgctaaaaaccttgtacctatggaccccaatggcctgtcagatccctacgtaaaactgaaactgattcccgatcccaaaagtgagagcaaacagaagaccaaaaccatcaaatgctccctcaaccctgagtggaatgagacatttagatttcagctgaaagaatcggacaaagacagaagactgtcagtagagatttgggattgggatttgaccagcaggaatgacttcatgggatctttgtcctttgggatttctgaacttcagaaagccagtgttgatggctggtttaagttactgagccaggaggaaggcgagtacttcaatgtgcctgtgccaccagaaggaagtgaggccaatgaagaactgcggcagaaatttgagagggccaagatcagtcagggaaccaaggtcccggaagaaaagacgaccaacactgtctccaaatttgacaacaatggcaacagagaccggatgaaactgaccgattttaacttcctaatggtgctggggaaaggcagctttggcaaggtcatgctttcagaacgaaaaggcacagatgagctctatgctgtgaagatcctgaagaaggacgttgtgatccaagatgatgacgtggagtgcactatggtggagaagcgggtgttggccctgcctgggaagccgcccttcctgacccagctccactcctgcttccagaccatggaccgcctgtactttgtgatggagtacgtgaatgggggcgacctcatgtatcacatccagcaagtcggccggttcaaggagccccatgctgtattttacgctgcagaaattgccatcggtctgttcttcttacagagtaagggcatcatttaccgtgacctaaaacttgacaacgtgatgctcgattctgagggacacatcaagattgccgattttggcatgtgtaaggaaaacatctgggatggggtgacaaccaagacattctgtggcactccagactacatcgcccccgagataattgcttatcagccctatgggaagtccgtggattggtgggcatttggagtcctgctgtatgaaatgttggctgggcaggcaccctttgaaggggaggatgaagatgaactcttccaatccatcatggaacacaacgtagcctatcccaagtctatgtccaaggaagctgtggccatctgcaaagggctgatgaccaaacacccaggcaaacgtctgggttgtggacctgaaggcgaacgtgatatcaaagagcatgcatttttccggtatattgattgggagaaacttgaacgcaaagagatccagcccccttataagccaaaagcttgtgggcgaaatgctgaaaacttcgaccgatttttcacccgccatccaccagtcctaacacctcccgaccaggaagtcatcaggaatattgaccaatcagaattcgaaggattttcctttgttaactctgaatttttaaaacccgaagtcaagagctaagtagatgtgtagatctccgtccttcatttctgtcattcaagctcaacggctattgtggtgacatttttatgtttttcattgccaagttgcatccatgtttgattttctgatgagactagagtgacagtgtttcagaacccaaatgtcctcaggtagtttggagcatctctatgagatgggattatgcagatggcctatggaaaatgcagctgcataattaacacattatcaaagtcctcttacaatttattttccgcagcatgtcagctaagtagacccaatggggagagaaaatgcctgctttctttccctctttttctgcactgccatattcacccccaaccatccaatctgtggataattggatgttagcggtactcttccacttccgggcctggagcttggcttgtatccaagtgtatggttgctttgcctaagaggaatccctctatttcacctgttctggaggcaccagaccttgaaaagaacatgctcaaaataaaatgttatctgttatttttgtaaactcaaagttaagatgatcaaagttctaaaattccaagaatgtgcttttagacggtctcaatctaaaagcacttcaaggggtcaaagggcaaccagcttgggtgctacctcagtgttgtagtttctgatactttatgtctttgctcaccctcatccccaaactacttgaaaagggcatttggcaccactctctgaaacaacacagtcactctagcaaggcccccaaagggccctggttttacattacatttcaaactttatttgctttggggttttgtttctgttgttgttcaaatgcaaaaaaaagaaaaaaaaagaaaaaaaaaggtgactcacattgttacacatgctttaaaatatgtattcaaatgttattaaccacaatgacgacctgctttgatttaaccaagaagacggctgcggagcctagcagactcaggcctgtgggaatgggatttgttacaaatctaggtttgttactggcttcagaaagctaattaagtgctctgaaaaagacaccgtttcttgaaacaaagatggttgtattcctcactttgatgttgttttgcaagatgtttgtggaaatgttcatttgtatctggatctctgttatgtgccatttttcttctagcatcgagatacaataaaaaaaaaaaaaaagaaaagaagaagaaatactatttcaaggaaaactgctctttttgagaaacgtggacctaaactacaaagtgggaactgaggagggaactcaggagaaaggaactaactgcggagctttaatcttggccccagtgttcagccactcggaggggcgggggctgtggcccattcaggggctgctggtgggctgtagtggggtgggatgacctggccagagccaacgaggatactggagcccaaagtcaagtttagagaccagctgggaacgtgaatggggctcttgattttcttatcaaaatcaccactcctcccagcttggactaaatattctttctagcaagcagctttgtgagctccctgaagcccaaggaaacccttcggtgggagaaatttcatttctgtctgagaggattaaggcagcaggtgactccccctcctcgcctgccgtgtcctgctattctcaggcagctctaaggagaattcttatcacagttcaagtgatttccagaagttccagggcttctgagagaccatcaagggaactttaacaacttgacaaatgtccttgaagtaagatgcctcatctttagggaaaaatggggtttggatttctgcttaggcaaagtctcctgcagttcatccttctctgtcctcttcttgcttcaggcttggggaccgtccctgctgtccccactgtggtggcaatcaggacctaaggtgaagcaaacttgaagttctatctgacaagtttaggcagtaagagaaggagggaaatcggagcaaagctccctcactttattgttgagaaactggcatctggaaagaggaaggaatttgcccaaagtcagtcagctgggataaaaacctgggtgtcctgtccagaaagtgcagggtgctttctgctctgtagcaaggcagcagacatctctgagccaggcccaccaacaggcccttatctggtggttggatcatgatcccattttgcttggacatgctctcaggaagataaaaaccatggagaaacactaggccattgacaaatgatctgagacaactttagaaaacaatgtaggatgaatggaaagagaaagaaaggaaagaaagaagaaaaagaaagaaggaaagaaagaaagagaaaggaaggaaggaaagaaggaaggaaaagaaggaaggaaggaaggaatatagtgttataaatactgcactcaacattttccaaattcttgccattatttttcaaaagtttaatagtttgcagaaatagatactcaagccaaagtctgttttagagaaactttccatggaaagtcagaatttctaccacttccttttctatccacatttccagtgcagaagaaactgagaaacagagctttttgaagagaggacagggccatagcaacaaggaccttcttgggggattaatgggaggtcagtagaattaataaccctccttggatgagtgctactgttttcacatggcttcagatgctatcaacctcaaagaaatgatctcaacagagaagcttattctctcccaacttctacggtaaaatccaggagtattttctctggggatctgcccacaggacaaagtccataaaagcaagtcctgtctggaccatgtggttatctgaagcattagccatcaccagcacaacaaacggggcagggctttccaaggtggggctggtcagaagggaatctttgataagaggcccacaggcagggaaagcgaaatagggttgatgagaccaggggagacctaaaaaaaaggcagctttgtgtcttctagctccaaatatacctgccttttagctcacacactgtcctggagttctcagacctttaggggccctaacacagttcagttcatacaggggttcaaaagggacagtggcccatttgggagacctttaggatcaatgggaatcaattccattgttttgcctcagagtaaagtttctggctcggggacaattataagttgcaaaaaggatagaggcatatcccaagtcttccttcattccacaaataattacaaacaacctactgtgtgccaggcactattcttagcactggaaatacactagtgaagaagcagatgaggaccctgtttattgtttctctccaagaaattctccaagaatattgtttcttggagagaaataataaataaacaagacaatttctgaaagcaataagtgcaatcaagataattaaaggatgctaaagtgtgacttgtggggattgggagagagatgcacagacaatattaaagaggaggcattcgagctttgttgtgaacaccggaagtaacatgccgagcgcctgggggatggaaactcctatagcaccccacaggctaacagcaagcaggacaagacaaaaagggcaggtgggacatggtagagatggaccctacccaggaaacagctccatcagcatcttagcctgccccactctagccacacatacccacgtgtgctcctgagttcagtgtgcccacctcactcccacaccctcacatagacttggcaagagtaaggagggaactccatagagacattttacctatctcaggggagcagccacaaagaagcaagtcttgtaaaaggtcttttgcaaaggagagtgaacccagcaatgagagatccttaacagctagtgcccattagggggctaaacctaaagcctgggtggtgatggctcaaacgctaatgagtcagtgaatccttaccgaccccctggcctttataatctgaggcaactttggctgcagcccgggaatgtgcagggcactagggaatacaaggccttcttccctggttgtcttgtaataaaacagccatggggttgtccctccagtccgagagactgtgatgaggcctacatagcagcgatgtggtcaggtaaaaatcaggaacccactgaaatcttgggcaagccaccctgcctgcttgtgcctcggttctctcatatgtcatatataggaggtgaggactccagctccacctgccccaggtgggtgtggtgatgatgaggaaagacaagaggcttgcaaggaccctgaagaggtcggagcatcatacagattcctttattagcccacattctgatgttccctggtgagacttgccccaagcaattgctagtaaatgggggttaatttcttctccacctccctactgaacaaaaaaagaaatgccagacttactaggagaatcgagttgctttgagtttcttttgttttgttttgttttgttttgttttaaggctccccttacacaccctcctttaagctttgggttttctctcttatagtttgttgacacatgctaaaaatgtctttggagagaacttctgcctgataaacacccaattctagactgtgggtggattttcgagctgacggtggtcaattcctttcattaagcagtgatctgatttctccacatggccattctgccttcttgggggcagagtagatgggcagcagttcaccttttcagagaaagaggtcttctagccacctgggctgctactgaatggttttctccaggacgctctacctaatgattatttctataacattaagcatggtaataagtagcttccaattcaattcatcctaaagccaaagaaaatacagcaacacacacacacacacacacacacacacacacacacacacacacacaccactttatggcaattcttaactgacattcaatgacttacttcttttcttagaaaatttccaccacatttctatccccaagccaacatacaatgtgaaatgaaagccagtgcgtggagtgcagctgctaaaaattttcagcacagggctctttctgactctgctcatgagatggtatcagccacccaatgactggcgtatcttggtcctgtgtctttcttcttacgctgtgttaatgtgtttactttccatttggcagagagacaagagagacacctccaacttcgacaaagagttcaccagacagcctgtggaactgacccccactgataaactcttcatcatgaacttggaccaaaatgaatttgctggcttctcttatactaacccagagtttgtcattaatgtgtaggtgaatgcaaactccatcgttgagcctggggtgtaagacttcaagccaagcgtatgtatcaattctagtcttccaggattcacggtgcacatgctggcattcaacatgtggaaagcttgtcttagagggcttttctttgtatgtgtagcttgctagtttgttttctacatttgaaaatgtttagtttagaataagcgcattatccaattatagaggtacaattttccaaacttccagaaactcatcaaatgaacagacaatgtcaaaactactgtgtctgataccaaaatgcttcagtatttgtaatttttcaagtcagaagctgatgttcctggtaaaagtttttacagttattctataatatcttctttgaatgctaagcatgagcgatatttttaaaaattgtgagtaagctttgcagttactgtgaactattgtctcttggaggaagttttttgtttaagaattgatatgattaaactgaattaatatatgcaa

SEQ ID NO: 131494 - protein, 697 aa, Artificial Sequence
  derived and/or modified sequence
MAGLGPGVGDSEGGPRPLFCRKGALRQKVVHEVKSHKFTARFFKQPTFCSHCTDFIWGIGKQGLQCQVCSFVVHRRCHEFVTFECPGAGKGPQTDDPRNKHKFRLHSYSSPTFCDHCGSLLYGLVHQGMKCSCCEMNVHRRCVRSVPSLCGVDHTERRGRLQLEIRAPTADEIHVTVGEARNLIPMDPNGLSDPYVKLKLIPDPRNLTKQKTRTVKATLNPVWNETFVFNLKPGDVERRLSVEVWDWDRTSRNDFMGAMSFGVSELLKAPVDGWYKLLNQEEGEYYNVPVADADNCSLLQKFEACNYPLELYERVRMGPSSSPIPSPSPSPTDPKRCFFGASPGRLHISDFSFLMVLGKGSFGKVMLAERRGSDELYAIKILKKDVIVQDDDVDCTLVEKRVLALGGRGPGGRPHFLTQLHSTFQTPDRLYFVMEYVTGGDLMYHIQQLGKFKEPHAAFYAAEIAIGLFFLHNQGIIYRDLKLDNVMLDAEGHIKITDFGMCKENVFPGTTTRTFCGTPDYIAPEIIAYQPYGKSVDWWSFGVLLYEMLAGQPPFDGEDEEELFQAIMEQTVTYPKSLSREAVAICKGFLTKHPGKRLGSGPDGEPTIRAHGFFRWIDWERLERLEIPPPFRPRPCGRSGENFDKFFTRAAPALTPPDRLVLASIDQADFQGFTYVNPDFVHPDARSPTSPVPVPVM

SEQ ID NO: 131495 - protein, 327 aa, Artificial Sequence
  derived and/or modified sequence
MAGLGPGVGDSEGGPRPLFCRKGALRQKVVHEVKSHKFTARFFKQPTFCSHCTDFIWGIGKQGLQCQVCSFVVHRRCHEFVTFECPGAGKGPQTDDPRNKHKFRLHSYSSPTFCDHCGSLLYGLVHQGMKCSCCEMNVHRRCVRSVPSLCGVDHTERRGRLQLEIRAPTADEIHVTVGEARNLIPMDPNGLSDPYVKLKLIPDPRNLTKQKTRTVKATLNPVWNETFVFNLKPGDVERRLSVEVWDWDRTSRNDFMGAMSFGVSELLKAPVDGWLVTTPWNCMSGCGWAPLPLPSPPLPLVPPTPSAASSGRVQDACTSPTSASSWF

SEQ ID NO: 131496 - protein, 548 aa, Artificial Sequence
  derived and/or modified sequence
MPRICDLRVSRRWEGPPDGRCEMNVHRRCVRSVPSLCGVDHTERRGRLQLEIRAPTADEIHVTVGEARNLIPMDPNGLSDPYVKLKLIPDPRNLTKQKTRTVKATLNPVWNETFVFNLKPGDVERRLSVEVWDWDRTSRNDFMGAMSFGVSELLKAPVDGWYKLLNQEEGEYYNVPVADADNCSLLQKFEACNYPLELYERVRMGPSSSPIPSPSPSPTDPKRCFFGASPGRLHISDFSFLMVLGKGSFGKVMLAERRGSDELYAIKILKKDVIVQDDDVDCTLVEKRVLALGGRGPGGRPHFLTQLHSTFQTPDRLYFVMEYVTGGDLMYHIQQLGKFKEPHAAFYAAEIAIGLFFLHNQGIIYRDLKLDNVMLDAEGHIKITDFGMCKENVFPGTTTRTFCGTPDYIAPEIIAYQPYGKSVDWWSFGVLLYEMLAGQFLTKHPGKRLGSGPDGEPTIRAHGFFRWIDWERLERLEIPPPFRPRPCGRSGENFDKFFTRAAPALTPPDRLVLASIDQADFQGFTYVNPDFVHPDARSPTSPVPVPVM

SEQ ID NO: 131497 - DNA, 2094 bp, Artificial Sequence
  derived and/or modified sequence
atggccggcctgggccccggcgtgggcgacagcgagggcggccccagacccctgttctgcagaaagggcgccctgagacagaaggtggtgcacgaggtgaagagccacaagttcaccgccagattcttcaagcagcccaccttctgcagccactgcaccgacttcatctggggcatcggcaagcagggcctgcagtgccaggtgtgcagcttcgtggtgcacagaagatgccacgagttcgtgaccttcgagtgccccggcgccggcaagggcccccagaccgacgaccccagaaacaagcacaagttcagactgcacagctacagcagccccaccttctgcgaccactgcggcagcctgctgtacggcctggtgcaccagggcatgaagtgcagctgctgcgagatgaacgtgcacagaagatgcgtgagaagcgtgcccagcctgtgcggcgtggaccacaccgagagaagaggcagactgcagctggagatcagagcccccaccgccgacgagatccacgtgaccgtgggcgaggccagaaacctgatccccatggaccccaacggcctgagcgacccctacgtgaagctgaagctgatccccgaccccagaaacctgaccaagcagaagaccagaaccgtgaaggccaccctgaaccccgtgtggaacgagaccttcgtgttcaacctgaagcccggcgacgtggagagaagactgagcgtggaggtgtgggactgggacagaaccagcagaaacgacttcatgggcgccatgagcttcggcgtgagcgagctgctgaaggcccccgtggacggctggtacaagctgctgaaccaggaggagggcgagtactacaacgtgcccgtggccgacgccgacaactgcagcctgctgcagaagttcgaggcctgcaactaccccctggagctgtacgagagagtgagaatgggccccagcagcagccccatccccagccccagccccagccccaccgaccccaagagatgcttcttcggcgccagccccggcagactgcacatcagcgacttcagcttcctgatggtgctgggcaagggcagcttcggcaaggtgatgctggccgagagaagaggcagcgacgagctgtacgccatcaagatcctgaagaaggacgtgatcgtgcaggacgacgacgtggactgcaccctggtggagaagagagtgctggccctgggcggcagaggccccggcggcagaccccacttcctgacccagctgcacagcaccttccagacccccgacagactgtacttcgtgatggagtacgtgaccggcggcgacctgatgtaccacatccagcagctgggcaagttcaaggagccccacgccgccttctacgccgccgagatcgccatcggcctgttcttcctgcacaaccagggcatcatctacagagacctgaagctggacaacgtgatgctggacgccgagggccacatcaagatcaccgacttcggcatgtgcaaggagaacgtgttccccggcaccaccaccagaaccttctgcggcacccccgactacatcgcccccgagatcatcgcctaccagccctacggcaagagcgtggactggtggagcttcggcgtgctgctgtacgagatgctggccggccagccccccttcgacggcgaggacgaggaggagctgttccaggccatcatggagcagaccgtgacctaccccaagagcctgagcagagaggccgtggccatctgcaagggcttcctgaccaagcaccccggcaagagactgggcagcggccccgacggcgagcccaccatcagagcccacggcttcttcagatggatcgactgggagagactggagagactggagatccccccccccttcagacccagaccctgcggcagaagcggcgagaacttcgacaagttcttcaccagagccgcccccgccctgaccccccccgacagactggtgctggccagcatcgaccaggccgacttccagggcttcacctacgtgaaccccgacttcgtgcaccccgacgccagaagccccaccagccccgtgcccgtgcccgtgatgtag

SEQ ID NO: 131498 - DNA, 984 bp, Artificial Sequence
  derived and/or modified sequence
atggccggcctgggccccggcgtgggcgacagcgagggcggccccagacccctgttctgcagaaagggcgccctgagacagaaggtggtgcacgaggtgaagagccacaagttcaccgccagattcttcaagcagcccaccttctgcagccactgcaccgacttcatctggggcatcggcaagcagggcctgcagtgccaggtgtgcagcttcgtggtgcacagaagatgccacgagttcgtgaccttcgagtgccccggcgccggcaagggcccccagaccgacgaccccagaaacaagcacaagttcagactgcacagctacagcagccccaccttctgcgaccactgcggcagcctgctgtacggcctggtgcaccagggcatgaagtgcagctgctgcgagatgaacgtgcacagaagatgcgtgagaagcgtgcccagcctgtgcggcgtggaccacaccgagagaagaggcagactgcagctggagatcagagcccccaccgccgacgagatccacgtgaccgtgggcgaggccagaaacctgatccccatggaccccaacggcctgagcgacccctacgtgaagctgaagctgatccccgaccccagaaacctgaccaagcagaagaccagaaccgtgaaggccaccctgaaccccgtgtggaacgagaccttcgtgttcaacctgaagcccggcgacgtggagagaagactgagcgtggaggtgtgggactgggacagaaccagcagaaacgacttcatgggcgccatgagcttcggcgtgagcgagctgctgaaggcccccgtggacggctggctggtgaccaccccctggaactgcatgagcggctgcggctgggcccccctgcccctgcccagcccccccctgcccctggtgccccccacccccagcgccgccagcagcggcagagtgcaggacgcctgcaccagccccaccagcgccagcagctggttctag

SEQ ID NO: 131499 - DNA, 1647 bp, Artificial Sequence
  derived and/or modified sequence
atgcccagaatctgcgacctgagagtgagcagaagatgggagggcccccccgacggcagatgcgagatgaacgtgcacagaagatgcgtgagaagcgtgcccagcctgtgcggcgtggaccacaccgagagaagaggcagactgcagctggagatcagagcccccaccgccgacgagatccacgtgaccgtgggcgaggccagaaacctgatccccatggaccccaacggcctgagcgacccctacgtgaagctgaagctgatccccgaccccagaaacctgaccaagcagaagaccagaaccgtgaaggccaccctgaaccccgtgtggaacgagaccttcgtgttcaacctgaagcccggcgacgtggagagaagactgagcgtggaggtgtgggactgggacagaaccagcagaaacgacttcatgggcgccatgagcttcggcgtgagcgagctgctgaaggcccccgtggacggctggtacaagctgctgaaccaggaggagggcgagtactacaacgtgcccgtggccgacgccgacaactgcagcctgctgcagaagttcgaggcctgcaactaccccctggagctgtacgagagagtgagaatgggccccagcagcagccccatccccagccccagccccagccccaccgaccccaagagatgcttcttcggcgccagccccggcagactgcacatcagcgacttcagcttcctgatggtgctgggcaagggcagcttcggcaaggtgatgctggccgagagaagaggcagcgacgagctgtacgccatcaagatcctgaagaaggacgtgatcgtgcaggacgacgacgtggactgcaccctggtggagaagagagtgctggccctgggcggcagaggccccggcggcagaccccacttcctgacccagctgcacagcaccttccagacccccgacagactgtacttcgtgatggagtacgtgaccggcggcgacctgatgtaccacatccagcagctgggcaagttcaaggagccccacgccgccttctacgccgccgagatcgccatcggcctgttcttcctgcacaaccagggcatcatctacagagacctgaagctggacaacgtgatgctggacgccgagggccacatcaagatcaccgacttcggcatgtgcaaggagaacgtgttccccggcaccaccaccagaaccttctgcggcacccccgactacatcgcccccgagatcatcgcctaccagccctacggcaagagcgtggactggtggagcttcggcgtgctgctgtacgagatgctggccggccagttcctgaccaagcaccccggcaagagactgggcagcggccccgacggcgagcccaccatcagagcccacggcttcttcagatggatcgactgggagagactggagagactggagatccccccccccttcagacccagaccctgcggcagaagcggcgagaacttcgacaagttcttcaccagagccgcccccgccctgaccccccccgacagactggtgctggccagcatcgaccaggccgacttccagggcttcacctacgtgaaccccgacttcgtgcaccccgacgccagaagccccaccagccccgtgcccgtgcccgtgatgtag

SEQ ID NO: 131500 - DNA, 2094 bp, Artificial Sequence
  derived and/or modified sequence
atggccggtcttgggcccggagtaggcgactccgaaggcgggccacggcctttattttgtcgaaagggagctttgcgtcagaaggtagtccacgaagtaaaatcacacaagttcacggctcgatttttcaaacagccaacattctgtagccactgtaccgacttcatctgggggatcggcaagcagggattgcaatgccaggtttgttccttcgtggtgcatagacgttgccatgaattcgtcactttcgagtgtcctggggcggggaaggggccacagaccgatgaccctagaaataaacacaaattcagactccactcctattctagccctaccttttgtgaccactgcggctcactgctgtatggactggtgcatcagggaatgaaatgctcctgctgcgagatgaacgtccacagaaggtgtgtgagaagcgtaccaagcctgtgcggggtggatcacactgagcgacgaggacggctgcagctagaaatacgcgctccaacagccgatgagatacacgttaccgttggcgaggctcgtaacttgataccaatggatcctaacggcttatcagacccatatgtgaaactcaaactcattcccgaccctcggaacctgaccaagcagaagactagaaccgtgaaagctacccttaaccctgtttggaacgaaacattcgtgttcaatctcaaacccggcgacgtagagaggcggttgagcgtagaagtctgggattgggatcgtacctctcgtaatgactttatgggggctatgtcttttggagttagcgagttactgaaagcccctgtggatgggtggtataagctgctgaatcaggaggaaggcgagtactacaacgtccctgtggcagacgcagacaattgtagccttctccagaagtttgaagcttgcaactaccccctggagctttacgagcgggtccgaatgggaccatcaagttccccaataccgtctcctagcccttcccccacagacccgaagcgctgcttcttcggcgcctctccaggccggcttcacatcagtgactttagcttcctcatggtgctgggtaagggtagctttggcaaagtgatgttggccgagcgccgtggttctgacgagctgtatgcaatcaagatacttaaaaaggatgtgatcgttcaggatgatgacgttgattgtactttagttgagaagagagttctggctctgggcggccgaggtccaggcggtaggccccatttcctcactcagctgcatagcacattccagacccccgatcgcttatacttcgtgatggagtacgtgacagggggcgatctcatgtaccatatccagcagctcggaaagttcaaagaacctcacgccgccttctacgcagccgaaattgccatcggattattctttctacataatcagggcataatctatagggatctgaaactggataacgtcatgctggatgctgagggacatatcaagattacagatttcgggatgtgcaaagagaacgtgttccccggcacaaccacgagaacattttgcggcacgcctgattacattgcacccgaaattattgcttatcagccgtacggaaaaagtgtcgattggtggagctttggggtcctgctgtatgagatgcttgccggtcagccaccctttgacggcgaggatgaagaggagttgttccaggccataatggagcagactgtcacgtatcccaaatccctcagtagggaggctgtcgccatttgtaaaggttttctgacaaagcaccccggcaaacggcttggctctgggcccgatggagagcccactatccgcgctcacgggttcttcaggtggattgactgggaacggctggagagattggagattccacccccattcagaccaaggccctgcgggaggtcaggagaaaactttgacaagtttttcacccgagccgcccctgcactcactcctccagaccggctcgtcttagccagtatagaccaggccgatttccaggggttcacatacgtgaatccagattttgttcacccggacgctcgatcccccacttctcccgtgcctgtccccgtgatgtag

SEQ ID NO: 131501 - DNA, 984 bp, Artificial Sequence
  derived and/or modified sequence
atggcagggcttggtcccggcgtaggagattcagagggtggtccgaggcctctcttttgccgcaaaggagcgttgaggcagaaagttgtacacgaagtaaaaagtcacaagttcacagctcgttttttcaagcagcccaccttttgttcccattgcactgatttcatctggggtattggaaagcaggggctccagtgtcaggtgtgcagttttgttgtccacagaaggtgtcacgagttcgtcacctttgagtgccccggcgccgggaaagggccacagacagacgacccgcgtaacaagcataagttccgcctgcattcatacagttcaccgaccttctgtgatcactgtgggagcctactgtacggcctggtgcaccaaggcatgaagtgttcatgctgcgaaatgaacgtgcaccgaaggtgcgtgcgaagcgttccttctctttgtggcgtcgatcataccgaaaggagggggcggctgcagctggagatccgcgcgcccaccgctgacgaaattcatgtcactgtgggagaagccagaaatttaatccccatggacccaaatggcctctcagacccatacgtaaagctgaagctcataccagatccgaggaacctgaccaaacaaaagacacgcactgtgaaggcaacactgaaccctgtttggaatgagacctttgtgttcaatcttaaaccgggagacgttgaaaggcggctgtccgtagaggtgtgggactgggataggaccagcagaaacgactttatgggagctatgagcttcggagtgtcagagctgttaaaggccccagtcgacggttggctggtgaccacaccttggaactgtatgtccgggtgcggatgggccccattacctctgcctagtcccccactccctctggtgccaccgacgcctagcgccgcatcctccggccgggtgcaggacgcctgcactagcccaacctctgcatcctcttggttctag

SEQ ID NO: 131502 - DNA, 1647 bp, Artificial Sequence
  derived and/or modified sequence
atgccccggatctgtgatctccgcgtatctaggagatgggaaggacccccagacggacggtgcgagatgaacgtgcaccgccgctgtgtgcgctcggtaccgagtttgtgtggtgtggaccatacagaaagaagaggacgtcttcaactggagatcagggcccccactgcagacgaaatacacgtcactgttggagaggccaggaacttgatcccgatggatcccaatggtctgagcgacccatacgtaaagctcaagctgattccagatcccagaaatttaacgaaacagaagacaaggactgtgaaggccacgttgaatccagtgtggaacgagacattcgtgtttaacctcaagcctggggatgtggaaagaagactgtcagtcgaggtctgggattgggatcgaacaagtagaaatgacttcatgggtgcgatgtcattcggagtctccgagctcttaaaagcgccagtagacggatggtacaagctactgaatcaggaagagggcgaatattacaacgtgcccgtcgccgatgccgataactgtagcttactgcagaaatttgaggcctgtaattaccctcttgagctctacgagcgagtgagaatggggccatccagctccccaatcccctcaccgagcccctcacctaccgaccccaaacgatgtttttttggagcttcacccgggcgactacacatctctgatttctcattcttaatggtgctggggaaagggtctttcggcaaggttatgttggctgaacgcagaggaagcgacgaactttatgcgattaaaatattgaaaaaagatgtgatcgtccaagatgatgatgttgattgtacactggtagagaagagggtgttagctctgggtggaagaggcccaggcggtaggccccacttcctgacccaactgcattctacatttcaaacccccgataggctgtatttcgtaatggaatatgttacaggcggggatttaatgtaccacatacagcaactgggaaagtttaaagagccccatgctgcattttacgccgccgaaatcgccatcggattatttttcttacataaccagggcataatttacagagatctcaaacttgacaatgttatgctggatgccgaaggacacattaaaattacggatttcggcatgtgcaaagagaacgtgtttcctggtacaaccacacggacgttctgcgggaccccagactatatcgcacctgagattatagcataccagccctacggaaagtcggtggactggtggagcttcggtgtgctgctgtacgagatgttggcaggtcagttcctaactaaacatccaggcaagcgcctgggttctggacctgatggggagcctacaattagggcccatggttttttccgatggattgactgggaacgcctggagcgactggagataccccccccattcaggccccggccatgcggacggtctggcgaaaacttcgataagtttttcactcgagctgctcctgccctcacaccaccagatagattggtactggcgtccatcgatcaggcagacttccagggctttacttacgtgaatccagacttcgtgcacccggatgcacgctcaccaacttcccccgtaccggtgccagtgatgtag

SEQ ID NO: 131503 - DNA, 2094 bp, Artificial Sequence
  derived and/or modified sequence
atggccggcctgggccctggggtgggggacagcgagggcggcccccggcccctcttctgcaggaagggggccctgcggcagaaggtggtgcatgaggtgaagagccacaagttcaccgcccgcttcttcaagcagcccaccttctgcagccactgcacagacttcatctggggcatcggcaagcagggcctgcagtgccaggtgtgcagctttgtggtgcaccggcgctgccacgagtttgtgacctttgagtgccctggggccggcaagggcccccagacagatgaccccaggaacaagcacaagttccggctgcacagctacagcagccccaccttctgtgaccactgcggcagcctgctgtatggcctggtgcaccagggcatgaagtgcagctgctgtgagatgaatgtgcaccggcgctgtgtgcgctctgtgcccagcctgtgtggggtggaccacacagaaagaagaggccgcctgcagctggagatccgggcccccacagcagatgagatccacgtgacagtgggggaggccaggaacctgatccccatggaccccaacggcctgagtgacccctacgtgaagctgaagctgatcccagaccccaggaacctgaccaagcagaagaccaggacagtgaaggccaccctgaaccctgtgtggaatgagacctttgtgttcaacctgaagccaggagatgtggagcggcggctgtctgtggaggtgtgggactgggacaggaccagcagaaatgacttcatgggcgccatgagctttggagtgtctgagctgctgaaggcccctgtggatggctggtacaagctgctgaaccaggaggagggggagtactacaacgtgcctgtggctgatgctgacaactgcagcctgctgcagaagtttgaggcctgcaactaccccctggagctgtatgaaagagtgaggatgggccccagcagcagccccatccccagccccagccccagccccacagaccccaagcgctgcttctttggagccagccctggccgcctgcacatcagtgacttctccttcctgatggtgctgggcaagggcagctttgggaaggtgatgctggccgagcggcggggcagtgatgagctgtatgccatcaagatcctgaagaaggatgtgattgtgcaggatgatgatgtggactgcaccctggtggagaagagggtgctggccctgggcggccggggccctgggggccggccccacttcctgacccagctgcacagcaccttccagaccccagaccggctgtactttgtgatggagtatgtgactggaggagacctgatgtaccacatccagcagctgggcaagttcaaggagccccatgctgccttctatgctgctgagatcgccatcggcctcttcttcctgcacaaccagggcatcatctacagagacctgaagctggacaacgtgatgctggatgctgagggccacatcaagatcacagactttggcatgtgcaaggaaaatgtgtttcctggcaccaccaccaggaccttctgtggcaccccagactacatcgcccctgagatcatcgcctaccagccctacggcaagtctgtggactggtggagctttggagtgctgctgtatgagatgctggccggccagcccccatttgatggagaagatgaggaggagctgttccaggccatcatggagcagacagtgacctaccccaagagcctgagccgggaggccgtggccatctgcaagggcttcctgaccaagcaccctgggaagaggctgggcagcggcccagatggagagcccaccatccgggcccacggcttcttccgctggattgactgggagcggctggagcggctggagatccccccacccttccggccccggccctgtggccgctctggagaaaattttgacaagttcttcacccgggccgccccagccctgaccccaccagaccggctggtgctggccagcattgaccaggccgacttccagggcttcacctacgtgaacccagactttgtgcacccagatgcccggagccccaccagccctgtgcctgtgcctgtgatgtag

SEQ ID NO: 131504 - DNA, 984 bp, Artificial Sequence
  derived and/or modified sequence
atggccggcctgggccctggggtgggggacagcgagggcggcccccggcccctcttctgcaggaagggggccctgcggcagaaggtggtgcatgaggtgaagagccacaagttcaccgcccgcttcttcaagcagcccaccttctgcagccactgcacagacttcatctggggcatcggcaagcagggcctgcagtgccaggtgtgcagctttgtggtgcaccggcgctgccacgagtttgtgacctttgagtgccctggggccggcaagggcccccagacagatgaccccaggaacaagcacaagttccggctgcacagctacagcagccccaccttctgtgaccactgcggcagcctgctgtatggcctggtgcaccagggcatgaagtgcagctgctgtgagatgaatgtgcaccggcgctgtgtgcgctctgtgcccagcctgtgtggggtggaccacacagaaagaagaggccgcctgcagctggagatccgggcccccacagcagatgagatccacgtgacagtgggggaggccaggaacctgatccccatggaccccaacggcctgagtgacccctacgtgaagctgaagctgatcccagaccccaggaacctgaccaagcagaagaccaggacagtgaaggccaccctgaaccctgtgtggaatgagacctttgtgttcaacctgaagccaggagatgtggagcggcggctgtctgtggaggtgtgggactgggacaggaccagcagaaatgacttcatgggcgccatgagctttggagtgtctgagctgctgaaggcccctgtggatggctggctggtgaccaccccctggaactgcatgagcggctgcggctgggcccccctgcccctgcccagcccccccctgcccctggtgccccccacccccagcgctgccagcagcggccgggtgcaggatgcctgcaccagccccaccagcgccagctcctggttctag

SEQ ID NO: 131505 - DNA, 1647 bp, Artificial Sequence
  derived and/or modified sequence
atgccccgcatctgtgacctgcgggtgtcccggcgctgggagggccccccagatggccgctgtgagatgaatgtgcacagaagatgtgtgcgctctgtgcccagcctgtgtggggtggaccacacagagcggcggggccgcctgcagctggagatccgggcccccacagcagatgagatccacgtgacagtgggggaggccaggaacctgatccccatggaccccaacggcctgagtgacccctacgtgaagctgaagctgatcccagaccccaggaacctgaccaagcagaagaccaggacagtgaaggccaccctgaaccctgtgtggaatgagacctttgtgttcaacctgaagccaggagatgtggagcggcggctgtctgtggaggtgtgggactgggacaggaccagcagaaatgacttcatgggcgccatgagctttggagtgtctgagctgctgaaggcccctgtggatggctggtacaagctgctgaaccaggaggagggggagtactacaacgtgcctgtggctgatgctgacaactgcagcctgctgcagaagtttgaggcctgcaactaccccctggagctgtatgagcgggtgaggatgggccccagcagcagccccatccccagccccagccccagccccacagaccccaagcgctgcttcttcggggccagccctggccgcctgcacatcagtgacttctccttcctgatggtgctgggcaagggcagctttgggaaggtgatgctggccgagcggcggggcagtgatgagctgtatgccatcaagatcctgaagaaggatgtgattgtgcaggatgatgatgtggactgcaccctggtggagaagagggtgctggccctgggcggccggggccctgggggccggccccacttcctgacccagctgcacagcaccttccagaccccagaccggctgtactttgtgatggagtatgtgactggaggagacctgatgtaccacatccagcagctgggcaagttcaaggagccccacgccgccttctacgccgctgagatcgccatcggcctcttcttcctgcacaaccagggcatcatctacagagacctgaagctggacaacgtgatgctggatgctgagggccacatcaagatcacagactttggcatgtgcaaggaaaatgtgtttcctggcaccaccaccaggaccttctgtggcaccccagactacatcgcccctgagatcatcgcctaccagccctacggcaagtctgtggactggtggagctttggagtgctgctgtatgagatgctggccggccagttcctgaccaagcaccctgggaagaggctgggcagcggcccagatggagagcccaccatccgggcccacggcttcttccgctggattgactgggagcggctggagcggctggagatccccccacccttccggccccggccctgtggccgcagcggggagaactttgacaagttcttcaccagggctgccccagccctgaccccaccagaccggctggtgctggccagcattgaccaggccgacttccagggcttcacctacgtgaacccagactttgtgcacccagatgcccggagccccaccagccctgtgcctgtgcctgtgatgtag

SEQ ID NO: 131506 - DNA, 2094 bp, Artificial Sequence
  derived and/or modified sequence
atggccggcctgggccccggcgtgggcgacagcgagggcggccccaggccacttttttgccgcaaaggagctctcaggcagaaggtcgtccatgaagtgaagtcacataagtttaccgccagattcttcaaacagcccacattttgcagccactgtaccgatttcatctgggggattggcaagcagggcctccagtgccaggtttgcagctttgtggtgcacagacgctgccacgagttcgtgacattcgagtgtccgggtgcagggaaagggcctcagaccgacgacccacggaacaaacacaagttccgacttcattcatactcgtctcctactttctgtgatcactgtggctctctgctctacggattggtccaccaaggaatgaagtgtagctgctgtgaaatgaacgtgcatcggcggtgtgtaaggagcgtgccgtccctgtgcggggtggaccataccgagcgaagagggaggctgcagctcgagataagagccccaaccgccgacgaaatacatgtgaccgtgggggaagctcgaaatctgatcccgatggatcccaacggattatccgacccgtacgtgaaactcaaattaatcccagatcccaggaacctgactaagcagaaaacaaggacagtgaaagccactctgaatccagtctggaacgagactttcgtattcaatctgaaacccggcgacgttgagaggagacttagtgtagaagtgtgggactgggatcggacctcccgcaatgacttcatgggcgccatgagcttcggtgtgtccgagctgctgaaagcgcccgtcgatggctggtataagctgcttaaccaagaagagggagagtactataacgtccctgttgcagatgcagataattgctctttgcttcagaaattcgaagcctgtaattatcccttagaactctatgagcgagtaaggatgggtccttcctcatcccctattccctctcccagccccagcccaactgacccaaaaagatgcttctttggggcatcacccggccgtctccacatctccgattttagcttcctcatggtgttagggaaggggtcatttggaaaagtcatgctcgcagagagaagagggtccgatgagctgtacgccattaaaatcttgaaaaaggacgtcatcgtgcaagatgatgacgtagattgtaccctggtggagaaacgagtgctcgccctcggcgggaggggtccaggcggacggccgcacttcttaactcaattacactcaacgttccaaacccccgataggctgtactttgtgatggagtacgtgaccgggggcgacctaatgtaccatatccagcagctgggcaagtttaaagagccccatgctgccttctacgcagcagagatcgccatcggcctcttctttctccacaatcaagggattatatacagggacctcaagttggacaacgtcatgctcgatgccgagggacacatcaagatcaccgatttcggaatgtgtaaggagaacgtgtttccgggaactaccactcgcaccttttgcggaacccctgattatatcgcaccagaaatcatcgcctatcagccgtatggcaagagcgttgattggtggagcttcggggtgttgctctatgaaatgttggcggggcagcccccatttgatggagaggacgaagaggagctcttccaggctatcatggaacaaaccgtgacctaccccaagagcctctcgcgggaagctgttgctatctgtaagggatttctcactaaacaccccggaaagcgcctagggtctggccctgacggcgaacctacgattagggcacacggcttctttaggtggattgattgggagagactggagagattggagataccgccgccttttcggcctagaccttgtgggcgctcaggggaaaactttgataaatttttcacccgtgcagcccctgcactgactccccccgatcgtcttgtactggcctcaatcgaccaggcagatttccagggattcacttatgtgaacccggacttcgtgcatcccgatgcccggtccccaacgagcccagtcccggtgccagtgatgtag

SEQ ID NO: 131507 - DNA, 984 bp, Artificial Sequence
  derived and/or modified sequence
atggccggcctgggccccggcgtgggcgacagcgagggcggccccaggcccctcttctgccggaagggggcacttcggcaaaaagtggtgcacgaagtaaaatctcacaagtttactgccaggtttttcaaacaacccacattttgcagccattgtaccgatttcatatggggcatcgggaagcaggggcttcaatgccaggtgtgttctttcgtggtgcataggcggtgtcacgagttcgtgacctttgaatgtcctggcgccggtaagggcccccaaacagatgatccaaggaacaagcacaagtttcggctccacagttacagcagtcccacattttgcgaccactgtggttccctgctttatgggctagtccatcaagggatgaagtgcagctgttgtgagatgaatgtgcatcgcaggtgcgttcgcagcgttcctagcctctgcggggtggaccacacagagcgacggggtcgcctgcaactcgagattcgcgctccaaccgccgatgagatccacgtgaccgttggtgaggccagaaatctgatccccatggatcccaacggcctgtcagatccctacgtcaagttgaaactcatacctgacccccgcaatctaacaaagcagaaaacccgaaccgtgaaggccacactgaacccggtctggaatgagaccttcgtcttcaatctgaagcctggagacgtggagcggagactatccgtcgaggtatgggactgggataggacttccagaaatgacttcatgggagctatgtccttcggggtgtccgaacttctgaaggcacccgtagacggttggttggttactacgccatggaattgtatgagcgggtgcggctgggcccccctgcctttgccctccccaccgttgcccctggtgcctcccacacctagtgcagcctctagcgggagggtccaggacgcctgcaccagcccaacgtcggcatcatcctggttctag

SEQ ID NO: 131508 - DNA, 1647 bp, Artificial Sequence
  derived and/or modified sequence
atgccccggatctgcgacctgcgggtgagccggcggtgggagggccctcccgacggacggtgtgagatgaatgtgcaccgtcgatgtgtgcgcagtgtcccgagcctatgtggggtagaccatactgaacgacggggcaggttacagctggagattagagctccgacagcggatgagatccacgttactgtgggagaggcaagaaatctcatacccatggaccccaatggactgagtgacccatacgtgaagctgaaactcattcctgatccaagaaatctgacaaaacaaaagaccagaactgtcaaagcaacactgaacccagtgtggaacgaaacattcgtttttaatttaaagcctggggacgtggaacgcagactgtcagtcgaagtgtgggactgggatcgaaccagtagaaatgacttcatgggggccatgtctttcggtgtctctgagctgttgaaagctcctgttgacgggtggtataagttactgaaccaagaggagggagagtattacaatgtgcctgttgcagacgccgataattgcagcttgttgcaaaagttcgaagcctgcaattacccgctggaactatacgagagagttagaatgggtccatccagctcacccatcccatctccgagcccatccccgaccgacccaaaaagatgcttcttcggcgctagcccaggtcggctgcacatctctgatttttcattcctgatggtgctcggcaaaggttcttttggaaaggtaatgttggccgaacggagaggcagcgatgagttgtatgcaatcaaaatcctgaagaaagatgtgatcgtgcaggacgatgacgtggattgcacactggtcgagaagagggtgctcgcacttgggggtcgtgggcctggcggcagacctcacttccttactcaattgcattcaactttccagacccctgaccgcctgtattttgtaatggaatatgtgactggcggcgatcttatgtatcatattcagcagctcggcaagttcaaggagccacacgctgctttctacgctgctgagatagcgattggattgttcttcctgcataaccagggaattatttatagagacctgaagttggacaatgtcatgctggatgccgaagggcacatcaaaatcacggattttggaatgtgtaaagaaaatgtctttcccgggaccacaacacgtactttttgtggcacccccgactacatcgcccccgaaattatcgcttatcagccgtatggcaagagcgtggattggtggagctttggcgtcctgctatacgaaatgcttgctggacagttcctgacaaagcacccaggcaaaagattaggctcgggcccagatggggagccgacaatcagagcgcatgggttcttcaggtggatagactgggagcgcctggagagactcgaaattcctccaccctttagacctcgcccctgtggccgctctggcgagaattttgacaaattttttacaagggctgccccagccctgacaccaccggatagattagtccttgcttcaatagatcaagccgactttcagggcttcacctacgtaaaccccgacttcgtgcatcctgacgcccgaagccctaccagccctgtgccggtccccgtcatgtag

SEQ ID NO: 131509 - DNA, 2094 bp, Artificial Sequence
  derived and/or modified sequence
atggcaggcttgggacccggagtgggagacagcgaaggcggacctcggccattgttctgtcgcaaaggagccctacggcagaaggtggttcatgaggtgaagagtcacaagtttaccgctcgtttttttaagcagcccacattctgttcgcactgcactgacttcatttgggggatcggtaagcagggcctacaatgccaggtgtgctcatttgttgtccataggagatgccacgaatttgtcactttcgagtgccctggagctggcaagggaccacagacggacgacccaagaaataagcacaagttcaggctccactcatacagttccccaactttttgtgaccactgtgggagtctgctatacggtctagtacatcagggaatgaaatgttcatgctgcgaaatgaacgtgcacaggcgatgcgtgcgctctgtgcccagcctatgcggcgttgatcacacggagcgccgtggtcgactacagcttgagatccgcgctccgacagctgacgaaattcacgttactgtgggcgaagccaggaacctgatccctatggatccgaacggcttaagcgacccctacgtgaagctcaaacttattcccgaccctaggaacctgacgaagcaaaagaccagaaccgtaaaagctactcttaatcctgtgtggaacgaaacctttgtgttcaatctgaaacctggggatgtggagaggaggctctccgttgaagtgtgggactgggatagaacaagccgcaacgactttatgggggctatgtcctttggcgtctccgagcttctgaaggcacccgtcgacggctggtacaaacttctcaatcaggaggaaggcgagtactacaacgtgccggtggccgacgccgacaattgctccctcttgcaaaaatttgaggcttgtaattatcctctggagctctatgaacgggttaggatgggaccatcgtcaagccctattccatctccttctccatcccctactgatcctaagcgctgcttctttggggcaagtcccggtcgactgcatatttctgatttttccttcctcatggtgctgggaaaggggagctttggcaaggttatgcttgcagagcggcgaggtagtgatgagctgtacgctatcaagatcctgaagaaagacgtgatcgtccaagacgacgatgtcgattgcactctcgtggaaaaaagggtgctcgcactcggcggtcgtggcccaggaggcagacctcacttcctaacacagttacacagtaccttccaaacgcctgatcgcctctatttcgtcatggagtatgtgaccggcggagacttaatgtatcacattcagcagttggggaaatttaaggagccgcatgctgccttttacgccgcagaaatagccattgggctgttcttcctacacaaccaggggattatctaccgggacctgaagctggacaacgtgatgctcgacgcggaggggcacatcaagataaccgacttcggcatgtgtaaggaaaacgtgttccccggaaccaccacgcgtactttctgtggtacccccgattacatcgccccagaaatcatagcttatcaaccttatggaaagagcgtggactggtggagcttcggagtccttctctatgagatgctcgcagggcagcctcctttcgatggcgaggacgaggaggagctgttccaggcaataatggagcagaccgtcacttacccgaaaagcttaagtagggaggctgtagccatttgcaaaggctttctaactaaacaccctggtaagaggctcggatccggccctgacggtgagccgaccatcagggcccacggattttttaggtggatcgattgggaaagactagagcggttggaaatccccccacctttccgaccccgaccctgcggaagatccggagaaaactttgataagtttttcaccagggccgcacccgcattaacacctccggaccggctcgttctggcttctatagaccaggcagatttccaggggtttacttatgttaaccccgattttgtgcaccctgacgcacgatcgccaaccagccctgttccggtgcctgttatgtag

SEQ ID NO: 131510 - DNA, 984 bp, Artificial Sequence
  derived and/or modified sequence
atggcgggtcttgggccaggtgtcggggactcggagggcggacccagaccactgttctgtcgcaaaggggcactgcgccaaaaggtagtgcacgaggtgaagagtcataaattcacagcgaggttttttaaacagcccactttctgctcccattgcacagatttcatctgggggatcgggaagcagggactgcagtgtcaggtctgctccttcgtggttcacagacgctgccatgagttcgtgacattcgagtgccctggagctgggaagggaccacagacagacgaccccaggaataaacataagttccgcttgcacagttacagctctcccactttctgtgatcactgtgggtccctcctctacggactggtgcaccagggtatgaaatgcagctgctgcgaaatgaatgtgcaccgccgatgcgttcggtccgtaccttcactatgcggagtggatcacactgaacgaaggggcagactgcagcttgaaattcgagctccaacagcagacgaaatccatgtgaccgtgggagaggcacgtaatctaatccctatggaccctaacgggctttcagatccctatgtgaaactcaagctaatcccagaccctcgtaatctgacaaaacagaaaaccaggactgtgaaagccacactcaaccctgtgtggaacgaaacctttgtcttcaatctgaagcctggcgacgtggagcgcaggctgtccgtcgaagtgtgggattgggaccgtacatctagaaacgattttatgggggctatgtcattcggcgtgagtgagttgcttaaagcccctgtcgacggctggttggtgacaaccccatggaactgcatgtcaggctgtgggtgggcacccctcccactgccaagtcctcccctgcccctggtccctcccacccctagcgcagcttcgtccgggagagtgcaggatgcctgtacaagcccaactagtgcgagtagttggttttag

SEQ ID NO: 131511 - DNA, 1647 bp, Artificial Sequence
  derived and/or modified sequence
atgccccgaatatgtgacctcagggtcagtagacggtgggaaggtccgccagatggacggtgcgaaatgaatgttcaccgcagatgtgtgcgatccgtgcctagcctttgcggagtggatcacaccgagcgtaggggcaggctgcaactagagatccgcgctcccacggcggatgagatacatgtgaccgttggggaggcccgaaacctgattcctatggaccctaacggcttaagcgacccttatgtcaagctgaaattgattcccgacccccgaaatttgaccaagcagaaaactcgcaccgtgaaggcaaccctgaaccctgtgtggaatgagactttcgtgttcaatctcaaacccggagacgtggagaggcggctttcagtagaagtgtgggactgggaccggacaagcaggaatgacttcatgggggctatgagtttcggtgtctccgagctactaaaagcgccagtcgacgggtggtataaactccttaatcaggaagagggggagtattataacgtacctgtggccgatgcagacaattgcagtctgttgcaaaaatttgaagcttgtaactatcccctcgagctctatgaaagagtgcgaatgggcccatcttcctctccaatcccgagcccatccccctctcctacagatccaaaaagatgctttttcggggcttcacctggtaggctgcatatttccgacttcagcttcctgatggttctgggtaagggaagctttggaaaggttatgcttgccgaacgaagagggtccgacgaactgtacgcgatcaagatcctgaagaaggacgtgatcgtgcaagatgacgacgtggattgtacactggtggagaaaagagtacttgccctgggcggaaggggtcctggagggaggccccatttcctcactcagcttcactcgacctttcaaactcctgatcgactgtatttcgtgatggagtacgtcaccggaggcgacctgatgtatcacattcagcaactgggtaagttcaaggagcctcatgctgccttctacgcggctgagattgccattggcctgtttttcttacataatcagggcattatctaccgagacctgaaattggacaacgtgatgctcgacgcagaaggtcatataaagattaccgactttggaatgtgcaaggaaaacgtgtttccaggtacaacaacgcgaactttctgtgggactcccgactacatcgcgccagagatcatagcataccaaccctacggaaagtctgtggattggtggtcgtttggtgtgttgctctatgagatgctggccggacagtttcttacaaagcacccgggtaaacgcttaggcagtggcccagatggtgagcctactatccgggcacacgggtttttcagatggatcgattgggagcggctcgagcgattggagatccccccacctttccgcccaagaccgtgtgggcgtagcggggagaacttcgataagtttttcacacgcgcagcgcctgcattgacacctccagaccgcctcgtcttggcgtctatcgatcaggccgatttccagggcttcacatacgtgaatcctgatttcgtgcaccccgacgctcgcagtccgaccagtcctgtgcccgtgcctgtaatgtag

SEQ ID NO: 131512 - DNA, 1404 bp, Artificial Sequence
  derived and/or modified sequence
atttcagcaggtgccggagctggagctcccaccgccgccgcccgtgcctccggctgccggcgcccctgcctttggctcttcctccccactcgcccgctccccctggcggagccggcgcgcccggggtgccgctccctgcctggcgcgctccgcacctggaggtgccttgcccctctcctgcccacctcggaatttccctgtggctcctttgatccttcgagtctccagctcctctcccttccacctgtttcccccaagaaaggcaggatcctggtccctgctacgtttctggggccatggctggtctgggccccggcgtaggcgattcagaggggggaccccggcccctgttttgcagaaagggggccctgaggcagaaggtggtccacgaagtcaagagccacaagttcaccgctcgcttcttcaagcagcccaccttctgcagccactgcaccgacttcatctggggtatcggaaagcagggcctgcaatgtcaagtctgcagctttgtggttcatcgacgatgccacgaatttgtgaccttcgagtgtccaggcgctgggaagggcccccagacggacgacccccggaacaaacacaagttccgcctgcatagctacagcagccccaccttctgcgaccactgtggctccctcctctacgggcttgtgcaccagggcatgaaatgctcctgctgcgagatgaacgtgcaccggcgctgtgtgcgtagcgtgccctccctgtgcggtgtggaccacaccgagcgccgcgggcgcctgcagctggagatccgggctcccacagcagatgagatccacgtaactgttggcgaggcccgtaacctaattcctatggaccccaatggtctctctgatccctatgtgaaactgaagctcatcccagaccctcggaacctgacgaaacagaagacccgaacggtgaaagccacgctaaaccctgtgtggaatgagacctttgtgttcaacctgaagccaggggatgtggagcgccggctcagcgtggaggtgtgggactgggaccggacctcccgcaacgacttcatgggggccatgtcctttggcgtctcggagctgctcaaggcgcccgtggatggctggcttgtaactaccccctggaattgtatgagcgggtgcggatgggcccctcttcctctcccatcccctccccttcccctagtcccaccgaccccaagcgctgcttcttcggggcgagtccaggacgcctgcacatctccgacttcagcttcctcatggttctaggaaaaggcagttttgggaaggtgatgctggccgagcgcaggggctctgatgagctctacgccatcaagatcttgaaaaaggacgtgatcgtccaggacgacgatgtggactgcacgctggtgga

SEQ ID NO: 131513 - DNA, 1781 bp, Artificial Sequence
  derived and/or modified sequence
cttgagcaccagctgctactgctgagaacagatctgcagctttgtggttcatcgacgatgccacgaatttgtgaccttcgagtgtccaggcgctgggaagggcccccagacggacgctgcgagatgaacgtgcaccggcgctgtgtgcgtagcgtgccctccctgtgcggtgtggaccacaccgagcgccgcgggcgcctgcagctggagatccgggctcccacagcagatgagatccacgtaactgttggcgaggcccgtaacctaattcctatggaccccaatggtctctctgatccctatgtgaaactgaagctcatcccagaccctcggaacctgacgaaacagaagacccgaacggtgaaagccacgctaaaccctgtgtggaatgagacctttgtgttcaacctgaagccaggggatgtggagcgccggctcagcgtggaggtgtgggactgggaccggacctcccgcaacgacttcatgggggccatgtcctttggcgtctcggagctgctcaaggcgcccgtggatggctggtacaagttactgaaccaggaggagggcgagtattacaatgtgccggtggccgatgctgacaactgcagcctcctccagaagtttgaggcttgtaactaccccctggaattgtatgagcgggtgcggatgggcccctcttcctctcccatcccctccccttcccctagtcccaccgaccccaagcgctgcttcttcggggcgagtccaggacgcctgcacatctccgacttcagcttcctcatggttctaggaaaaggcagttttgggaaggtgatgctggccgagcgcaggggctctgatgagctctacgccatcaagatcttgaaaaaggacgtgatcgtccaggacgacgatgtggactgcacgctggtggagaaacgtgtgctggcgctggggggccggggtcctggcggccggccccacttcctcacccagctccactccaccttccagaccccggaccgcctgtatttcgtgatggagtacgtcaccgggggagacttgatgtaccacattcaacagctgggcaagtttaaggagccccatgcagcgttctacgcggcagaaatcgctatcggcctcttcttccttcacaatcagggcatcatctacagggacctgaagctggacaatgtgatgctggatgctgagggacacatcaagatcactgactttggcatgtgtaaggagaacgtcttccccgggacgacaacccgcaccttctgcgggaccccggactacatagccccggagatcattgcctaccagccctatgggaagtctgtcgattggtggtcctttggagttctgctgtatgagatgttggcaggacagttcctgaccaagcacccagggaagcgcctgggctcagggcctgatggggaacctaccatccgtgcacatggctttttccgctggattgactgggagcggctggaacgattggagatcccgcctcctttcagaccccgcccgtgtggccgcagcggcgagaactttgacaagttcttcacgcgggcggcgccagcgctgacccctccagaccgcctagtcctggccagcatcgaccaggccgatttccagggcttcacctacgtgaaccccgacttcgtgcacccggatgcccgcagccccaccagcccagtgcctgtgcccgtcatgtaatctcacccgccgccactaggtgtccccaacgtcccctccgccgtgccggcggcagccccacttcacccccaacttca

SEQ ID NO: 131514 - protein, 596 aa, Artificial Sequence
  derived and/or modified sequence
MPTQRDSSTMSHTVAGGGSGDHSHQVRVKAYYRGDIMITHFEPSISFEGLCNEVRDMCSFDNEQLFTMKWIDEEGDPCTVSSQLELEEAFRLYELNKDSELLIHVFPCVPERPGMPCPGEDKSIYRRGARRWRKLYCANGHTFQAKRFNRRAHCAICTDRIWGLGRQGYKCINCKLLVHKKCHKLVTIECGRHSLPQEPVMPMDQSSMHSDHAQTVIPYNPSSHESLDQVGEEKEAMNTRESGKASSSLGLQDFDLLRVIGRGSYAKVLLVRLKKTDRIYAMKVVKKELVNDDEDIDWVQTEKHVFEQASNHPFLVGLHSCFQTESRLFFVIEYVNGGDLMFHMQRQRKLPEEHARFYSAEISLALNYLHERGIIYRDLKLDNVLLDSEGHIKLTDYGMCKEGLRPGDTTSTFCGTPNYIAPEILRGEDYGFSVDWWALGVLMFEMMAGRSPFDIVGSSDNPDQNTEDYLFQVILEKQIRIPRSLSVKAASVLKSFLNKDPKERLGCHPQTGFADIQGHPFFRNVDWDMMEQKQVVPPFKPNISGEFGLDNFDSQFTNEPVQLTPDDDDIVRKIDQSEFEGFEYINPLLMSAEECV

SEQ ID NO: 131515 - DNA, 1791 bp, Artificial Sequence
  derived and/or modified sequence
atgcctactcagcgggattctagtacgatgtctcacaccgtcgctggcggaggctctggcgatcactctcatcaggtcagagtgaaagcctactataggggcgacataatgatcacgcactttgaaccttccatcagtttcgaaggattatgtaacgaggtacgtgacatgtgctcatttgacaatgaacagctgttcacgatgaaatggattgacgaagaaggcgacccttgcacagtaagctcacagttggaactcgaagaggcgttccgtctgtacgagctaaataaagactcagagctgttgattcacgtctttccttgcgtcccagagcggcctgggatgccgtgccccggagaggacaaaagtatttataggcgcggagcccgaagatggagaaaactttattgcgcgaatggacacacgttccaggctaaaagattcaatagacgcgcccactgcgccatttgcacagatcgaatctggggccttggccggcaggggtacaaatgtatcaactgcaaactcttggttcataagaaatgccacaaactagtgaccatcgagtgcggtcggcactctctgccccaggagccagtcatgcctatggaccaaagctccatgcatagtgaccacgcacagaccgtaatcccttataatccgtcaagccatgaaagcctagaccaggttggagaggagaaggaggcaatgaacactcgcgagagcgggaaggcctcctcgtcactgggcttacaggactttgacctcctcagagtgatcgggagagggtcttatgccaaggttctcctggtgcgactgaagaagaccgatagaatctatgcaatgaaagtggtaaagaaggagctggtgaacgatgatgaagatatagactgggtgcagactgaaaagcatgtttttgagcaggcttccaaccacccattcctagtcggtttgcactcctgttttcagacagagtctcgcttattttttgtgatcgagtacgtcaacgggggcgatctcatgtttcacatgcagcgtcagcgtaagcttccagaagagcacgccagattctacagcgctgagattagtctggctctcaactatcttcatgaaagggggatcatctatagagaccttaagctggacaacgtgctcctggactctgaaggccatattaagctgacagattatggtatgtgcaaggaaggactgcgtcccggtgataccacgagtacattttgtggcactcctaactatatcgctccggaaatactacgaggcgaggactacggtttctccgttgactggtgggctcttggagtgctcatgttcgagatgatggcaggccgctctccattcgacatcgtgggttccagtgataaccccgatcagaatacagaggactacctcttccaagtgatactagaaaagcaaatacgcatcccccgatcgctgagcgtaaaagccgcttccgtgctgaagtccttcctgaacaaagacccgaaggagcggctcgggtgtcatccgcagacaggattcgctgatattcagggacatccattcttccggaatgtcgattgggacatgatggagcagaagcaagtggtacctccttttaagccaaatatctcaggcgagttcggcttggacaattttgattctcaattcactaacgaacccgtgcaactgacaccggatgatgatgacatagtgcggaaaatcgatcaatccgaatttgaggggttcgagtacattaatccactgctcatgagcgcagaggaatgcgtgtag

SEQ ID NO: 131516 - DNA, 1791 bp, Artificial Sequence
  derived and/or modified sequence
atgcccacccagagggacagcagcaccatgagccacacagtggccggcggcggcagcggggaccacagccaccaggtgcgggtgaaggcctactacagaggagacatcatgatcacccactttgagcccagcatcagctttgagggcctgtgcaatgaggtgcgggacatgtgcagctttgacaatgagcagctgttcaccatgaagtggattgatgaggagggggacccctgcaccgtgagcagccagctggagctggaggaggccttccggctgtatgagctgaacaaggacagcgagctgctgatccacgtgttcccctgtgtgcctgagaggcctggcatgccctgccctggagaggacaagagcatctaccgccgcggggcccggcgctggaggaagctgtactgtgccaacggccacaccttccaggccaagcgcttcaacagaagagcccactgtgccatctgcacagaccgcatctggggcctgggccggcagggctacaagtgcatcaactgcaagctgctggtgcacaagaagtgccacaagctggtgaccattgaatgtggccgccacagcctgccccaggagcctgtgatgcccatggaccagagctccatgcacagcgaccacgcccagaccgtcatcccctacaaccccagcagccatgagagcctggaccaggtgggggaggagaaggaggccatgaacacccgggagagcggcaaggccagcagcagcctgggcctgcaggactttgacctgctgcgggtcatcggccggggcagctatgccaaggtgctgctggtgcggctgaagaagacagaccgcatctatgccatgaaggtggtgaagaaggagctggtgaatgatgatgaggacatcgactgggtgcagacagagaagcacgtgtttgagcaggccagcaaccaccccttcctggtgggcctgcacagctgcttccagacagagagccgcctcttcttcgtcatcgagtatgtgaatggaggagacctgatgttccacatgcagaggcagaggaagctgcctgaggagcacgcccgcttctacagcgctgagatcagcctggccctgaactacctgcacgagcggggcatcatctacagagacctgaagctggacaacgtgctgctggacagcgagggccacatcaagctgacagattatggcatgtgcaaggagggcctgcggcctggggacaccaccagcaccttctgtggcacccccaactacatcgcccctgagatcctgcggggggaggactatggcttctctgtggactggtgggccctgggcgtgctgatgtttgagatgatggccggccgcagcccctttgatattgtgggcagcagtgacaacccagaccagaacacagaggactacctgttccaggtgatcctggagaagcagatccgcatccccaggagcctgtctgtgaaggccgcctctgtgctgaagagcttcctgaacaaggaccccaaggagcggctgggctgccacccccagacaggctttgctgacatccagggccaccccttcttcagaaatgtggactgggacatgatggagcagaagcaggtggtgccccccttcaagcccaacatcagcggggagtttggcctggacaactttgacagccagttcaccaatgaacctgtgcagctgaccccagatgatgatgacatcgtgaggaagattgaccagagcgagtttgagggctttgagtacatcaaccccctgctgatgtctgctgaggagtgtgtgtag

SEQ ID NO: 131517 - DNA, 1791 bp, Artificial Sequence
  derived and/or modified sequence
atgcccacccagcgggacagcagcaccatgagccacaccgtggccggcggcggctctggggaccactctcatcaggtgcgggtcaaagcctattaccggggggatattatgattacccattttgagccgtctatctcatttgaaggattgtgtaacgaagtcagagatatgtgctcctttgacaatgaacagctgttcaccatgaagtggattgacgaagagggggatccttgtaccgtcagtagccagctggagttagaagaggcattccgcttgtatgaattgaataaggattcggaacttctgatccacgttttcccatgtgttccagaaagacctggtatgccctgcccgggtgaagataagtccatttataggcggggcgcgcgccgctggaggaagctatattgtgccaacgggcatacctttcaggcaaagcggttcaacaggagggctcactgcgcaatctgtactgacaggatctggggcctgggtcgacagggctacaaatgtatcaattgtaagttgctggtgcacaagaaatgtcataaactggtcaccattgagtgcgggagacatagcttgcctcaggaaccagtgatgccgatggatcagagtagtatgcactccgaccatgcccagaccgtcattccctataatccgtcctcccacgaatcactggaccaagtgggtgaggagaaagaagcgatgaacacccgggagagtgggaaagcgagcagcagtctggggctgcaggatttcgatctattgagggtgatcggaagaggatcgtatgccaaggtactcctggtgaggctgaaaaaaactgatcggatctatgccatgaaagtcgtcaaaaaggaactggtgaatgacgacgaagacattgattgggtccagactgagaaacacgtctttgagcaggcttcaaaccaccctttcctggtaggcctgcattcatgctttcagactgaaagtcggctgttctttgtcatcgaatatgtcaacgggggtgacctgatgttccacatgcagcgccagcgcaagctgcctgaggaacacgcgcgcttttacagtgcagaaattagtctggctctgaattacctacatgagcgcggcataatctatcgcgatctgaagctcgataacgtcctattggattcagagggccacataaaactgacagattacggcatgtgtaaagagggcctccggcccggcgacaccacttccaccttttgcggcactcccaactacatcgcaccggagatactccgcggggaagactacgggttctctgtggactggtgggcccttggcgtccttatgttcgaaatgatggctggcagatctccttttgatatcgtgggctccagcgacaatcctgatcagaataccgaggattacttgtttcaggtcatcctcgagaaacaaatcaggatccctaggagcttgtccgtgaaggccgcctctgtgcttaagtcttttctgaataaagaccctaaagagcgcctggggtgtcatccccagacgggtttcgcagatattcagggccacccattcttccgtaacgttgactgggacatgatggagcagaaacaggtggtgcctcccttcaagccaaacattagtggtgaattcggattggacaattttgactctcagttcaccaatgaaccagtccagctgacacctgatgatgacgacatagtgaggaagatagatcagtcggagtttgaaggttttgagtacattaatcctttactgatgagtgcagaggagtgcgtttag

SEQ ID NO: 131518 - DNA, 1791 bp, Artificial Sequence
  derived and/or modified sequence
atgcccacacagagagatagctcaacaatgtcccacacagtggctggtgggggttcaggcgaccactcccaccaggttcgagtgaaggcatactataggggagacattatgatcacccactttgagccctcaatcagttttgaagggctgtgtaacgaggtgcgggacatgtgctccttcgacaacgagcagctctttaccatgaaatggatcgacgaggagggcgacccatgtactgtttcctctcagctggagctcgaggaggccttccggctctatgaactgaacaaagacagcgaattgttgatacacgtgttcccctgtgtgcctgagagacctggcatgccatgcccaggcgaggataagtcaatctaccggcgtggcgctagacgatggcggaaattgtattgtgctaatggccacacctttcaggccaaacgctttaaccggcgtgcccactgcgccatttgcacagatagaatctgggggttggggagacaaggctacaagtgcatcaactgcaagttactggttcacaagaaatgtcataagctcgtgaccatcgaatgtggaagacattccctacctcaggaacctgttatgccaatggatcagtcttcaatgcatagcgatcacgcacagaccgtgataccctataatccttcatcacacgaatcccttgatcaggtgggcgaggagaaggaggctatgaatacaagagagagtgggaaggcaagcagttcattggggttgcaggatttcgacttactccgcgtcattggcagaggatcgtatgcgaaggttctactcgtccgtctgaaaaagactgatcggatctacgcaatgaaagtggttaagaaggagctagtgaatgatgacgaagatattgactgggtgcagactgaaaagcatgtgttcgagcaggctagcaatcatcctttcctagtggggctacattcatgtttccaaacagaatcaaggcttttctttgtgatcgagtatgtgaatgggggtgacctcatgtttcatatgcagcgacagaggaagcttccggaggaacacgctcgtttctactcagccgaaattagcctagccctaaactatttacatgaaaggggaatcatatatcgggaccttaagcttgataatgtcctgctggactcagaaggccatatcaagctgacggactacggaatgtgcaaagaagggttgcgtcccggagacacgactagtactttctgtgggacgccaaattacatcgctcccgagatattgcgtggggaagactatggcttttcggtggattggtgggcacttggagtcctcatgttcgaaatgatggctggcaggtccccatttgatatagtagggtctagtgacaaccccgatcagaataccgaagattacttatttcaggttatcttagaaaaacagataagaatccctcggtctctttccgtgaaggccgcatcagtcttgaagtctttccttaataaggacccaaaggagcggctcggatgtcatcctcaaaccggtttcgcagatatacagggtcatccatttttcaggaatgttgattgggacatgatggagcagaagcaggtcgttccaccgttcaagccaaatatctctggtgagtttgggctagataattttgattcccagttcactaacgaacccgtccaactcacacccgacgacgatgacatcgtgcggaaaatagaccagtccgagtttgaggggttcgaatacattaacccactattaatgtcagccgaggaatgcgtgtag

SEQ ID NO: 131519 - DNA, 4950 bp, Artificial Sequence
  derived and/or modified sequence
ggttgcgcccgccctaccccggaatgtgggcctttggagcgagcgaagtgggagggaccgacgcaggaggtgtcttgggcccgggcggctgtagaggcggcggcgcctacgggcagtgggaggagccgcgcggttccggctgctccggcgaggcgacccttgggtcggcgctgcgggcgaggtgggcaggtaggtgggcggacggccgcggttctccggcaagcgcaggcggcggagtcccccacggcgcccgaagcgcccccccgcacccccggcctccagcgttgaggcgggggagtgaggagatgccgacccagagggacagcagcaccatgtcccacacggtcgcaggcggcggcagcggggaccattcccaccaggtccgggtgaaagcctactaccgcggggatatcatgataacacattttgaaccttccatctcctttgagggcctttgcaatgaggttcgagacatgtgttcttttgacaacgaacagctcttcaccatgaaatggatagatgaggaaggagacccgtgtacagtatcatctcagttggagttagaagaagcctttagactttatgagctaaacaaggattctgaactcttgattcatgtgttcccttgtgtaccagaacgtcctgggatgccttgtccaggagaagataaatccatctaccgtagaggtgcacgccgctggagaaagctttattgtgccaatggccacactttccaagccaagcgtttcaacaggcgtgctcactgtgccatctgcacagaccgaatatggggacttggacgccaaggatataagtgcatcaactgcaaactcttggttcataagaagtgccataaactcgtcacaattgaatgtgggcggcattctttgccacaggaaccagtgatgcccatggatcagtcatccatgcattctgaccatgcacagacagtaattccatataatccttcaagtcatgagagtttggatcaagttggtgaagaaaaagaggcaatgaacaccagggaaagtggcaaagcttcatccagtctaggtcttcaggattttgatttgctccgggtaataggaagaggaagttatgccaaagtactgttggttcgattaaaaaaaacagatcgtatttatgcaatgaaagttgtgaaaaaagagcttgttaatgatgatgaggatattgattgggtacagacagagaagcatgtgtttgagcaggcatccaatcatcctttccttgttgggctgcattcttgctttcagacagaaagcagattgttctttgttatagagtatgtaaatggaggagacctaatgtttcatatgcagcgacaaagaaaacttcctgaagaacatgccagattttactctgcagaaatcagtctagcattaaattatcttcatgagcgagggataatttatagagatttgaaactggacaatgtattactggactctgaaggccacattaaactcactgactacggcatgtgtaaggaaggattacggccaggagatacaaccagcactttctgtggtactcctaattacattgctcctgaaattttaagaggagaagattatggtttcagtgttgactggtgggctcttggagtgctcatgtttgagatgatggcaggaaggtctccatttgatattgttgggagctccgataaccctgaccagaacacagaggattatctcttccaagttattttggaaaaacaaattcgcataccacgttctctgtctgtaaaagctgcaagtgttctgaagagttttcttaataaggaccctaaggaacgattgggttgtcatcctcaaacaggatttgctgatattcagggacacccgttcttccgaaatgttgattgggatatgatggagcaaaaacaggtggtacctccctttaaaccaaatatttctggggaatttggtttggacaactttgattctcagtttactaatgaacctgtccagctcactccagatgacgatgacattgtgaggaagattgatcagtctgaatttgaaggttttgagtatatcaatcctcttttgatgtctgcagaagaatgtgtctgatcctcatttttcaaccatgtattctactcatgttgccatttaatgcatggataaacttgctgcaagcctggatacaattaaccattttatatttgccacctacaaaaaaacacccaatatcttctcttgtagactatatgaatcaattattacatctgttttactatgaaaaaaaaattaatactactagcttccagacaatcatgtcaaaatttagttgaactggtttttcagtttttaaaaggcctacagatgagtaatgaagttatcttttttgtttaaaaaaaaaaaaaacactgcattaaaaaagtatctgttgcattaaggcacatagtgggattacatcataaacctcccataatttttgtcattctgtgttaaatcatttcagggtttaattttgaaataaaagattaatataaaatgcaacaactttttatattacctattagttttggagttctttatgtttaaaaattcaggtgtaaattttattgccttggataaataaattattgatcttttttaaggcagcagttattaaattggtaatagaagatgctgcttgcttagaattgggaaattcggctgggtgcagtgactcaatgcctgtgatcccagtactttgggaggttgaggcgggcagatcacttgaggtcaggagtttgagattggcctggtcaacatggtgaaatcctgtctctactaaaaatacaaaaattagctgggcatggtggcacatacctgtaatcccagctactcgggaggctgaaacaggagaatcgcttgaacccaggagatggagttggcagtgagccaagattagcctgggcaacagtgagtgagactcggtctcaaacaaaaaccaaattgggaaattcttcttgagttaaaaaagacactttttattatgaatcagattccaaatcattaactatttttgcaaaactggcacaagtggtttttctttttaagtatattaacagggtagctcctgagcctttccctttattggaaactttaactgcagtgttaatatatacactgcaaaagaccaaggatgcagttgaatggaaaattactcagtgtatagaaaggaaaaaaaccagaaatttaaaatagatacagaaaagtacactggtaatatttttatttcctattggagagtgaatccccacagttgctttttgtgacttgattcaaatgaggcactcattattgttaccaaacttgtaaaagcattccatgtattcagtggaggcagaatgtataatattttttccttataatttagcatacaggaaaagtatttattttttaagtagggtatcttaattatgctcatttcttcccctaaaccacattatctatatgattggaccctttagtgaaatcagaaaaataaagtaggcatgaataaatgttcaggacacacacatacactcacacacatcacagtatcagctctttcagtgagtttttattaactagataacacatgtaatacatagtagaatacatttcagaggcagagttcctcggattattttttatggatattagtgttcagcagcttattatttaaaggggtgccaaatatagcatccttctgttgtttattttaaatatatttttaatgaaaagggacttaaaaagtaaacatgattatctaaattacttaaaattttttaatcttagtaaaaattttaggaaagttatctagtttaaatttcaaatgttttaaaatttgtaggcatttaataaattatctttttttggaggggtggatgctgcatttcattggaaatgtcatttttccaaagtttctagctatatactctctttccttcaaataacataagtctgaaagcaatgaaaacgtcaaaggaaaatgtttatatacatccacatgtttatttaatatgtttctcttaacacctgaaacttgttttaaaacaaaaagcagtattcacttcaaatcataaacttagaattctgtatctcatgtcagaaatatgtttatggccttgcttttaagtggtgctgtttcccatagggcattagttctcagattttggaatgtgaaataatcacctaggaagttggtttaaaatgcacactagtgagcccaccttagacttcttttggggccttcgacctcactttgagaaataccttcttcaggttattctttatgtttgtcctgtggttaaatattagagtattcatgataaaacattttgagaaggggtaagcagtgagttattacccacaatttaaagcaaattttgaatgaatctttaagttaggtatctaccttcccaccagccccccaaaaaacctctcagtagtttctttcagtgtacaaaatgatgagcatttttctatgatgaggttttaaccattattcagggtggtcttttgtttttaaatctttttttaactaataagatttacggtgtgtattttatacagaaatgcattataaatgtttttaattgtgttctgttttttgcagtctttaagtgccatgccaattgttcttatattctatagaagttcgctcaaaatactcaacaggggaataggcagcggacagtcagaatggttggaattttggctttctaagaaaaactttattttgcataagcatgtggtcagatcattttgtgcatatgcagcctggattggatgttaagtaaatgcttgttcagtgccggtacatttacttaaatctgtttttatttttgtcatgtagaatactactgtggtcatcataatgtaatctatttctgtaccttttttttttttttttactttgaagtctttaaataaaatgtataatacccattga

SEQ ID NO: 131520 - DNA, 1791 bp, Artificial Sequence
  derived and/or modified sequence
atgcccacccagagagacagcagcaccatgagccacaccgtggccggcggcggcagcggcgaccacagccaccaggtgagagtgaaggcctactacagaggcgacatcatgatcacccacttcgagcccagcatcagcttcgagggcctgtgcaacgaggtgagagacatgtgcagcttcgacaacgagcagctgttcaccatgaagtggatcgacgaggagggcgacccctgcaccgtgagcagccagctggagctggaggaggccttcagactgtacgagctgaacaaggacagcgagctgctgatccacgtgttcccctgcgtgcccgagagacccggcatgccctgccccggcgaggacaagagcatctacagaagaggcgccagaagatggagaaagctgtactgcgccaacggccacaccttccaggccaagagattcaacagaagagcccactgcgccatctgcaccgacagaatctggggcctgggcagacagggctacaagtgcatcaactgcaagctgctggtgcacaagaagtgccacaagctggtgaccatcgagtgcggcagacacagcctgccccaggagcccgtgatgcccatggaccagagcagcatgcacagcgaccacgcccagaccgtgatcccctacaaccccagcagccacgagagcctggaccaggtgggcgaggagaaggaggccatgaacaccagagagagcggcaaggccagcagcagcctgggcctgcaggacttcgacctgctgagagtgatcggcagaggcagctacgccaaggtgctgctggtgagactgaagaagaccgacagaatctacgccatgaaggtggtgaagaaggagctggtgaacgacgacgaggacatcgactgggtgcagaccgagaagcacgtgttcgagcaggccagcaaccaccccttcctggtgggcctgcacagctgcttccagaccgagagcagactgttcttcgtgatcgagtacgtgaacggcggcgacctgatgttccacatgcagagacagagaaagctgcccgaggagcacgccagattctacagcgccgagatcagcctggccctgaactacctgcacgagagaggcatcatctacagagacctgaagctggacaacgtgctgctggacagcgagggccacatcaagctgaccgactacggcatgtgcaaggagggcctgagacccggcgacaccaccagcaccttctgcggcacccccaactacatcgcccccgagatcctgagaggcgaggactacggcttcagcgtggactggtgggccctgggcgtgctgatgttcgagatgatggccggcagaagccccttcgacatcgtgggcagcagcgacaaccccgaccagaacaccgaggactacctgttccaggtgatcctggagaagcagatcagaatccccagaagcctgagcgtgaaggccgccagcgtgctgaagagcttcctgaacaaggaccccaaggagagactgggctgccacccccagaccggcttcgccgacatccagggccaccccttcttcagaaacgtggactgggacatgatggagcagaagcaggtggtgccccccttcaagcccaacatcagcggcgagttcggcctggacaacttcgacagccagttcaccaacgagcccgtgcagctgacccccgacgacgacgacatcgtgagaaagatcgaccagagcgagttcgagggcttcgagtacatcaaccccctgctgatgagcgccgaggagtgcgtgtag

SEQ ID NO: 131521 - protein, 942 aa, Artificial Sequence
  derived and/or modified sequence
MASDAVQSEPRSWSLLEQLGLAGADLAAPGVQQQLELERERLRREIRKELKLKEGAENLRRATTDLGRSLGPVELLLRGSSRRLDLLHQQLQELHAHVVLPDPAATHDGPQSPGAGGPTCSATNLSRVAGLEKQLAIELKVKQGAENMIQTYSNGSTKDRKLLLTAQQMLQDSKTKIDIIRMQLRRALQAGQLENQAAPDDTQGSPDLGAVELRIEELRHHFRVEHAVAEGAKNVLRLLSAAKAPDRKAVSEAQEKLTESNQKLGLLREALERRLGELPADHPKGRLLREELAAASSAAFSTRLAGPFPATHYSTLCKPAPLTGTLEVRVVGCRDLPETIPWNPTPSMGGPGTPDSRPPFLSRPARGLYSRSGSLSGRSSLKAEAENTSEVSTVLKLDNTVVGQTSWKPCGPNAWDQSFTLELERARELELAVFWRDQRGLCALKFLKLEDFLDNERHEVQLDMEPQGCLVAEVTFRNPVIERIPRLRRQKKIFSKQQGKAFQRARQMNIDVATWVRLLRRLIPNATGTGTFSPGASPGSEARTTGDISVEKLNLGTDSDSSPQKSSRDPPSSPSSLSSPIQESTAPELPSETQETPGPALCSPLRKSPLTLEDFKFLAVLGRGHFGKVLLSEFRPSGELFAIKALKKGDIVARDEVESLMCEKRILAAVTSAGHPFLVNLFGCFQTPEHVCFVMEYSAGGDLMLHIHSDVFSEPRAIFYSACVVLGLQFLHEHKIVYRDLKLDNLLLDTEGYVKIADFGLCKEGMGYGDRTSTFCGTPEFLAPEVLTDTSYTRAVDWWGLGVLLYEMLVGESPFPGDDEEEVFDSIVNDEVRYPRFLSAEAIGIMRRLLRRNPERRLGSSERDAEDVKKQPFFRTLGWEALLARRLPPPFVPTLSGRTDVSNFDEEFTGEAPTLSPPRDARPLTAAEQAAFLDFDFVAGGC

SEQ ID NO: 131522 - DNA, 2829 bp, Artificial Sequence
  derived and/or modified sequence
atggcctccgatgcagtgcaatctgaacctaggtcttggtccctacttgagcagttgggactggccggcgctgatctggccgcccccggcgtgcagcagcagttggaactcgagagggagcgccttcggcgcgagattaggaaagagttaaagctgaaggaaggtgccgagaatctacggagggctacaactgatctcggacggagccttggccccgtcgagctactgctgcgggggagctcaagacggcttgacctgttacaccagcaactacaggagctccacgcccacgtggtcctgcccgaccctgccgctacccacgatggcccccagtccccaggtgccggcgggcccacttgttccgccacaaacctcagtcgagtcgccggcctggaaaaacagttggccatcgaattgaaagtgaagcaaggcgccgaaaatatgatccagacatattccaacggctctactaaggatcggaaacttctgttgaccgctcagcagatgctccaggactctaaaaccaagattgacatcatcaggatgcaactcaggagagcgctgcaggccggtcagctagagaatcaggccgccccagacgatacacaaggctcacctgatcttggcgcagtcgagctgcgcatagaggagctgaggcaccacttccgcgttgaacacgcggtggccgaaggcgccaagaatgtgctgaggctgctgtctgcggcaaaagctcccgaccggaaagcagtgtcagaagctcaggagaagctgactgaatcaaaccagaagttaggtctattgcgggaggctctcgaaaggagattaggagagttgcccgctgaccatccaaaagggcgactgctgagagaagaactggccgcggcaagctctgctgctttctcaactagactggccggcccttttccagcaacgcactattcaaccttatgcaaacctgcaccacttaccggaactttggaggttcgcgtcgtgggatgtcgtgacttgccagagaccatcccatggaacccaactccttcaatgggaggtcccggaacacctgacagtcggccacctttcctgtcccgcccagccagaggcttatactcacggtctggaagcctttcaggaagaagctcacttaaggctgaggcagaaaatacctcagaggtctccactgttttgaagctcgacaacaccgtggttggacaaacatcttggaaaccctgtgggcctaacgcctgggaccaaagctttactcttgaacttgaaagggctcgcgagctggaacttgcggtgttttggcgcgatcaacggggcctgtgcgccttgaagtttctgaagttggaggatttccttgacaatgagagacatgaggtccagttggatatggaaccacaagggtgcttggtggcagaagttacttttcggaatcctgttatagagcggattccccggctgaggcggcaaaagaagattttctcgaagcagcagggaaaagcctttcagcgcgccaggcagatgaacatcgatgtggctacgtgggtgagacttctcaggagattaatccctaacgccacgggaactggtaccttcagtcctggggctagccccggatcagaagccaggactactggggacataagcgtagagaagctgaatctaggaactgattccgatagctccccccagaagtctagcagggaccctccttcctctccgtcaagcctcagttcacctattcaggagtctaccgcccccgagttgcccagtgaaacgcaggagacccccggaccagcactttgctctcccctgcgaaagagccctctgacattggaggacttcaaatttttagctgttttaggccgtggccacttcggcaaagtccttctgagcgaattcaggccgtctggcgaactgtttgccatcaaggcccttaagaagggcgatatcgtggctcgggatgaggtggaatctctcatgtgcgaaaagaggattcttgcggccgtgactagcgccggtcacccattcctggtgaacctgtttggatgcttccaaaccccggaacacgtctgtttcgtaatggagtatagtgctggcggtgacctgatgctgcacattcacagcgatgtatttagcgagcccagagccatcttctattccgcctgcgtggttctgggtctccagtttcttcacgagcataagatcgtgtacagggacttaaaattggataacctgcttttagacactgagggctacgtcaagatagctgacttcggactgtgcaaggagggcatggggtatggcgacaggacctcaaccttctgcggaacccccgagttccttgcgccagaggtgctcacagacacaagttacacacgtgccgtggactggtggggcctcggtgtcctcctctacgagatgctggtgggcgaaagccccttccccggcgatgatgaggaagaagtcttcgattcgatcgtgaacgacgaggtgcgttaccctagattcttgtcagcggaggcaatcgggatcatgcgccgcctcctgcgtcgcaacccagaaagacgactcggaagctcagagagggatgccgaagacgtcaaaaagcagcccttctttagaaccctgggctgggaggctttgctggcaaggaggttgccgcctccttttgtccctactctttctggcaggactgatgtgagtaatttcgatgaggagttcaccggcgaagccccaaccctcagccccccaagagatgccagacctttaacggccgcagaacaagccgctttcctggatttcgactttgtggctggtggttgttag

SEQ ID NO: 131523 - DNA, 2829 bp, Artificial Sequence
  derived and/or modified sequence
atggccagtgatgctgtgcagagcgagcccaggtcctggagcctgctggagcagctgggcctggccggggctgacctggccgcccctggggtgcagcagcagctggagctggagcgggagcggctgcggcgggagatcaggaaggagctgaagctgaaggagggcgctgagaacctgcggcgggccaccacagacctgggccgcagcctgggccctgtggagctgctgctgcggggcagcagccggcggctggacctgctgcaccagcagctgcaggagctgcacgcccacgtggtgctgcctgaccctgctgccacccatgatggcccccagagccctggagctgggggccccacctgcagcgccaccaacctgagccgggtggccggcctggagaagcagctggccatcgagctgaaggtgaagcagggcgctgagaacatgatccagacctacagcaatggcagcaccaaggacaggaagctgctgctgacagcccagcagatgctgcaggacagcaagaccaagattgacatcatccgcatgcagctgcggcgggccctgcaggccggccagctggagaaccaggccgccccagatgacacccagggcagcccagacctgggcgctgtggagctgagaattgaggagctgcggcaccacttccgggtggagcacgctgtggccgagggcgccaagaatgtgctgcggctgctgtctgctgccaaggccccagacaggaaggctgtgtctgaggcccaggagaagctgacagagagcaaccagaagctgggcctgctgcgggaggccctggagcggcggctgggggagctgcctgctgaccaccccaagggccgcctgctgcgggaggagctggccgccgccagcagcgctgccttcagcacccggctggccggccccttccctgccacccactacagcaccctgtgcaagccagcccccctgaccggcaccctggaggtgcgggtggtgggctgccgggacctgcctgagaccatcccctggaaccccacccccagcatgggcggccctggcaccccagacagccggccccccttcctgagcaggcctgcccggggcctgtacagccgcagcggcagcctgagcggccgcagcagcctgaaggccgaggccgagaacaccagcgaggtgtccacagtgctgaagctggacaacacagtggtgggccagacctcctggaagccctgtggccccaatgcctgggaccagagcttcaccctggagctggagcgggcccgggagctggagctggccgtgttctggagggaccagaggggcctgtgtgccctgaagttcctgaagctggaggacttcctggacaatgaaagacatgaggtgcagctggacatggagccccagggctgcctggtggccgaggtgaccttcagaaatcctgtgattgagcgcatcccccggctgcggcggcagaagaagatcttcagcaagcagcagggcaaggccttccagagggcccggcagatgaacattgatgtggccacctgggtgcggctgctgcggcggctcatccccaatgccactggaacaggcaccttcagccctggggccagccctggcagcgaggcccggaccactggagacatctctgtggagaagctgaacctgggcacagacagcgacagcagcccccagaagagcagccgggacccccccagcagccccagcagcctgagcagccccatccaggagagcacagcccctgagctgcccagcgagacccaggagaccccaggccctgccctgtgcagccccctgaggaagagccccctgaccctggaggacttcaagttcctggccgtgctgggccggggccactttgggaaggtgctgctgtctgagttccggcccagcggggagctgtttgccatcaaggccctgaagaagggggacatcgtggccagagatgaggtggagagcctgatgtgtgagaagaggatcctggccgctgtgaccagcgctggccaccccttcctggtgaacctgtttggctgcttccagaccccagagcacgtgtgctttgtgatggagtacagcgctggaggagacctgatgctgcacatccacagtgatgtgttttctgagccccgggccatcttctacagcgcctgtgtggtgctgggcctgcagttcctgcacgagcacaagatcgtgtacagagacctgaagctggacaacctgctgctggacacagagggctacgtgaagattgctgactttggcctgtgcaaggagggcatgggctacggggacaggaccagcaccttctgtggcaccccagagttcctggcccctgaggtgctgacagacaccagctacaccagggctgtggactggtggggcctgggcgtgctgctgtatgagatgctggtgggggagagccccttccctggagatgatgaggaggaggtgtttgacagcatcgtgaatgatgaggtgcgctacccccgcttcctgtctgctgaggccatcggcatcatgaggcggctgctgcggaggaaccctgagcggcggctgggcagcagcgagagagatgctgaagatgtgaagaagcagcccttcttccgcaccctgggctgggaggccctgctggcccggcggctgcccccaccatttgtgcccaccctgagcggccgcacagatgtgagcaactttgatgaggagttcaccggggaggcccccaccctgagccccccaagagatgcccggcccctgacagctgctgagcaggccgccttcctggactttgattttgtggccggcggctgctag

SEQ ID NO: 131524 - DNA, 2829 bp, Artificial Sequence
  derived and/or modified sequence
atggccagcgacgccgtgcagagcgagccccggagctggagcctgctagaacagctgggactggcgggggccgatctggccgctccaggggtgcaacagcagttggagctggagagagagcggctgcgacgtgagattagaaaggagctgaaattgaaggaaggcgctgaaaacctgaggcgggccaccaccgatctcgggcgttctctgggtccagttgagctactcttacgcgggagttcccggaggctcgatttgctacaccagcagctccaggaactgcacgcacatgtggtactgcctgatccggccgccacacacgacgggccccagagcccaggcgccggaggaccaacctgctccgcaaccaatctgtccagggtagccggtctggagaagcaactggctatagagttgaaagtcaaacagggcgctgagaacatgattcagacttactctaacgggtcaaccaaggatagaaagcttctgttaacagcacagcagatgctccaggatagcaagactaaaatagatattatacgaatgcagctgcgtagagccctgcaggccgggcagctagaaaaccaggctgcaccggatgacacacagggctcccctgacctgggcgccgtggagttacgcatcgaggagttgcgtcaccactttcgtgtcgagcacgcagtcgctgaaggcgcaaaaaacgttctcaggttgttatcggccgccaaggcaccggaccgcaaagccgttagtgaagctcaagaaaagctcaccgagtcaaatcagaagctgggacttctgagggaggccctggaacgacgtctgggtgagctgccagctgaccatcctaaaggtaggttgctgcgagaagaactcgccgccgcaagttcggcagccttcagcaccagactagcgggcccctttcccgctacccattactccactttgtgtaagccagcacctctaacagggaccctcgaggttagggtcgtaggctgtagggatctgccagaaactatcccttggaatccaaccccttcaatgggaggacccggtactccagactcaaggcccccatttctatctcggccagccagaggactgtattctcggtctggcagcctgagcggccggagcagtctgaaggctgaggcagaaaacacgagcgaagtgtctaccgtgctaaagttggacaacacagttgttgggcagacatcatggaagccttgtggcccaaacgcctgggatcaatcattcactttggaacttgaacgtgcacgcgagcttgagttggcagtgttttggagagatcagaggggactctgcgcactgaagtttctaaagcttgaggacttcctcgacaatgaaaggcatgaggtgcagcttgacatggagcctcaaggctgcctcgttgcagaggtgaccttcaggaaccctgtcatcgagcgcattccacgcctacggcgacagaaaaaaatttttagcaaacaacaggggaaggccttccagcgggcacgtcaaatgaacatcgacgtggcgacatgggtacgcttgctgcgcaggctgatacctaacgcaacaggcactggaaccttcagcccaggggcaagcccaggcagtgaggcccgcacaactggcgacatctctgttgagaaactaaatctcggaaccgactccgatagctctccccagaagagctctagggatccacctagcagcccgagcagcctgtccagcccgatccaagaatccaccgcccccgaattaccgtccgagactcaggaaaccccaggccccgctctctgttcccctttgagaaagagccctcttactctcgaggattttaagttcctcgccgttctggggcgcggacactttgggaaagttctgctgtccgagtttaggccgtccggggagttgttcgcgattaaagcgctgaaaaaaggggacatcgtggcccgagatgaggtggagtccctgatgtgtgaaaaacggatcttggcggcagtcacgtcggcagggcatccattccttgttaatctgtttgggtgcttccagaccccggagcacgtgtgcttcgtcatggagtatagcgccggcggggacctgatgcttcatattcatagcgacgtattttccgagccaagggctattttttattcagcctgtgtggtgctggggcttcagttcctgcacgagcataaaatcgtgtatagagatctcaagctggacaatctcctgctggacaccgaaggttacgtaaaaattgcggattttgggctttgcaaagaaggaatgggatatggcgatcggaccagtacattctgcggaaccccggagttcctcgcaccagaagtgctcacagacacctcctacacgagggctgtcgattggtggggactgggagtattactgtatgagatgctggtaggggaatcccctttccctggtgatgacgaggaagaggtctttgattcaatcgtgaatgatgaagtgcggtacccacggttcctttctgctgaagccatcggcataatgagaagactgctcaggagaaatcccgagcgccgcctggggagctctgaacgagatgcagaggacgtgaaaaaacaaccattttttcgcaccctggggtgggaggctttgttagcgcgcaggctgccccccccattcgtgcctaccctctccggacggacagatgtgagcaatttcgatgaggaatttaccggagaagcacctacactgagtccacctcgcgatgcaaggccactgaccgcagctgaacaggccgcgtttctggactttgactttgtggctggcggatgctag

SEQ ID NO: 131525 - DNA, 2829 bp, Artificial Sequence
  derived and/or modified sequence
atggcctcagatgctgtgcaaagtgagcccaggtcatggagtctgctggagcagctcgggctcgccggagccgatctcgccgcaccaggagtgcaacagcaactggaactggagcgcgaacgccttcggagagaaatacgaaaggaacttaagctgaaggagggagctgagaacctgagacgtgcgacaaccgacctggggaggtccctgggccctgtggagcttctgttaaggggcagctcacgaagacttgacctcctgcatcagcagttgcaagaactccacgcccacgtcgtcctccctgatcctgcagccactcacgatgggccacagagtcctggagcagggggaccgacatgcagtgctaccaacctctcaagggtcgccggtctcgagaagcagctggctattgagcttaaagttaaacaaggcgctgagaatatgatccagacctatagtaatgggtcgactaaagatcgaaaactgcttttaactgcccaacagatgctccaggactccaaaactaagatcgatatcatcagaatgcagttgagaagagcacttcaggcaggtcagctggagaatcaggctgcgcctgacgatacacagggctccccagatcttggtgccgtggagttacggattgaggagctgaggcaccactttcgggtggagcacgcggtcgccgagggtgccaagaacgtcctgaggctcctgtctgccgcaaaggcgcctgatcgaaaagccgtgtctgaagcccaggaaaaattgaccgaaagcaaccagaagttaggcctattgcgcgaggcactagaaaggcgtctgggcgagttacctgccgaccatccaaagggacgcttgctgcgggaagagctggctgccgcaagtagcgcagccttttcaacgcgtctcgctggacctttccctgccacacactactcaactttgtgtaagcctgcgcctctgacagggaccctggaagtgcgggtcgttgggtgccgcgatctcccagagacaatcccctggaatcctacccccagtatgggcggacctgggacccccgattccagaccccctttcttatccaggccagctagaggcttgtactctcggtccggcagtctgtccggccgtagttctttgaaggccgaggccgagaacacatcagaggtgtccacagtcctgaagctcgacaatactgttgtgggtcagacctcctggaaaccatgcggaccaaatgcatgggaccagtcttttacattggagctggaaagagctcgagaactagaactagccgttttttggagggatcagcggggattgtgtgcgctgaagttcctgaaactggaagacttcctcgataacgagcgccatgaggtgcagctagatatggagccacagggttgcctcgtcgccgaagtcacctttagaaatcccgtgatagaacggataccgagacttcgccgacagaagaagatcttttcaaaacagcagggtaaggcatttcagagagctcgtcaaatgaatattgatgttgcaacttgggtccggctgctgcgcagactgattcctaatgcaacggggacgggtactttctcacccggagcgtccccaggctctgaagctcgaacgactggagatattagtgttgaaaaactcaacctcggcactgattcggattctagcccccagaagtcaagcagagacccaccgagctcaccgtcctcactttcctcacccatccaagagagcaccgcacctgaactcccatccgaaacccaggaaacccctgggcctgccctgtgctcacccctgagaaaaagtcctctgaccctggaagatttcaagtttttggccgtgctcggaagggggcactttgggaaggtgctgctaagcgaattccgacctagcggtgagctgtttgccatcaaagcgctcaagaagggggatattgtcgccagagatgaggtagaaagtcttatgtgtgagaagagaatactggctgctgtgacgtctgcaggccacccatttctcgttaatctgtttggctgcttccagacgcctgaacacgtgtgcttcgtcatggaatattcagcaggaggtgatttaatgctgcacatacacagcgacgtgttttcagagcctcgcgctatcttctacagcgcctgcgtggtgcttgggttgcagtttctgcatgagcataaaattgtgtaccgggatctcaaactggataacttgctcttggacaccgaaggctacgtgaaaatcgcagattttggcctgtgcaaggaaggaatgggttatggcgacaggacctcgactttttgcggaactccagaattcttagcacccgaagtgctgacggatacaagttacactcgggcagtcgactggtggggcctgggggtcttgctgtatgagatgctcgtgggagagtccccttttccaggcgacgatgaagaggaagtgtttgactccatagtaaatgatgaggtgagatacccacggtttctgtctgccgaggctatcgggatcatgagacgactgctccggagaaacccggaaagaagacttgggtcatcagaaagagacgctgaagatgtgaagaagcagccatttttccgaactctgggatgggaagcccttttagctagaaggcttccacccccttttgttccgaccctctccggtcggaccgatgtgtctaattttgatgaggagtttacgggcgaggccccaactctgagccctccccgtgacgctcgtccgctcactgccgcagagcaagccgcattcttggacttcgatttcgtggctggcggatgctag

SEQ ID NO: 131526 - DNA, 3069 bp, Artificial Sequence
  derived and/or modified sequence
cggcggcctggccaggcgaggcgggagccgagcaggccggagcgggccgcgcgccggggagggtcgcgccgcgcccgccccctccccgccacgcccggggcgcacgcgcgctcctctggccgcccctccctccgcgcggggacccctggcgggcggcaggaggacatggccagcgacgccgtgcagagtgagcctcgcagctggtccctgctagagcagctgggcctggccggggcagacctggcggcccccggggtacagcagcagctggagctggagcgggagcggctgcggcgggaaatccgcaaggagctgaagctgaaggagggtgctgagaacctgcggcgggccaccactgacctgggccgcagcctgggccccgtagagctgctgctgcggggctcctcgcgccgcctcgacctgctgcaccagcagctgcaggagctgcacgcccacgtggtgcttcccgacccggcggccacccacgatggcccccagtcccctggtgcgggtggccccacctgctcggccaccaacctgagccgcgtggcgggcctggagaagcagttggccattgagctgaaggtgaagcagggggcggagaacatgatccagacctacagcaatggcagcaccaaggaccggaagctgctgctgacagcccagcagatgttgcaggacagtaagaccaagattgacatcatccgcatgcaactccgccgggcgctgcaggccggccagctggagaaccaggcagccccggatgacacccaagggagtcctgacctgggggctgtggagctgcgcatcgaagagctgcggcaccacttccgagtggagcacgcggtggccgagggtgccaagaacgtactgcgcctgctcagcgctgccaaggccccggaccgcaaggcagtcagcgaggcccaggagaaattaacagaatccaaccagaagctggggctgctgcgggaggctctggagcggagacttggggagctgcccgccgaccaccccaaggggcggctgctgcgagaagagctcgctgcggcctcctccgctgccttcagcacccgcctggccgggccctttcccgccacgcactacagcaccctgtgcaagcccgcgccgctcacagggaccctggaggtacgagtggtgggctgcagagacctcccagagaccatcccgtggaaccctaccccctcaatggggggacctgggaccccagacagccgcccccccttcctgagccgcccagcccggggcctttacagccgaagcggaagcctcagtggccggagcagcctcaaagcagaagccgagaacaccagtgaagtcagcactgtgcttaagctggataacacagtggtggggcagacgtcttggaagccatgtggccccaatgcctgggaccagagcttcactctggagctggaaagggcacgggaactggagttggctgtgttctggcgggaccagcggggcctgtgtgccctcaaattcctgaagttggaggatttcttggacaatgagaggcatgaggtgcagctggacatggaaccccagggctgcctggtggctgaggtcaccttccgcaaccctgtcattgagaggattcctcggctccgacggcagaagaaaattttctccaagcagcaagggaaggcgttccagcgtgctaggcagatgaacatcgatgtcgccacgtgggtgcggctgctccggaggctcatccccaatgccacgggcacaggcacctttagccctggggcttctccaggatccgaggcccggaccacgggtgacatatcggtggagaagctgaacctcggcactgactcggacagctcacctcagaagagctcgcgggatcctccttccagcccatcgagcctgagctcccccatccaggaatccactgctcccgagctgccttcggagacccaggagaccccaggccccgccctgtgcagccctctgaggaagtcacctctgaccctcgaagatttcaagttcctggcggtgctgggccggggtcattttgggaaggtgctcctctccgaattccggcccagtggggagctgttcgccatcaaggctctgaagaaaggggacattgtggcccgagacgaggtggagagcctgatgtgtgagaagcggatattggcggcagtgaccagtgcgggacaccccttcctggtgaacctcttcggctgtttccagacaccggagcacgtgtgcttcgtgatggagtactcggccggtggggacctgatgctgcacatccacagcgacgtgttctctgagccccgtgccatcttttattccgcctgcgtggtgctgggcctacagtttcttcacgaacacaagatcgtctacagggacctgaagttggacaatttgctcctggacaccgagggctacgtcaagatcgcagactttggcctctgcaaggaggggatgggctatggggaccggaccagcacattctgtgggaccccggagttcctggcccctgaggtgctgacggacacgtcgtacacgcgagctgtggactggtggggactgggtgtgctgctctacgagatgctggttggcgagtccccattcccaggggatgatgaggaggaggtcttcgacagcatcgtcaacgacgaggttcgctacccccgcttcctgtcggccgaagccatcggcatcatgagaaggctgcttcggaggaacccagagcggaggctgggatctagcgagagagatgcagaagatgtgaagaaacagcccttcttcaggactctgggctgggaagccctgttggcccggcgcctgccaccgccctttgtgcccacgctgtccggccgcaccgacgtcagcaacttcgacgaggagttcaccggggaggcccccacactgagcccgccccgcgacgcgcggcccctcacagccgcggagcaggcagccttcctggacttcgacttcgtggccgggggctgctagccccctcccctgcccctgcccctgcccctgcccgagagctcttagtttttaaaaaggcctttgggatttgccgga

SEQ ID NO: 131527 - DNA, 2829 bp, Artificial Sequence
  derived and/or modified sequence
atggccagcgacgccgtgcagagcgagcccagaagctggagcctgctggagcagctgggcctggccggcgccgacctggccgcccccggcgtgcagcagcagctggagctggagagagagagactgagaagagagatcagaaaggagctgaagctgaaggagggcgccgagaacctgagaagagccaccaccgacctgggcagaagcctgggccccgtggagctgctgctgagaggcagcagcagaagactggacctgctgcaccagcagctgcaggagctgcacgcccacgtggtgctgcccgaccccgccgccacccacgacggcccccagagccccggcgccggcggccccacctgcagcgccaccaacctgagcagagtggccggcctggagaagcagctggccatcgagctgaaggtgaagcagggcgccgagaacatgatccagacctacagcaacggcagcaccaaggacagaaagctgctgctgaccgcccagcagatgctgcaggacagcaagaccaagatcgacatcatcagaatgcagctgagaagagccctgcaggccggccagctggagaaccaggccgcccccgacgacacccagggcagccccgacctgggcgccgtggagctgagaatcgaggagctgagacaccacttcagagtggagcacgccgtggccgagggcgccaagaacgtgctgagactgctgagcgccgccaaggcccccgacagaaaggccgtgagcgaggcccaggagaagctgaccgagagcaaccagaagctgggcctgctgagagaggccctggagagaagactgggcgagctgcccgccgaccaccccaagggcagactgctgagagaggagctggccgccgccagcagcgccgccttcagcaccagactggccggccccttccccgccacccactacagcaccctgtgcaagcccgcccccctgaccggcaccctggaggtgagagtggtgggctgcagagacctgcccgagaccatcccctggaaccccacccccagcatgggcggccccggcacccccgacagcagaccccccttcctgagcagacccgccagaggcctgtacagcagaagcggcagcctgagcggcagaagcagcctgaaggccgaggccgagaacaccagcgaggtgagcaccgtgctgaagctggacaacaccgtggtgggccagaccagctggaagccctgcggccccaacgcctgggaccagagcttcaccctggagctggagagagccagagagctggagctggccgtgttctggagagaccagagaggcctgtgcgccctgaagttcctgaagctggaggacttcctggacaacgagagacacgaggtgcagctggacatggagccccagggctgcctggtggccgaggtgaccttcagaaaccccgtgatcgagagaatccccagactgagaagacagaagaagatcttcagcaagcagcagggcaaggccttccagagagccagacagatgaacatcgacgtggccacctgggtgagactgctgagaagactgatccccaacgccaccggcaccggcaccttcagccccggcgccagccccggcagcgaggccagaaccaccggcgacatcagcgtggagaagctgaacctgggcaccgacagcgacagcagcccccagaagagcagcagagacccccccagcagccccagcagcctgagcagccccatccaggagagcaccgcccccgagctgcccagcgagacccaggagacccccggccccgccctgtgcagccccctgagaaagagccccctgaccctggaggacttcaagttcctggccgtgctgggcagaggccacttcggcaaggtgctgctgagcgagttcagacccagcggcgagctgttcgccatcaaggccctgaagaagggcgacatcgtggccagagacgaggtggagagcctgatgtgcgagaagagaatcctggccgccgtgaccagcgccggccaccccttcctggtgaacctgttcggctgcttccagacccccgagcacgtgtgcttcgtgatggagtacagcgccggcggcgacctgatgctgcacatccacagcgacgtgttcagcgagcccagagccatcttctacagcgcctgcgtggtgctgggcctgcagttcctgcacgagcacaagatcgtgtacagagacctgaagctggacaacctgctgctggacaccgagggctacgtgaagatcgccgacttcggcctgtgcaaggagggcatgggctacggcgacagaaccagcaccttctgcggcacccccgagttcctggcccccgaggtgctgaccgacaccagctacaccagagccgtggactggtggggcctgggcgtgctgctgtacgagatgctggtgggcgagagccccttccccggcgacgacgaggaggaggtgttcgacagcatcgtgaacgacgaggtgagataccccagattcctgagcgccgaggccatcggcatcatgagaagactgctgagaagaaaccccgagagaagactgggcagcagcgagagagacgccgaggacgtgaagaagcagcccttcttcagaaccctgggctgggaggccctgctggccagaagactgcccccccccttcgtgcccaccctgagcggcagaaccgacgtgagcaacttcgacgaggagttcaccggcgaggcccccaccctgagcccccccagagacgccagacccctgaccgccgccgagcaggccgccttcctggacttcgacttcgtggccggcggctgctag

SEQ ID NO: 131528 - protein, 912 aa, Artificial Sequence
  derived and/or modified sequence
MSAPPVLRPPSPLLPVAAAAAAAAAALVPGSGPGPAPFLAPVAAPVGGISFHLQIGLSREPVLLLQDSSGDYSLAHVREMACSIVDQKFPECGFYGMYDKILLFRHDPTSENILQLVKAASDIQEGDLIEVVLSASATFEDFQIRPHALFVHSYRAPAFCDHCGEMLWGLVRQGLKCEGCGLNYHKRCAFKIPNNCSGVRRRRLSNVSLTGVSTIRTSSAELSTSAPDEPLLQKSPSESFIGREKRSNSQSYIGRPIHLDKILMSKVKVPHTFVIHSYTRPTVCQYCKKLLKGLFRQGLQCKDCRFNCHKRCAPKVPNNCLGEVTINGDLLSPGAESDVVMEEGSDDNDSERNSGLMDDMEEAMVQDAEMAMAECQNDSGEMQDPDPDHEDANRTISPSTSNNIPLMRVVQSVKHTKRKSSTVMKEGWMVHYTSKDTLRKRHYWRLDSKCITLFQNDTGSRYYKEIPLSEILSLEPVKTSALIPNGANPHCFEITTANVVYYVGENVVNPSSPSPNNSVLTSGVGADVARMWEIAIQHALMPVIPKGSSVGTGTNLHRDISVSISVSNCQIQENVDISTVYQIFPDEVLGSGQFGIVYGGKHRKTGRDVAIKIIDKLRFPTKQESQLRNEVAILQNLHHPGVVNLECMFETPERVFVVMEKLHGDMLEMILSSEKGRLPEHITKFLITQILVALRHLHFKNIVHCDLKPENVLLASADPFPQVKLCDFGFARIIGEKSFRRSVVGTPAYLAPEVLRNKGYNRSLDMWSVGVIIYVSLSGTFPFNEDEDIHDQIQNAAFMYPPNPWKEISHEAIDLINNLLQVKMRKRYSVDKTLSHPWLQDYQTWLDLRELECKIGERYITHESDDLRWEKYAGEQGLQYPTHLINPSASHSDTPETEETEMKALGERVSIL

SEQ ID NO: 131529 - DNA, 2739 bp, Artificial Sequence
  derived and/or modified sequence
atgtcggccccccctgtcctgcgacctccctcccctcttctgcccgttgccgctgccgcagcggcggctgctgcagccctggtcccaggatccgggccgggtcccgccccttttctggcgcctgtggctgcccctgtgggggggatttctttccacctccagatcggactgtctcgagaacctgtgcttctgctgcaggactcatcaggggattattctctcgcccacgtccgggagatggcatgtagcattgtagaccagaagttccccgagtgcggcttctacgggatgtacgataagattctgctgtttcggcacgacccaacaagcgagaatatcttgcagctggttaaagccgcaagcgacatccaagaaggggacctgatagaagtcgtccttagcgcctccgctacattcgaagacttccagattagaccacacgccctgtttgtgcatagctatcgagcccctgcattctgcgatcattgcggcgagatgctttggggcttagttcggcagggcctaaaatgtgaagggtgtggcctgaactatcacaagagatgcgccttcaagatccccaataactgttccggcgtgaggagaagaagactgagtaacgtctctctgactggcgtaagtaccatccgaacaagctcagccgaattgtcaacatctgcacccgacgagccgctcctacagaaatcaccatccgagtcttttattggaagggagaaacggtcaaactcccagagctatataggcaggccaatccaccttgataaaatactgatgagcaaggttaaggtgccgcacacattcgtaattcacagttatacacgtcctaccgtctgtcagtattgtaaaaagctcttgaaagggttattcagacaaggcctccagtgcaaagactgtcgcttcaactgtcacaaaagatgcgcacccaaagttcccaataattgtctaggcgaagtgactatcaacggggatcttctgagccctggtgcagaaagcgatgtggtgatggaagagggcagtgacgataatgactccgaacgtaactcaggactgatggacgacatggaggaggcaatggtgcaggatgccgaaatggctatggctgagtgccagaacgattcaggagagatgcaggaccccgaccctgaccatgaagacgccaacaggactatctcacctagcacctcaaacaacatcccgttaatgagagtggtccagagtgtaaaacataccaaaagaaaatctagtaccgtgatgaaagagggatggatggtgcattacacatccaaggataccctccggaagcgccactactggcggctggacagtaagtgtattacactttttcagaacgacaccggctcccgctattataaggaaattccactgtccgaaattctcagcctagagcctgtaaaaacgtctgctctgattcccaatggtgcaaatccacattgcttcgaaattaccacagccaacgtagtctactacgtgggggagaatgtggtaaacccctcttctcctagtccaaacaatagcgtgctaacatccggtgtcggggctgatgttgcgcgcatgtgggaaatagccatacagcatgcccttatgcccgtaatccccaaggggagctcagtcggaaccggaaccaatcttcaccgggatatcagtgtctccatctctgtttctaactgtcagattcaggaaaacgtagatatctctaccgtgtaccagattttcccagatgaagtcctaggttccggccagtttggaatcgtgtacggcggaaagcacagaaaaacaggccgcgacgtcgcaatcaagattatcgacaaattgcgcttcccgacaaaacaggagtctcagctcaggaatgaggttgcaatcttgcagaatctccatcaccccggggtggttaatctggagtgcatgtttgagacgccagaacgcgtgtttgttgtgatggagaagttacatggtgatatgttagagatgattctgtcatctgagaagggcaggctgcccgagcacattaccaagttcctgattacccaaatcttagtggctctccgccacttacatttcaagaacatcgtgcactgtgacctaaaacctgaaaatgttctactggcttctgctgatccattcccccaggtgaaactctgtgatttcgggtttgctcgtataatcggggaaaagagttttcgacggtcagtcgtcggcaccccagcgtatctggccccagaggtgctcagaaataaaggctataataggagcttggatatgtggtcagtgggcgttattatctatgtgtctctgtctggaacatttccctttaatgaggacgaggatattcacgaccaaatccagaatgccgccttcatgtatccacctaacccctggaaggagatcagtcacgaggccatcgatctgatcaacaacctgctgcaagtgaaaatgcgcaaaaggtactccgttgacaagacactctcccatccttggctccaggactaccaaacctggctcgacctgcgggagctggaatgcaagatcggcgagcggtatatcacgcacgaatcggacgatctgcgctgggagaaatacgctggcgaacagggccttcaatatccaacccacctcatcaaccctagcgcttctcacagcgatacaccagaaaccgaagagacagagatgaaagccttaggagaacgagtctcaatcttgtag

SEQ ID NO: 131530 - DNA, 2739 bp, Artificial Sequence
  derived and/or modified sequence
atgtctgcccctcctgtgctgcggccccccagccccctgctgcctgtggccgctgctgctgctgctgctgctgctgccctggtgcccggcagcggccctggccctgcccccttcctggcccctgtggccgcccctgtgggcggcatctccttccacctgcagatcggcctgagccgggagcctgtgctgctgctgcaggacagcagcggggactacagcctggcccacgtgcgggagatggcctgcagcatcgtggaccagaagttcccagaatgtggcttctacggcatgtatgacaagatcctgctcttcagacatgaccccaccagcgagaacatcctgcagctggtgaaggccgccagtgacatccaggagggggacctgattgaggtggtgctgagcgccagcgccacctttgaggacttccagatccggccccacgccctgtttgtgcacagctaccgggccccagccttctgtgaccactgtggggagatgctgtggggcctggtgcggcagggcctgaagtgtgagggctgcggcctgaactaccacaagagatgtgccttcaagatccccaacaactgcagcggcgtgagaagaagaaggctgagcaatgtgtccctgactggagtgtccaccatccgcaccagcagcgctgagctgagcaccagcgccccagatgagcccctgctgcagaagagccccagcgagagcttcatcggccgggagaagaggagcaacagccagagctacatcggccggcccatccacctggacaagatcctgatgagcaaggtgaaggtgccccacacctttgtgatccacagctacacccggcccaccgtgtgccagtactgcaagaagctgctgaagggcctcttccggcagggcctgcagtgcaaggactgccgcttcaactgccacaagagatgtgcccccaaggtgcccaacaactgcctgggggaggtgaccatcaatggagacctgctgagccctggagctgagagtgatgtggtgatggaggagggcagtgatgacaatgacagcgagaggaacagcggcctgatggatgacatggaggaggccatggtgcaggatgctgagatggccatggccgagtgccagaatgattctggagagatgcaggaccctgaccctgaccatgaagatgccaacagaaccatcagccccagcaccagcaacaacatccccctgatgagggtggtgcagagcgtgaagcacaccaagaggaagagcagcacagtgatgaaggagggctggatggtgcactacaccagcaaggacaccctgaggaagaggcactactggaggctggacagcaagtgcatcaccctcttccagaatgacaccggcagccgctactacaaggagatccccctgtctgagatcctgagcctggagcctgtgaagaccagcgccctgatccccaatggagccaacccccactgctttgagatcaccacagccaacgtggtgtactacgtgggagaaaatgtggtgaaccccagcagccccagccccaacaacagcgtgctgaccagcggcgtgggcgcagatgtggccaggatgtgggagatcgccatccagcacgccctgatgcctgtgatccccaagggcagctctgtgggcaccggcaccaacctgcaccgggacatctctgtgtccatctctgtgagcaactgccagatccaggagaatgtggacatcagcacagtgtaccagatcttcccagatgaggtgctgggcagcggccagtttggcatcgtgtatggaggcaagcacaggaagacaggaagagatgtggccatcaagatcatcgacaagctgcgcttccccaccaagcaggagagccagctgagaaatgaggtggccatcctgcagaacctgcaccaccctggggtggtgaacctggagtgcatgtttgagaccccagagcgggtgtttgtggtgatggagaagctgcatggagacatgctggagatgatcctgagcagcgagaagggccgcctgcctgagcacatcaccaagttcctgatcacccagatcctggtggccctgcggcacctgcacttcaagaacatcgtgcactgtgacctgaagccagaaaatgtgctgctggccagcgctgaccccttcccccaggtgaagctgtgtgactttggatttgcccgcatcatcggggagaagagcttccgccgctctgtggtgggcaccccagcctacctggcccctgaggtgctgaggaacaagggctacaacagaagcctggacatgtggagcgtgggcgtcatcatctacgtgtccctgagcggcaccttccccttcaatgaagatgaggacatccatgaccagatccagaatgctgccttcatgtacccacccaacccctggaaggagatcagccatgaggccatcgacctgatcaacaacctgctgcaggtgaagatgaggaagcgctacagcgtggacaagaccctgagccacccctggctgcaggactaccagacctggctggacctgcgggagctggagtgcaagattggagagcgctacatcacccatgaaagtgatgacctgcgctgggagaagtatgctggggagcagggcctgcagtaccccacccacctgatcaaccccagcgccagccacagcgacaccccagagacagaggagacagagatgaaggccctgggggagcgggtgtccatcctgtag

SEQ ID NO: 131531 - DNA, 2739 bp, Artificial Sequence
  derived and/or modified sequence
atgagcgccccccccgtgctgcggccccccagccccctgctgcccgtcgctgccgccgccgccgcagccgcagccgcacttgtcccgggttccggtccaggtccggctccttttttggcgcccgttgccgcccccgtaggtggaatatccttccacctgcagatcggcctttctagagagccggtgctgctcctgcaagattccagtggcgactactccctcgcccacgtgcgagagatggcttgcagcattgtggatcagaagtttcctgagtgtgggttttacggaatgtacgacaaaatcttgctgttccgccacgaccctacatcagaaaacatcctacagctagtgaaggccgcatctgatatccaggaaggggatctcattgaggtcgtgctttcggcttcagctacattcgaagactttcaaatacggccacacgctttattcgtacactcctatcgggcccccgccttttgcgatcactgtggggaaatgctttggggtctggtcagacagggcctgaaatgtgagggttgtggtttgaattatcacaaaaggtgcgcgttcaaaattccaaataattgtagtggcgtgcgtaggcgacgtttgagcaacgtaagcctgacaggagtgtccacaataaggaccagcagcgctgaactcagtacgtcagcgccagatgaacctctcctccagaaatctccatccgaaagcttcatcggtcgagagaagaggagcaactctcagtcttatatcgggcgtccaatccacttggataagattctcatgtcaaaagttaaagtgccccacacattcgtcattcattcctacactcgaccaacagtttgccagtattgcaaaaaactgctgaagggattgtttcgccagggtctgcagtgtaaagattgtaggttcaattgtcataagcgatgcgcccccaaagtccctaacaactgtcttggcgaagttactatcaacggcgacctcttatcacccggagccgaaagcgacgtggtgatggaggaggggtctgacgataacgacagcgaaaggaacagtggcctgatggatgatatggaagaggcaatggttcaagacgcggagatggcaatggctgagtgccaaaatgattcaggcgagatgcaggatcctgatcccgaccacgaagatgctaataggacaatttcaccctccaccagtaacaatattcctttgatgcgcgtcgttcaaagcgtcaagcacaccaagagaaaaagctccacggtcatgaaggaaggttggatggtgcattatactagcaaagacactttgcgaaagcggcattattggagactggactcaaagtgcatcactctgttccagaatgacactgggtctagatactacaaagaaattccactcagcgagatcctctctctcgaacccgtgaaaacaagtgccttgattcccaatggggcaaacccacactgctttgagatcaccactgcgaacgttgtatattacgtcggtgagaatgtggttaatccatcctcacctagtccgaataacagcgtcctcacctcaggtgtgggcgccgatgttgctcggatgtgggaaattgcgatccagcatgcactcatgccagtgattcctaaagggtccagcgttggtacagggaccaacctgcacagagatattagcgtcagtatttctgtgagcaattgccaaatccaggaaaatgtggacatctccaccgtttaccaaatattccccgatgaggtactgggaagcggccagttcggtattgtgtacggcggcaaacacaggaagactggccgggatgtcgctattaagatcatcgataaactgaggttccccaccaagcaggaaagccagttgcgcaatgaagttgccattcttcagaatctgcatcaccccggggtcgttaacttagaatgtatgttcgagacgcccgagagggtgttcgtcgtgatggaaaagctgcatggtgacatgcttgagatgatcctgtcaagcgagaagggcagactccctgaacacatcaccaagtttttgattacccagatattagtcgctctgagacatcttcatttcaagaacattgttcattgtgaccttaagcctgagaacgtgctgttggccagcgccgaccccttcccacaggtaaaactgtgtgacttcggctttgccagaatcataggcgagaagtcttttcgtcgcagcgtggtcgggacacccgcctacctggccccggaagtgctcaggaataaaggatacaataggtccctagacatgtggagcgtcggcgtcataatctatgttagcctgagcggaacgttccccttcaatgaggatgaagacattcatgaccagatacaaaatgcggcctttatgtatcctcccaatccctggaaggagatttcccatgaggccatcgatttgataaataacctactgcaggtgaaaatgcgcaaaaggtatagcgtggataagacactgtcccacccatggttgcaggactatcaaacttggctggacttgagagagctggaatgtaagatcggagaacggtacattacgcatgaatccgatgacctgcggtgggaaaaatacgccggagaacaaggcctgcagtacccgacccacctgataaatccgagcgcatctcactcagatacacctgagacagaggaaacagagatgaaagccctgggagagcgcgtgagcatcctgtag

SEQ ID NO: 131532 - DNA, 2739 bp, Artificial Sequence
  derived and/or modified sequence
atgagcgcaccaccagtgttacgccctccaagccctcttcttcctgtcgctgccgcagcagccgctgccgcagctgctctagtgcctggaagcgggccagggccagcgccatttcttgcccctgttgccgcaccagtgggaggtattagtttccacctgcaaattggcctgagccgtgagcccgtgctcctgctgcaggactccagtggggactattcccttgcccacgtgagagaaatggcatgctccattgtagaccagaaattccctgaatgcggattctacggtatgtacgataagatcctactctttcgacacgacccaacttcggaaaacatccttcaactggttaaggccgcatctgatattcaggagggcgatcttatcgaggtagtgctctcggcttctgcgaccttcgaggacttccaaatccgccctcacgcactattcgttcattcttaccgagccccagccttttgtgaccattgtggcgagatgctttgggggcttgtgcgccaggggctgaaatgtgaaggatgcggcctaaactaccacaagaggtgcgcatttaaaatacctaacaactgctccggtgtgaggagacgacgactgtctaatgtgtccctgacaggtgtgtctacaattcggacatctagtgccgagctgagcacttccgcgcctgacgagccactgctgcagaagagcccgagcgaatcattcatcgggagggaaaagcgctctaattctcagagttacatcggcagaccgatccacctcgataaaatcctgatgtctaaagtcaaggttccccatacgtttgtgatccactcctacacaaggcccactgtgtgccagtactgtaagaaattgctcaaaggactcttcagacaagggctgcaatgtaaagattgccgctttaattgccacaagcgctgtgcccctaaggtccctaataattgcctgggcgaagtcacaataaatggcgatttattgagccctggcgcagagtctgatgtggtcatggaagagggaagcgatgacaacgacagtgaaaggaatagcggcttgatggatgatatggaagaagcaatggtccaggacgcggagatggccatggccgagtgccagaatgacagcggcgagatgcaggatcccgaccctgatcatgaagacgcaaaccgcaccatcagcccgagtaccagtaacaacatacccttgatgcgtgtagtgcaatcggttaagcacaccaaaagaaagagttctacagtgatgaaggagggctggatggtgcactacacctctaaggatacactgaggaaacgtcattactggaggctcgattctaagtgcattaccttatttcagaacgatactgggtcccgctattataaggaaataccactgagtgaaatcctcagccttgagccagtgaaaacatccgcacttattcccaacggcgcaaatccgcattgttttgagatcaccacagcaaatgtcgtgtattatgtcggtgagaatgtagtgaatccctcatccccatcgccgaacaacagtgtgcttacttccggcgtaggcgcagacgtggcgaggatgtgggaaattgccattcaacacgctctaatgcctgtgatcccgaaagggagctctgtgggaaccgggactaatcttcaccgggacatatcagtaagcatatcagtctcgaattgccaaatccaggaaaacgtcgacatttctactgtgtatcagatttttccagacgaagtcctcggctcaggtcagtttggaattgtgtatggcggaaaacaccggaagacaggcagggatgtggctatcaagatcatagacaaattgcggtttccaaccaagcaggagtcacagcttagaaacgaagtggctatcttacagaacctgcatcatcctggagtggtgaacctggagtgcatgtttgagaccccagaacgcgtttttgtggtgatggagaagttacatggagatatgcttgagatgatactttccagtgagaaaggtaggttgcctgagcacatcaccaagtttctaatcactcagatcctcgtggctctccggcacctgcactttaaaaatatagtgcactgtgatctgaagccagaaaatgtcctgctcgccagcgcagacccgttccctcaggtcaagctctgtgatttcggcttcgcacgaataataggcgaaaagtctttcagacgttctgtggtgggaacccctgcatatctggctcctgaggtgttgcgaaataaaggttataaccgaagtctcgacatgtggagtgtgggagtcataatatatgtgtccctcagtgggaccttcccttttaatgaggacgaggatatccacgaccagattcagaacgcggcatttatgtaccccccaaacccatggaaagaaatttcccatgaggcaatagacctgatcaacaaccttctgcaagtgaagatgagaaagaggtactccgtcgataagactctttctcacccatggctgcaggactatcagacttggctggacctgagagaactggaatgcaaaattggcgaaaggtacattacccacgagtccgacgacctgcgctgggagaagtatgcgggagaacaaggtctgcagtacccaacccacttaatcaacccaagtgcatctcatagtgacactcctgaaacagaggaaactgagatgaaggcattaggggaaagggtatccatcttgtag

SEQ ID NO: 131533 - DNA, 3726 bp, Artificial Sequence
  derived and/or modified sequence
tcctcccgcctcggccattttccctcctccccatctcctccccttagtcccctcccctcccgatcctcatccccttgccctcccccagcccagggacttttccggaaagtttttattttccgtctgggctctcggagaaagaagctcctggctcagcggctgcaaaactttcctgctgccgcgccgccagcccccgccctccgctgcccggccctgcgccccgccgagcgatgagcgcccctccggtcctgcggccgcccagtccgctgctgcccgtggcggcggcagctgccgcagcggccgccgcactggtcccagggtccgggcccgggcccgcgccgttcttggctcctgtcgcggccccggtcgggggcatctcgttccatctgcagatcggcctgagccgtgagccggtgctgctgctgcaggactcgtccggggactacagcctggcgcacgtccgcgagatggcttgctccattgtcgaccagaagttccctgaatgtggtttctacggaatgtatgataagatcctgctttttcgccatgaccctacctctgaaaacatccttcagctggtgaaagcggccagtgatatccaggaaggcgatcttattgaagtggtcttgtcagcttccgccacctttgaagactttcagattcgtccccacgctctctttgttcattcatacagagctccagctttctgtgatcactgtggagaaatgctgtgggggctggtacgtcaaggtcttaaatgtgaagggtgtggtctgaattaccataagagatgtgcatttaaaatacccaacaattgcagcggtgtgaggcggagaaggctctcaaacgtttccctcactggggtcagcaccatccgcacatcatctgctgaactctctacaagtgcccctgatgagccccttctgcaaaaatcaccatcagagtcgtttattggtcgagagaagaggtcaaattctcaatcatacattggacgaccaattcaccttgacaagattttgatgtctaaagttaaagtgccgcacacatttgtcatccactcctacacccggcccacagtgtgccagtactgcaagaagcttctgaaggggcttttcaggcagggcttgcagtgcaaagattgcagattcaactgccataaacgttgtgcaccgaaagtaccaaacaactgccttggcgaagtgaccattaatggagatttgcttagccctggggcagagtctgatgtggtcatggaagaagggagtgatgacaatgatagtgaaaggaacagtgggctcatggatgatatggaagaagcaatggtccaagatgcagagatggcaatggcagagtgccagaacgacagtggcgagatgcaagatccagacccagaccacgaggacgccaacagaaccatcagtccatcaacaagcaacaatatcccactcatgagggtagtgcagtctgtcaaacacacgaagaggaaaagcagcacagtcatgaaagaaggatggatggtccactacaccagcaaggacacgctgcggaaacggcactattggagattggatagcaaatgtattaccctctttcagaatgacacaggaagcaggtactacaaggaaattcctttatctgaaattttgtctctggaaccagtaaaaacttcagctttaattcctaatggggccaatcctcattgtttcgaaatcactacggcaaatgtagtgtattatgtgggagaaaatgtggtcaatccttccagcccatcaccaaataacagtgttctcaccagtggcgttggtgcagatgtggccaggatgtgggagatagccatccagcatgcccttatgcccgtcattcccaagggctcctccgtgggtacaggaaccaacttgcacagagatatctctgtgagtatttcagtatcaaattgccagattcaagaaaatgtggacatcagcacagtatatcagatttttcctgatgaagtactgggttctggacagtttggaattgtttatggaggaaaacatcgtaaaacaggaagagatgtagctattaaaatcattgacaaattacgatttccaacaaaacaagaaagccagcttcgtaatgaggttgcaattctacagaaccttcatcaccctggtgttgtaaatttggagtgtatgtttgagacgcctgaaagagtgtttgttgttatggaaaaactccatggagacatgctggaaatgatcttgtcaagtgaaaagggcaggttgccagagcacataacgaagtttttaattactcagatactcgtggctttgcggcaccttcattttaaaaatatcgttcactgtgacctcaaaccagaaaatgtgttgctagcctcagctgatccttttcctcaggtgaaactttgtgattttggttttgcccggatcattggagagaagtctttccggaggtcagtggtgggtacccccgcttacctggctcctgaggtcctaaggaacaagggctacaatcgctctctagacatgtggtctgttggggtcatcatctatgtaagcctaagcggcacattcccatttaatgaagatgaagacatacacgaccaaattcagaatgcagctttcatgtatccaccaaatccctggaaggaaatatctcatgaagccattgatcttatcaacaatttgctgcaagtaaaaatgagaaagcgctacagtgtggataagaccttgagccacccttggctacaggactatcagacctggttagatttgcgagagctggaatgcaaaatcggggagcgctacatcacccatgaaagtgatgacctgaggtgggagaagtatgcaggcgagcaggggctgcagtaccccacacacctgatcaatccaagtgctagccacagtgacactcctgagactgaagaaacagaaatgaaagccctcggtgagcgtgtcagcatcctctgagttccatctcctataatctgtcaaaacactgtggaactaataaatacatacggtcaggtttaacatttgccttgcagaactgccattattttctgtcagatgagaacaaagctgttaaactgttagcactgttgatgtatctgagttgccaagacaaatcaacagaagcatttgtattttgtgtgaccaactgtgttgtattaacaaaagttccctgaaacacgaaacttgttattgtgaatgattcatgttatatttaatgcattaaacctgtctccactgtgcctttgcaaatcagtgtttttcttactggagcttcattttggtaagagacagaatgtatctgtgaagtagttctgtttggtgtgtcccattggtgttgtcattgtaaacaaactcttgaagagtcgattatttccagtgttctatgaacaactccaaaacccatgtgggaaaaaaatgaatgaggagggtagggaataaaatcctaagacacaaatgcatgaacaagttttaatgtatagttttgaatcctttgcctgcctggtgtgcctcagtatatttaaactcaagacaatgcacctagctgtgcaagacctagtgctcttaagcctaaatgccttagaaatgtaaactgccatatataacagatacatttccctctttcttataatactctgttgtactatggaaaatcagctgctcagcaacctttcacctttgtgtatttttcaataataaaaaatattcttgtcaa

SEQ ID NO: 131534 - DNA, 2739 bp, Artificial Sequence
  derived and/or modified sequence
atgagcgccccccccgtgctgagaccccccagccccctgctgcccgtggccgccgccgccgccgccgccgccgccgccctggtgcccggcagcggccccggccccgcccccttcctggcccccgtggccgcccccgtgggcggcatcagcttccacctgcagatcggcctgagcagagagcccgtgctgctgctgcaggacagcagcggcgactacagcctggcccacgtgagagagatggcctgcagcatcgtggaccagaagttccccgagtgcggcttctacggcatgtacgacaagatcctgctgttcagacacgaccccaccagcgagaacatcctgcagctggtgaaggccgccagcgacatccaggagggcgacctgatcgaggtggtgctgagcgccagcgccaccttcgaggacttccagatcagaccccacgccctgttcgtgcacagctacagagcccccgccttctgcgaccactgcggcgagatgctgtggggcctggtgagacagggcctgaagtgcgagggctgcggcctgaactaccacaagagatgcgccttcaagatccccaacaactgcagcggcgtgagaagaagaagactgagcaacgtgagcctgaccggcgtgagcaccatcagaaccagcagcgccgagctgagcaccagcgcccccgacgagcccctgctgcagaagagccccagcgagagcttcatcggcagagagaagagaagcaacagccagagctacatcggcagacccatccacctggacaagatcctgatgagcaaggtgaaggtgccccacaccttcgtgatccacagctacaccagacccaccgtgtgccagtactgcaagaagctgctgaagggcctgttcagacagggcctgcagtgcaaggactgcagattcaactgccacaagagatgcgcccccaaggtgcccaacaactgcctgggcgaggtgaccatcaacggcgacctgctgagccccggcgccgagagcgacgtggtgatggaggagggcagcgacgacaacgacagcgagagaaacagcggcctgatggacgacatggaggaggccatggtgcaggacgccgagatggccatggccgagtgccagaacgacagcggcgagatgcaggaccccgaccccgaccacgaggacgccaacagaaccatcagccccagcaccagcaacaacatccccctgatgagagtggtgcagagcgtgaagcacaccaagagaaagagcagcaccgtgatgaaggagggctggatggtgcactacaccagcaaggacaccctgagaaagagacactactggagactggacagcaagtgcatcaccctgttccagaacgacaccggcagcagatactacaaggagatccccctgagcgagatcctgagcctggagcccgtgaagaccagcgccctgatccccaacggcgccaacccccactgcttcgagatcaccaccgccaacgtggtgtactacgtgggcgagaacgtggtgaaccccagcagccccagccccaacaacagcgtgctgaccagcggcgtgggcgccgacgtggccagaatgtgggagatcgccatccagcacgccctgatgcccgtgatccccaagggcagcagcgtgggcaccggcaccaacctgcacagagacatcagcgtgagcatcagcgtgagcaactgccagatccaggagaacgtggacatcagcaccgtgtaccagatcttccccgacgaggtgctgggcagcggccagttcggcatcgtgtacggcggcaagcacagaaagaccggcagagacgtggccatcaagatcatcgacaagctgagattccccaccaagcaggagagccagctgagaaacgaggtggccatcctgcagaacctgcaccaccccggcgtggtgaacctggagtgcatgttcgagacccccgagagagtgttcgtggtgatggagaagctgcacggcgacatgctggagatgatcctgagcagcgagaagggcagactgcccgagcacatcaccaagttcctgatcacccagatcctggtggccctgagacacctgcacttcaagaacatcgtgcactgcgacctgaagcccgagaacgtgctgctggccagcgccgaccccttcccccaggtgaagctgtgcgacttcggcttcgccagaatcatcggcgagaagagcttcagaagaagcgtggtgggcacccccgcctacctggcccccgaggtgctgagaaacaagggctacaacagaagcctggacatgtggagcgtgggcgtgatcatctacgtgagcctgagcggcaccttccccttcaacgaggacgaggacatccacgaccagatccagaacgccgccttcatgtacccccccaacccctggaaggagatcagccacgaggccatcgacctgatcaacaacctgctgcaggtgaagatgagaaagagatacagcgtggacaagaccctgagccacccctggctgcaggactaccagacctggctggacctgagagagctggagtgcaagatcggcgagagatacatcacccacgagagcgacgacctgagatgggagaagtacgccggcgagcagggcctgcagtaccccacccacctgatcaaccccagcgccagccacagcgacacccccgagaccgaggagaccgagatgaaggccctgggcgagagagtgagcatcctgtag

SEQ ID NO: 131535 - protein, 379 aa, Artificial Sequence
  derived and/or modified sequence
MAAAAAQGGGGGEPRRTEGVGPGVPGEVEMVKGQPFDVGPRYTQLQYIGEGAYGMVSSAYDHVRKTRVAIKKISPFEHQTYCQRTLREIQILLRFRHENVIGIRDILRASTLEAMRDVYIVQDLMETDLYKLLKSQQLSNDHICYFLYQILRGLKYIHSANVLHRDLKPSNLLINTTCDLKICDFGLARIADPEHDHTGFLTEYVATRWYRAPEIMLNSKGYTKSIDIWSVGCILAEMLSNRPIFPGKHYLDQLNHILGILGSPSQEDLNCIINMKARNYLQSLPSKTKVAWAKLFPKSDSKALDLLDRMLTFNPNKRITVEEALAHPYLEQYYDPTDEPVAEEPFTFAMELDDLPKERLKELIFQETARFQPGVLEAP

SEQ ID NO: 131536 - protein, 311 aa, Artificial Sequence
  derived and/or modified sequence
MVKGQPFDVGPRYTQLQYIGEGAYGMVSSAYDHVRKTRVAIKKISPFEHQTYCQRTLREIQILLRFRHENVIGIRDILRASTLEAMRDVYIVQDLMETDLYKLLKSQQLSNDHICYFLYQILRGLKYIHSANVLHRDLKPSNLLINTTCDLKGYTKSIDIWSVGCILAEMLSNRPIFPGKHYLDQLNHILGILGSPSQEDLNCIINMKARNYLQSLPSKTKVAWAKLFPKSDSKALDLLDRMLTFNPNKRITVEEALAHPYLEQYYDPTDEPVAEEPFTFAMELDDLPKERLKELIFQETARFQPGVLEAP

SEQ ID NO: 131537 - protein, 265 aa, Artificial Sequence
  derived and/or modified sequence
MRDVYIVQDLMETDLYKLLKSQQLSNDHICYFLYQILRGLKYIHSANVLHRDLKPSNLLINTTCDLKICDFGLARIADPEHDHTGFLTEYVATRWYRAPEIMLNSKGYTKSIDIWSVGCILAEMLSNRPIFPGKHYLDQLNHILGILGSPSQEDLNCIINMKARNYLQSLPSKTKVAWAKLFPKSDSKALDLLDRMLTFNPNKRITVEEALAHPYLEQYYDPTDEPVAEEPFTFAMELDDLPKERLKELIFQETARFQPGVLEAP

SEQ ID NO: 131538 - DNA, 1140 bp, Artificial Sequence
  derived and/or modified sequence
atggccgccgccgccgcccagggcggcggcggcggcgagcccagaagaaccgagggcgtgggccccggcgtgcccggcgaggtggagatggtgaagggccagcccttcgacgtgggccccagatacacccagctgcagtacatcggcgagggcgcctacggcatggtgagcagcgcctacgaccacgtgagaaagaccagagtggccatcaagaagatcagccccttcgagcaccagacctactgccagagaaccctgagagagatccagatcctgctgagattcagacacgagaacgtgatcggcatcagagacatcctgagagccagcaccctggaggccatgagagacgtgtacatcgtgcaggacctgatggagaccgacctgtacaagctgctgaagagccagcagctgagcaacgaccacatctgctacttcctgtaccagatcctgagaggcctgaagtacatccacagcgccaacgtgctgcacagagacctgaagcccagcaacctgctgatcaacaccacctgcgacctgaagatctgcgacttcggcctggccagaatcgccgaccccgagcacgaccacaccggcttcctgaccgagtacgtggccaccagatggtacagagcccccgagatcatgctgaacagcaagggctacaccaagagcatcgacatctggagcgtgggctgcatcctggccgagatgctgagcaacagacccatcttccccggcaagcactacctggaccagctgaaccacatcctgggcatcctgggcagccccagccaggaggacctgaactgcatcatcaacatgaaggccagaaactacctgcagagcctgcccagcaagaccaaggtggcctgggccaagctgttccccaagagcgacagcaaggccctggacctgctggacagaatgctgaccttcaaccccaacaagagaatcaccgtggaggaggccctggcccacccctacctggagcagtactacgaccccaccgacgagcccgtggccgaggagcccttcaccttcgccatggagctggacgacctgcccaaggagagactgaaggagctgatcttccaggagaccgccagattccagcccggcgtgctggaggccccctag

SEQ ID NO: 131539 - DNA, 936 bp, Artificial Sequence
  derived and/or modified sequence
atggtgaagggccagcccttcgacgtgggccccagatacacccagctgcagtacatcggcgagggcgcctacggcatggtgagcagcgcctacgaccacgtgagaaagaccagagtggccatcaagaagatcagccccttcgagcaccagacctactgccagagaaccctgagagagatccagatcctgctgagattcagacacgagaacgtgatcggcatcagagacatcctgagagccagcaccctggaggccatgagagacgtgtacatcgtgcaggacctgatggagaccgacctgtacaagctgctgaagagccagcagctgagcaacgaccacatctgctacttcctgtaccagatcctgagaggcctgaagtacatccacagcgccaacgtgctgcacagagacctgaagcccagcaacctgctgatcaacaccacctgcgacctgaagggctacaccaagagcatcgacatctggagcgtgggctgcatcctggccgagatgctgagcaacagacccatcttccccggcaagcactacctggaccagctgaaccacatcctgggcatcctgggcagccccagccaggaggacctgaactgcatcatcaacatgaaggccagaaactacctgcagagcctgcccagcaagaccaaggtggcctgggccaagctgttccccaagagcgacagcaaggccctggacctgctggacagaatgctgaccttcaaccccaacaagagaatcaccgtggaggaggccctggcccacccctacctggagcagtactacgaccccaccgacgagcccgtggccgaggagcccttcaccttcgccatggagctggacgacctgcccaaggagagactgaaggagctgatcttccaggagaccgccagattccagcccggcgtgctggaggccccctag

SEQ ID NO: 131540 - DNA, 798 bp, Artificial Sequence
  derived and/or modified sequence
atgagagacgtgtacatcgtgcaggacctgatggagaccgacctgtacaagctgctgaagagccagcagctgagcaacgaccacatctgctacttcctgtaccagatcctgagaggcctgaagtacatccacagcgccaacgtgctgcacagagacctgaagcccagcaacctgctgatcaacaccacctgcgacctgaagatctgcgacttcggcctggccagaatcgccgaccccgagcacgaccacaccggcttcctgaccgagtacgtggccaccagatggtacagagcccccgagatcatgctgaacagcaagggctacaccaagagcatcgacatctggagcgtgggctgcatcctggccgagatgctgagcaacagacccatcttccccggcaagcactacctggaccagctgaaccacatcctgggcatcctgggcagccccagccaggaggacctgaactgcatcatcaacatgaaggccagaaactacctgcagagcctgcccagcaagaccaaggtggcctgggccaagctgttccccaagagcgacagcaaggccctggacctgctggacagaatgctgaccttcaaccccaacaagagaatcaccgtggaggaggccctggcccacccctacctggagcagtactacgaccccaccgacgagcccgtggccgaggagcccttcaccttcgccatggagctggacgacctgcccaaggagagactgaaggagctgatcttccaggagaccgccagattccagcccggcgtgctggaggccccctag

SEQ ID NO: 131541 - DNA, 1140 bp, Artificial Sequence
  derived and/or modified sequence
atggccgccgccgccgcacagggaggtggcggaggagaaccaaggcggacagagggagtggggccaggtgtgcccggggaagtggagatggtcaaaggacagcctttcgatgtcggacctcggtacacacaactacaatatataggtgagggcgcttatggaatggtgtccagcgcatatgaccacgtacggaagactagagtggcgataaagaaaatcagtcccttcgagcaccagacctattgtcagcggactttgcgcgagatccagatcctcctgcggttccgccacgagaacgttattgggatcagggacatcctgcgggccagtaccctggaggccatgcgcgatgtctatatcgtccaggatttaatggagacagacttgtacaagctgctgaaaagccagcagctctccaacgatcatatctgttactttttgtatcaaattctgcgcggattgaagtacattcacagcgctaatgttctgcacagggacctcaagcccagtaacctgctcataaacaccacttgtgacctgaagatctgcgactttggactggctcggatcgctgatccagaacacgaccacactgggttcctcacagagtatgtggctacgagatggtaccgagcccctgaaattatgctaaatagtaagggctacaccaagtcaatcgatatatggagtgtcggatgtattcttgcggagatgctctcaaacaggcccattttcccaggcaagcactatcttgaccaactgaaccacattcttgggattctggggtccccatctcaagaagaccttaattgtattatcaatatgaaggctcgaaactacctgcaatccctgccaagcaagactaaggtggcctgggcaaagctcttccccaagtcagatagtaaggctctggatctgcttgaccgaatgctcacatttaaccccaataagagaattaccgtggaagaagcgctggcccatccatatcttgagcagtactatgatcccactgacgagcccgttgccgaagagccatttactttcgctatggagttagatgatttacctaaagagagactcaaggaattaatttttcaagagactgctcggtttcaaccaggcgtactggaggccccttag

SEQ ID NO: 131542 - DNA, 936 bp, Artificial Sequence
  derived and/or modified sequence
atggtgaaggggcagcccttcgatgtcggacccaggtacacccaactgcagtatattggcgaaggagcttatggaatggtcagttccgcatatgatcacgtcaggaaaacccgcgtcgctataaagaagatttcccccttcgagcatcagacatattgccagagaaccttaagagagattcaaatcctgctcaggtttcgacacgagaatgtgattggaatcagagacattctcagagcctcgaccctcgaagccatgagggatgtgtatatcgtgcaggatctgatggagaccgatctctataagctgctgaagagccaacagctgagtaacgaccacatctgctacttcctgtatcagatcctgcgaggcctgaaatacatccatagcgccaatgtactccaccgagatctgaagcctagcaatctgctgatcaacacaacttgtgatcttaaaggatacacaaagtccatcgacatttggagcgtgggatgtatactcgctgaaatgctttccaataggccaatcttccctggcaaacactatttggatcagctcaaccacatactcggcattctgggaagtccctctcaagaagatctaaactgtattataaatatgaaggccaggaactacctgcaatctctgccatccaagactaaagttgcctgggccaaattgttcccaaagagtgatagcaaagcactcgatctgctggaccgcatgctcacgtttaaccccaacaaacggatcacggttgaagaggctttggctcatccatacctggaacagtactatgaccctacagacgaaccagtggcagaggaaccttttacattcgccatggaactggacgatctgccaaaggaacgacttaaggaactgatattccaagagaccgcaagattccaacccggtgtcctcgaggctccctag

SEQ ID NO: 131543 - DNA, 798 bp, Artificial Sequence
  derived and/or modified sequence
atgcgtgatgtgtacatcgtgcaggatctgatggagacggacctgtataagttgcttaagagtcagcagctaagcaacgatcatatctgctacttcctttaccagattctgagaggcctgaaatatattcattcagccaatgtcctgcaccgggatctgaaaccatctaatctcctgatcaatacaacatgcgacctgaaaatctgtgattttggcctggctaggatcgccgaccccgaacatgaccataccggctttctgacagaatacgtcgcaacccgctggtatagagccccagaaattatgctcaatagtaaggggtatacaaaatcaatagatatttggtctgtggggtgcatcctggctgagatgcttagcaacagacccatattccctggcaaacactacctggaccaactgaaccacatactgggaatattaggctcaccttctcaagaagatctgaactgcattatcaatatgaaagcaaggaactacctccaatcattaccgtctaaaacaaaagttgcatgggcgaaactgttccccaaatctgactctaaagccctggatttgctcgaccgaatgctcacatttaatcccaacaagcgaatcacagtggaggaggccttggctcatccgtacctggaacaatactatgacccaactgatgagcctgtcgccgaggagccttttacattcgcgatggagctggacgatctgcctaaggagaggctgaaagaactcatcttccaggagacagctagattccaacccggtgttctggaggctccctag

SEQ ID NO: 131544 - DNA, 1140 bp, Artificial Sequence
  derived and/or modified sequence
atggctgctgctgctgcccagggcggcggcggcggggagcccaggagaacagaaggagtgggccctggggtgcctggagaggtggagatggtgaagggccagccctttgatgtgggcccccgctacacccagctgcagtacatcggggagggcgcctacggcatggtgagcagcgcctatgaccacgtgaggaagaccagggtggccatcaagaagatcagcccctttgagcaccagacctactgccagaggaccctgcgggagatccagatcctgctgcgcttcagacatgaaaatgtgattggcatccgggacatcctgcgggccagcaccctggaggccatgagagatgtgtacatcgtgcaggacctgatggagacagacctgtacaagctgctgaagagccagcagctgagcaatgaccacatctgctacttcctgtaccagatcctgcggggcctgaagtacatccacagcgccaacgtgctgcaccgggacctgaagcccagcaacctgctgatcaacaccacctgtgacctgaagatctgtgactttggcctggccagaattgctgaccctgagcatgaccacacaggcttcctgacagaatatgtggccacccgctggtaccgggcccctgagatcatgctgaacagcaagggctacaccaagagcattgacatctggagcgtgggctgcatcctggccgagatgctgagcaaccggcccatcttccctgggaagcactacctggaccagctgaaccacatcctgggcatcctgggcagccccagccaggaggacctgaactgcatcatcaacatgaaggccaggaactacctgcagagcctgcccagcaagaccaaggtggcctgggccaagctgttccccaagagtgacagcaaggccctggacctgctggacaggatgctgaccttcaaccccaacaagaggatcaccgtggaggaggccctggcccacccctacctggagcagtactatgaccccacagatgagcctgtggccgaggagcccttcacctttgccatggagctggatgacctgcccaaggagcggctgaaggagctgatcttccaggagacagcccgcttccagcccggggtgctggaggccccctag

SEQ ID NO: 131545 - DNA, 936 bp, Artificial Sequence
  derived and/or modified sequence
atggtgaagggccagccctttgatgtgggcccccgctacacccagctgcagtacatcggggagggcgcctacggcatggtgtcctctgcctatgaccacgtgaggaagaccagggtggccatcaagaagatcagcccctttgagcaccagacctactgccagaggaccctgcgggagatccagatcctgctgcgcttcagacatgaaaatgtcatcggcatccgggacatcctgcgggccagcaccctggaggccatgagagatgtgtacatcgtgcaggacctgatggagacagacctgtacaagctgctgaagagccagcagctgagcaatgaccacatctgctacttcctgtaccagatcctgcggggcctgaagtacatccacagcgccaacgtgctgcaccgggacctgaagcccagcaacctgctgatcaacaccacctgtgacctgaagggctacaccaagagcattgacatctggagcgtgggctgcatcctggccgagatgctgagcaaccggcccatcttccctgggaagcactacctggaccagctgaaccacatcctgggcatcctgggcagccccagccaggaggacctgaactgcatcatcaacatgaaggccaggaactacctgcagagcctgcccagcaagaccaaggtggcctgggccaagctgttccccaagagtgacagcaaggccctggacctgctggacaggatgctgaccttcaaccccaacaagaggatcaccgtggaggaggccctggcccacccctacctggagcagtactatgaccccacagatgagcctgtggccgaggagcccttcacctttgccatggagctggatgacctgcccaaggagcggctgaaggagctgatcttccaggagacagcccgcttccagcccggggtgctggaggccccctag

SEQ ID NO: 131546 - DNA, 798 bp, Artificial Sequence
  derived and/or modified sequence
atgagagatgtgtacatcgtgcaggacctgatggagacagacctgtacaagctgctgaagagccagcagctgagcaatgaccacatctgctacttcctgtaccagatcctgcggggcctgaagtacatccacagcgccaacgtgctgcaccgggacctgaagcccagcaacctgctgatcaacaccacctgtgacctgaagatctgtgactttggcctggccagaattgctgaccctgagcatgaccacacaggcttcctgacagaatatgtggccacccgctggtaccgggcccctgagatcatgctgaacagcaagggctacaccaagagcattgacatctggagcgtgggctgcatcctggccgagatgctgagcaaccggcccatcttccctgggaagcactacctggaccagctgaaccacatcctgggcatcctgggcagccccagccaggaggacctgaactgcatcatcaacatgaaggccaggaactacctgcagagcctgcccagcaagaccaaggtggcctgggccaagctgttccccaagagtgacagcaaggccctggacctgctggacaggatgctgaccttcaaccccaacaagaggatcaccgtggaggaggccctggcccacccctacctggagcagtactatgaccccacagatgagcctgtggccgaggagcccttcacctttgccatggagctggatgacctgcccaaggagcggctgaaggagctgatcttccaggagacagcccgcttccagcccggggtgctggaggccccctag

SEQ ID NO: 131547 - DNA, 1140 bp, Artificial Sequence
  derived and/or modified sequence
atggccgccgccgccgcccagggcggcggcggcggcgagccccggcggacagagggagtaggtcctggggtgccaggagaagtcgaaatggtgaagggccagccgttcgacgtaggtccgagatacacacagctgcagtacataggagaaggcgcatacggtatggttagttccgcctatgatcacgtgcggaagacccgcgtcgccatcaagaagattagccctttcgagcaccaaacatactgtcagcgcactcttcgggagattcaaatcctcctgaggttcagacacgagaatgtgatcggtatcagggacattctgcgagcgtccacactcgaagccatgagagatgtctatattgtgcaggatttgatggaaactgacctctacaagctgttgaagagccagcagctcagcaacgatcacatctgttatttcctctatcagatccttaggggcttgaaatatatccactccgcaaatgtcctccacagggacctcaagcctagtaacctgctgattaacactacatgtgatctcaagatctgcgacttcggcctggctagaattgccgatcccgaacacgaccacacagggttcctcacagaatacgtggctaccaggtggtatcgagcgcctgagatcatgcttaattcaaagggttataccaagagtattgatatctggagcgtcgggtgcatcctcgccgagatgctgtcaaatcggcctatctttccgggaaaacattatctggatcaacttaaccacatcctggggattcttgggtcccctagccaggaggacctcaactgtatcataaatatgaaggcccgaaattacctgcagtccctgcccagcaaaaccaaggttgcctgggcaaagttattcccaaagtcagattcaaaagcactcgatttactagatagaatgcttactttcaatccaaataagagaataactgttgaggaggccctcgcacacccttatttggagcaatattacgatcctaccgatgagccggtcgccgaagagccctttacctttgcgatggagctcgacgacttgcctaaagaacgcttaaaggagcttatttttcaagagaccgcacggttccaacccggcgttctggaagctccatag

SEQ ID NO: 131548 - DNA, 936 bp, Artificial Sequence
  derived and/or modified sequence
atggtgaagggccagcccttcgacgtgggcccccggtacacccagctgcagtatatcggggaaggggcttatggcatggtgtcttctgcgtatgatcatgtgcgcaaaaccagggtggccattaagaaaataagtccttttgagcaccagacgtattgccagcgcacactgcgagaaattcagatactgcttaggttcagacacgaaaacgtgatcggcatcagggacatcctgcgagcctcaaccttagaagccatgcgagacgtgtatattgtgcaggacctgatggaaacagacctgtacaagctactaaaatcccaacagctctcaaacgaccatatttgctattttttataccagatcctccgcgggctgaagtatatacactctgctaacgttctacacagagacctgaaaccttcaaacctgctgatcaacacgacctgtgacctaaaggggtacaccaaatcgatcgatatctggagcgtcggttgtatcctggccgaaatgctgtctaatcgtcccatcttccctggaaagcactacctggatcagctcaaccatattctgggcattttgggctcacctagtcaagaggatctcaattgtataatcaatatgaaggctaggaattaccttcagagtttgcctagcaaaactaaggtcgcgtgggccaaactcttcccaaagagcgattccaaggcactggaccttctggacaggatgttgacctttaatcccaacaagcggattactgtggaagaggccttagcgcacccgtaccttgagcagtattacgatcccaccgacgaaccagtagccgaagaacctttcactttcgccatggaactggacgacctcccaaaggagcgactgaaagagctcatattccaggagaccgctaggtttcagccgggcgttctcgaagctccttag

SEQ ID NO: 131549 - DNA, 798 bp, Artificial Sequence
  derived and/or modified sequence
atgcgggacgtgtacatcgtgcaggacctgatggagaccgacctgtacaaactgttgaagtcccagcagctgtccaatgaccacatttgctatttcctgtaccagatcctgaggggactaaagtacattcattcggccaatgtgcttcatagggatttgaagccatcgaatctgttgatcaataccacctgtgatctgaaaatctgtgatttcgggctggcgcgtatcgcagaccctgagcacgatcacacaggtttcttgactgaatacgtggccacaaggtggtacagagccccggaaatcatgctgaacagcaaaggttacaccaaatccatcgacatttggtcagtgggctgcatattagcagaaatgctttcaaatcggccgatttttcctggcaaacattacctggaccaacttaaccatattctaggcatcctgggctcacccagccaggaggatttaaactgcattattaatatgaaagcacgcaactatctccaaagtctgccaagcaagaccaaggttgcctgggccaagctttttccaaagtcggatagcaaggccctcgacctgctagaccgaatgctcactttcaaccctaataagaggattactgtggaggaggctcttgcacacccttacctggaacagtactacgatccgactgacgaaccagtggcagaggaaccttttactttcgctatggaactggacgacttgcccaaggaacgtctgaaagaactgatatttcaggagaccgcaagattccagccgggagttcttgaagccccttag

SEQ ID NO: 131550 - DNA, 1861 bp, Artificial Sequence
  derived and/or modified sequence
ctgcgggtgacaggcaggcgggaaggggcggggcctcgggcggggccgccgtggggaggagggcggtgggaggggaggagtggagatggcggcggcggcggctcaggggggcgggggcggggagccccgtagaaccgagggggtcggcccgggggtcccgggggaggtggagatggtgaaggggcagccgttcgacgtgggcccgcgctacacgcagttgcagtacatcggcgagggcgcgtacggcatggtcagctcggcctatgaccacgtgcgcaagactcgcgtggccatcaagaagatcagccccttcgaacatcagacctactgccagcgcacgctccgggagatccagatcctgctgcgcttccgccatgagaatgtcatcggcatccgagacattctgcgggcgtccaccctggaagccatgagagatgtctacattgtgcaggacctgatggagactgacctgtacaagttgctgaaaagccagcagctgagcaatgaccatatctgctacttcctctaccagatcctgcggggcctcaagtacatccactccgccaacgtgctccaccgagatctaaagccctccaacctgctcatcaacaccacctgcgaccttaagatttgtgatttcggcctggcccggattgccgatcctgagcatgaccacaccggcttcctgacggagtatgtggctacgcgctggtaccgggccccagagatcatgctgaactccaagggctataccaagtccatcgacatctggtctgtgggctgcattctggctgagatgctctctaaccggcccatcttccctggcaagcactacctggatcagctcaaccacattctgggcatcctgggctccccatcccaggaggacctgaattgtatcatcaacatgaaggcccgaaactacctacagtctctgccctccaagaccaaggtggcttgggccaagcttttccccaagtcagactccaaagcccttgacctgctggaccggatgttaacctttaaccccaataaacggatcacagtggaggaagcgctggctcacccctacctggagcagtactatgacccgacggatgagccagtggccgaggagcccttcaccttcgccatggagctggatgacctacctaaggagcggctgaaggagctcatcttccaggagacagcacgcttccagcccggagtgctggaggccccctagcccagacagacatctctgcaccctggggcctggacctgcctcctgcctgcccctctcccgccagactgttagaaaatggacactgtgcccagcccggaccttggcagcccaggccggggtggagcatgggcctggccacctctctcctttgctgaggcctccagcttcaggcaggccaaggccttctcctccccacccgccctccccacggggcctcgggacctcaggtggccccagttcaatctcccgctgctgctgctgcgcccttaccttccccagcgtcccagtctctggcagttctggaatggaagggttctggctgccccaacctgctgaagggcagaggtggagggtggggggcgctgagtagggactcagggccatgcctgcccccctcatctcattcaaaccccaccctagtttccctgaaggaacattccttagtctcaagggctagcatccctgaggagccaggccgggccgaatcccctccctgtcaaagctgtcacttcgcgtgccctcgctgcttctgtgtgtggtgagcagaagtggagctggggggcgtggagagcccggcgcccctgccacctccctgacccgtctaatatataaatatagagatgtgtctatggctga

SEQ ID NO: 131551 - DNA, 997 bp, Artificial Sequence
  derived and/or modified sequence
cggcccgggggtcccgggggaggtggagatggtgaaggggcagccgttcgacgtgggcccgcgctacacgcagttgcagtacatcggcgagggcgcgtacggcatggtcagctcggcctatgaccacgtgcgcaagactcgcgtggccatcaagaagatcagccccttcgaacatcagacctactgccagcgcacgctccgggagatccagatcctgctgcgcttccgccatgagaatgtcatcggcatccgagacattctgcgggcgtccaccctggaagccatgagagatgtctacattgtgcaggacctgatggagactgacctgtacaagttgctgaaaagccagcagctgagcaatgaccatatctgctacttcctctaccagatcctgcggggcctcaagtacatccactccgccaacgtgctccaccgagatctaaagccctccaacctgctcatcaacaccacctgcgaccttaagggctataccaagtccatcgacatctggtctgtgggctgcattctggctgagatgctctctaaccggcccatcttccctggcaagcactacctggatcagctcaaccacattctgggcatcctgggctccccatcccaggaggacctgaattgtatcatcaacatgaaggcccgaaactacctacagtctctgccctccaagaccaaggtggcttgggccaagcttttccccaagtcagactccaaagcccttgacctgctggaccggatgttaacctttaaccccaataaacggatcacagtggaggaagcgctggctcacccctacctggagcagtactatgacccgacggatgagccagtggccgaggagcccttcaccttcgccatggagctggatgacctacctaaggagcggctgaaggagctcatcttccaggagacagcacgcttccagcccggagtgctggaggccccctagcccagacagacatctctgcaccctggggcctgg

SEQ ID NO: 131552 - DNA, 2567 bp, Artificial Sequence
  derived and/or modified sequence
gagcgctttccgggacgtggagacgcggagcgtcccgaggaggcaggagactcgggatgatcgggagcgtcccagggagggggcccctgagtgctttctgggggagggggcgctgcctacgtcctcaggggagcaggcttggaggctttgagtccacccttctgtaatgatgggaggggcatccgagtgcatgtgggggcccgcggggaccctagtgacacggggcgaggcccagaggatgagtactctcggggaggcgacatccttagtgaagaggcagtggagggcccgttttgggggaaagggtgtcttggattccccctgtgaggcagtgccagggagcctgggggagaagagccgagatcagggtggggcagggctttggccccaccaccccaggggcccagagagagatgaggcggccaggagtgccacctgcatgttttgggaggggtctgtgagtgcccccggccccaccgtgtgctctgggcctctatccctctgggacagccccgctgcccggatccctcaccctgggaccctcccctgccctgtccattctctcctgcccctcccctggctgccaccttcccagtatttgccccatggtgtgtccccagcatctgcacccccggacctgtcttgggttaaggagcctttcctgggaatgggggcgaagggttcagggccagtagaatggaaggggattgaggagaggggaagtcagtgagcggtcagtctcttcctctgtttgtaaagtcaccgaagggccgcctggctggtccccagctttctctctggagatcccaggcctccacagcaggaaggaaccagcattgtttatgatttgaccagagccagctcctgctctctcccctccctgccaaggcctgggtggggccaccaggcccggactccccctttgtaaggccacagcagcagcctctctccggtcccctcagctcggcctatgaccacgtgcgcaagactcgcgtggccatcaagaagatcagccccttcgaacatcagacctactgccagcgcacgctccgggagatccagatcctgctgcgcttccgccatgagaatgtcatcggcatccgagacattctgcgggcgtccaccctggaagccatgagagatgtctacattgtgcaggacctgatggagactgacctgtacaagttgctgaaaagccagcagctgagcaatgaccatatctgctacttcctctaccagatcctgcggggcctcaagtacatccactccgccaacgtgctccaccgagatctaaagccctccaacctgctcatcaacaccacctgcgaccttaagatttgtgatttcggcctggcccggattgccgatcctgagcatgaccacaccggcttcctgacggagtatgtggctacgcgctggtaccgggccccagagatcatgctgaactccaagggctataccaagtccatcgacatctggtctgtgggctgcattctggctgagatgctctctaaccggcccatcttccctggcaagcactacctggatcagctcaaccacattctgggcatcctgggctccccatcccaggaggacctgaattgtatcatcaacatgaaggcccgaaactacctacagtctctgccctccaagaccaaggtggcttgggccaagcttttccccaagtcagactccaaagcccttgacctgctggaccggatgttaacctttaaccccaataaacggatcacagtggaggaagcgctggctcacccctacctggagcagtactatgacccgacggatgagccagtggccgaggagcccttcaccttcgccatggagctggatgacctacctaaggagcggctgaaggagctcatcttccaggagacagcacgcttccagcccggagtgctggaggccccctagcccagacagacatctctgcaccctggggcctggacctgcctcctgcctgcccctctcccgccagactgttagaaaatggacactgtgcccagcccggaccttggcagcccaggccggggtggagcatgggcctggccacctctctcctttgctgaggcctccagcttcaggcaggccaaggccttctcctccccacccgccctccccacggggcctcgggacctcaggtggccccagttcaatctcccgctgctgctgctgcgcccttaccttccccagcgtcccagtctctggcagttctggaatggaagggttctggctgccccaacctgctgaagggcagaggtggagggtggggggcgctgagtagggactcagggccatgcctgcccccctcatctcattcaaaccccaccctagtttccctgaaggaacattccttagtctcaagggctagcatccctgaggagccaggccgggccgaatcccctccctgtcaaagctgtcacttcgcgtgccctcgctgcttctgtgtgtggtgagcagaagtggagctggggggcgtggagagcccggcgcccctgccacctccctgacccgtctaatatataaatatagagatgtgtctatggctg

SEQ ID NO: 131553 - DNA, 1140 bp, Artificial Sequence
  derived and/or modified sequence
atggccgctgctgccgctcaaggcggaggaggaggcgagcctagacgcactgaaggggtgggacctggggtccctggcgaagtcgagatggtgaaggggcagccatttgacgtcggacccaggtacacacagctccagtacataggggagggggcttatgggatggtatcatcagcatatgaccacgtgcgcaagactcgcgtggctattaagaagattagcccttttgaacaccagacctattgccagaggaccttgcgagagatccagatccttttacgcttccgacatgaaaatgtgatcggcattagggacatcctgcgcgcttctacactggaggctatgagagacgtctatatcgtccaagacctgatggaaacggatttgtataagctgctcaagtcacagcaactcagtaacgatcacatttgctatttcctctatcagatcctgagaggtttaaagtacatccattccgcaaacgtgctgcaccgggatctgaaacccagcaacctccttatcaacacgacctgcgacctgaaaatatgtgatttcggattggccagaattgcggatcctgagcacgatcatacaggatttcttaccgagtacgttgcgaccaggtggtacagggcacctgaaatcatgctgaactccaaagggtacacgaagtccatagacatctggtccgttgggtgcatcctggcagagatgctcagcaatagaccaatttttcccggtaaacattacctagaccagttgaatcatattctgggaattctggggtcaccgtcgcaggaagatctcaactgtattattaacatgaaggctcgcaactacctgcagagtttgcctagcaagaccaaggttgcctgggctaagctttttccgaagtccgatagtaaggcactcgatttattggaccggatgctcacgttcaaccccaacaaaagaatcacagtggaagaggccctcgctcatccctaccttgagcagtactacgatccaactgatgaacctgttgcagaagagcccttcaccttcgccatggagttggatgatcttcccaaggagcgcctaaaggagctgatttttcaggaaactgccaggttccagccaggggttctggaggccccttag

SEQ ID NO: 131554 - DNA, 936 bp, Artificial Sequence
  derived and/or modified sequence
atggtcaaagggcaaccatttgacgttggcccaagatacacacagttgcagtacattggggaaggcgcttacggcatggtgtcatcagcgtacgaccatgtccgaaaaacacgggttgccatcaaaaaaatctcccctttcgaacaccagacctattgccagcggactctccgtgagattcaaatcttgctgaggttccggcacgaaaatgtgattggcatccgagacattctgagagctagcacgctcgaagccatgagggatgtatacatagtccaggatctgatggagacggacctctacaaactgctgaagagccaacaattgtcaaacgaccatatctgctactttctgtatcagattttgagggggctgaagtatattcatagcgctaacgttctgcaccgtgacctgaagccttctaaccttcttattaatacgacctgcgacttgaaaggctatacgaagagcatcgacatttggtctgtgggctgtatattggcagaaatgctgagtaaccgccctatcttccctggcaaacattatctggatcagctgaatcatattctcggcatcctaggaagcccatcgcaggaagatctgaactgcataataaacatgaaggctcggaactacctgcagtcccttccatcgaaaactaaagtggcctgggccaaactgtttcctaagagtgattctaaagccctggaccttctggatcgcatgctgacgttcaacccgaacaagcgcattacggtggaagaggccttagcgcatccatatctggagcagtactatgacccgactgacgagcccgtggcggaagaacctttcaccttcgccatggagctagatgacctgcctaaggagaggctgaaagaactgatttttcaggagacagcacgctttcagcccggtgtccttgaagcaccgtag

SEQ ID NO: 131555 - DNA, 798 bp, Artificial Sequence
  derived and/or modified sequence
atgcgggacgtctacatagtgcaggacttgatggagacggacctgtataaactcctgaagagtcaacagctctcaaatgaccatatctgctattttctgtatcagattctgcggggtcttaagtatatacatagcgcaaatgtactccatcgggatctcaaaccatcaaatttgcttatcaataccacttgcgacctgaaaatctgcgatttcggactggcgagaatcgctgaccctgagcacgaccacactggtttcctcacagaatacgttgcaaccagatggtatagagcaccagaaatcatgctgaacagcaaaggttataccaagtctattgacatatggagcgtgggatgtattttagcggagatgctttccaaccgaccaatattccccggaaaacactacctagaccagctaaaccacattttgggcattctggggagcccaagccaggaggatctgaactgcatcattaatatgaaagccaggaattacctacagagtctgccatctaagaccaaggtggcttgggcgaagttgtttcccaaatctgactctaaggcattggatctgttggatagaatgcttactttcaatcctaacaagaggatcacagtcgaggaagcattggcccatccctacttggagcagtactacgaccccaccgatgagcctgtcgctgaagagcccttcacttttgccatggaactggacgacttaccaaaggaaagactgaaagagctgatctttcaggagacagccagatttcagcctggtgtgctggaggccccttag

SEQ ID NO: 131556 - protein, 677 aa, Artificial Sequence
  derived and/or modified sequence
MESDLHQIIHSSQPLTLEHVRYFLYQLLRGLKYMHSAQVIHRDLKPSNLLVNENCELKIGDFGMARGLCTSPAEHQYFMTEYVATRWYRAPELMLSLHEYTQAIDLWSVGCIFGEMLARRQLFPGKNYVHQLQLIMMVLGTPSPAVIQAVGAERVRAYIQSLPPRQPVPWETVYPGADRQALSLLGRMLRFEPSARISAAAALRHPFLAKYHDPDDEPDCAPPFDFAFDREALTRERIKEAIVAEIEDFHARREGIRQQIRFQPSLQPVASEPGCPDVEMPSPWAPSGDCAMESPPPAPPPCPGPAPDTIDLTLQPPPPVSEPAPPKKDGAISDNTKAALKAALLKSLRSRLRDGPSAPLEAPEPRKPVTAQERQREREEKRRRRQERAKEREKRRQERERKERGAGASGGPSTDPLAGLVLSDNDRSLLERWTRMARPAAPALTSVPAPAPAPTPTPTPVQPTSPPPGPVAQPTGPQPQSAGSTSGPVPQPACPPPGPAPHPTGPPGPIPVPAPPQIATSTSLLAAQSLVPPPGLPGSSTPGVLPYFPPGLPPPDAGGAPQSSMSESPDVNLVTQQLSKSQVEDPLPPVFSGTPKGSGAGYGVGFDLEEFLNQSFDMGVADGPQDGQADSASLSASLLADWLEGHGMNPADIESLQREIQMDSPMLLADLPDLQDP

SEQ ID NO: 131557 - protein, 816 aa, Artificial Sequence
  derived and/or modified sequence
MAEPLKEEDGEDGSAEPPGPVKAEPAHTAASVAAKNLALLKARSFDVTFDVGDEYEIIETIGNGAYGVVSSARRRLTGQQVAIKKIPNAFDVVTNAKRTLRELKILKHFKHDNIIAIKDILRPTVPYGEFKSVYVVLDLMESDLHQIIHSSQPLTLEHVRYFLYQLLRGLKYMHSAQVIHRDLKPSNLLVNENCELKIGDFGMARGLCTSPAEHQYFMTEYVATRWYRAPELMLSLHEYTQAIDLWSVGCIFGEMLARRQLFPGKNYVHQLQLIMMVLGTPSPAVIQAVGAERVRAYIQSLPPRQPVPWETVYPGADRQALSLLGRMLRFEPSARISAAAALRHPFLAKYHDPDDEPDCAPPFDFAFDREALTRERIKEAIVAEIEDFHARREGIRQQIRFQPSLQPVASEPGCPDVEMPSPWAPSGDCAMESPPPAPPPCPGPAPDTIDLTLQPPPPVSEPAPPKKDGAISDNTKAALKAALLKSLRSRLRDGPSAPLEAPEPRKPVTAQERQREREEKRRRRQERAKEREKRRQERERKERGAGASGGPSTDPLAGLVLSDNDRSLLERWTRMARPAAPALTSVPAPAPAPTPTPTPVQPTSPPPGPVAQPTGPQPQSAGSTSGPVPQPACPPPGPAPHPTGPPGPIPVPAPPQIATSTSLLAAQSLVPPPGLPGSSTPGVLPYFPPGLPPPDAGGAPQSSMSESPDVNLVTQQLSKSQVEDPLPPVFSGTPKGSGAGYGVGFDLEEFLNQSFDMGVADGPQDGQADSASLSASLLADWLEGHGMNPADIESLQREIQMDSPMLLADLPDLQDP

SEQ ID NO: 131558 - protein, 241 aa, Artificial Sequence
  derived and/or modified sequence
MAEPLKEEDGEDGSAEPPGPVKAEPAHTAASVAAKNLALLKARSFDVTFDVGDEYEIIETIGNGAYGVVSSARRRLTGQQVAIKKIPNAFDVVTNAKRTLRELKILKHFKHDNIIAIKDILRPTVPYGEFKSVYVVLDLMESDLHQIIHSSQPLTLEHVRYFLYQLLRGLKYMHSAQVIHRDLKPSNLLVNENCELKIGDFGMARGLCTSPAEHQYFMTEYVATRWYRAPELMLSLHEYTQ

SEQ ID NO: 131559 - DNA, 2451 bp, Artificial Sequence
  derived and/or modified sequence
atggcagagcctcttaaagaggaagacggagaggacgggtcagcagaacccccgggcccagtgaaagctgagccagcccataccgcggcctcggtggctgcaaagaaccttgcactgctgaaagctcggagctttgacgtaacatttgatgtgggggacgagtatgagattatcgagacgatcggaaacggggcctacggtgtggtgagtagtgcaagacgcaggctgactgggcagcaagtagccatcaaaaagattccaaatgctttcgatgtagtcaccaatgctaaacgaacactgcgcgagcttaaaatccttaaacactttaaacatgacaatattattgcaattaaagacattcttcgcccgacggttccttatggcgagtttaagtctgtctatgttgtcctagacctcatggaatcagacctgcatcagatcatccactcatcacaacccctcactcttgagcacgtgcgctacttcctgtatcagctcctgaggggactgaaatatatgcatagcgcacaggtgattcatcgggacctgaaaccctcaaacttgctggtgaacgaaaattgcgagctgaaaataggcgacttcgggatggctcggggcctctgtacatcccctgctgaacatcagtactttatgactgagtacgtcgccacccggtggtacagggcccccgagctgatgctatccctgcacgaatacacccaggcgatcgacctctggtccgtgggctgcatcttcggggaaatgcttgcgcggcgccaacttttcccgggcaagaattatgttcaccagctgcagctgatcatgatggtcttggggactccatcccccgctgtcatccaggccgtgggcgctgagagagtaagagcttacatccagagtctgccccccagacagcccgtgccgtgggaaactgtctaccctggagccgaccgccaagctttaagtttgctgggacgaatgctcaggttcgagccctctgcccggatctctgctgctgcagcactccgtcaccctttcctcgccaagtaccatgatcctgatgacgagccggactgcgcacctcctttcgacttcgcattcgatcgcgaggccttgacaagggagaggataaaagaggccattgtggccgagattgaggattttcacgcaaggcgagagggaattcggcagcagatcaggtttcagccaagcctgcaacccgtggcatcggagccagggtgcccggatgtagaaatgcccagcccatgggctccttctggtgactgtgctatggagtctcctccacctgctccgcctccctgtcccgggcccgctccagacaccatcgaccttacccttcagccccctcccccagtaagtgagccagcgccacccaaaaaggatggcgctatttcagataacaccaaggccgccctcaaagctgcgctgctcaagagcctccgcagccgtttacgggacgggccctcagcaccgctcgaggcccctgaacccaggaaaccagtgacagcccaggagcgacagagagaaagggaagaaaaaaggagaagaagacaggagcgagctaaggaaagagagaaaagaagacaagagcgagaacggaaagagcgtggagccggggcctcagggggcccaagtacggatcccttagccggtctcgtcctgagtgataacgatcgcagcttgctagagcggtggacacgcatggcacgacctgcggcgccagctctcacttcggtgcctgcccctgcaccagcacctacacctacacctactccagtgcagcccacctcccctccaccaggccccgtggctcagcctactggacctcaacctcagagcgctggcagcacctcgggtcccgtgccccagccagcctgcccacctccaggaccagcaccacacccgaccggtccacccggccctatcccagtgcccgcccccccgcagattgctacctccacatctctcttggccgcacagagcctggtcccacccccaggattgcctggctcaagcacgcccggagtgctgccatactttccccccggattacccccaccggatgctggaggcgcaccacagtcgtccatgtcggagtctcctgacgtgaaccttgtgacccagcagctctctaagagtcaggtggaggaccccctgcccccagtgttttcaggcacacccaaaggttccggcgccggctacggagtcggcttcgacctggaagagtttttaaatcagagtttcgatatgggcgtggcagatgggccccaagacggccaagcagacagcgctagcctcagcgctagcctgctggcggactggcttgaaggacacggaatgaaccccgcggacatcgaaagcctgcagcgcgaaatccagatggattctcccatgttactcgctgacctgccagatctgcaggacccttag

SEQ ID NO: 131560 - DNA, 2451 bp, Artificial Sequence
  derived and/or modified sequence
atggccgagcctctcaaggaggaagacggtgaagacggcagcgctgagccacctggccccgtcaaggccgagccggcacatacggctgcgagcgtggccgctaagaatttggctcttctaaaagctcgatcctttgatgtgacattcgacgtcggggatgagtatgagatcatcgagacgattggaaacggcgcttatggagtggtgagcagcgctcggcgccgtttaaccggccagcaggtggcgattaaaaagatcccaaacgctttcgatgtggttaccaacgcaaagcgaacgttgagggaactgaaaatcctgaagcacttcaagcatgacaatatcatcgccatcaaggacatcttgagacctacagtcccctacggagagtttaagagtgtgtatgtcgtgttggatcttatggagagtgatctccaccaaatcatccactcctctcagccactaaccttggagcatgtcaggtatttcctttatcaattgctgagaggactgaaatacatgcatagtgcacaggtaattcaccgagatctcaaacctagcaaccttcttgtgaatgagaactgcgaactgaagatcggcgacttcgggatggctcgtggactctgtacaagcccagccgagcatcagtatttcatgaccgagtacgtggctacacgatggtaccgagcccctgagctgatgctgtccctccacgagtatacgcaagcaattgatctatggtctgtgggatgcatttttggagaaatgctggcaagacgtcagctcttccctggcaagaattacgtgcaccagctgcagctgataatgatggtactgggaacccccagcccggccgttattcaagccgttggagctgagagagtgagagcctatatccagagtcttccccccaggcaacccgtgccttgggagaccgtctatcccggggcagacaggcaagcactgtctcttctcgggaggatgctccgattcgagccttcggcaaggatctccgctgctgcggctctgcggcatccctttctagcaaagtaccatgaccctgacgatgagcctgactgtgcacccccttttgactttgcctttgatagagaggccctgacccgggaaaggattaaagaggctatcgtcgcagagattgaggatttccacgccaggagggaagggatccggcagcagatcaggtttcagccctcactccagcccgtggcatccgagcccggctgtcctgatgtggaaatgccatcaccctgggccccttcaggggactgtgctatggagtctccaccccccgctccccctccgtgccccggcccagcaccagacacgattgacctgaccctgcagcccccccccccggtctcggagcccgctcctcctaagaaggacggcgccattagtgataataccaaggccgccctgaaagctgcgcttttgaagtctctaaggagtcggctgcgcgatggtccctcagcccctttggaggcacctgagccgcggaagcccgtgaccgcacaggaacggcagagagaaagagaagagaagcggcgtcggcgacaggagagagccaaagagcgcgagaagaggagacaggaaagggaacggaaggagcgaggagccggcgcctcgggggggccaagcacagacccattagccgggctggtactaagcgataacgatcgttccttgctggagcgttggacacgcatggcgaggcctgctgctcctgcactgacatcagttcccgctccagcgccggcccccacacccacacccacacccgtacagcccaccagccctcctccgggccccgttgctcaacccacaggcccgcagccacagagcgctggaagtacctctggtcccgtgcctcagcctgcatgtccaccacccggcccggcaccgcatcctacaggtccgccaggtcccatcccggttccagcccccccccagatcgccacttctacctctctgctggccgcgcagtctttagtaccaccccctggactgcctggaagcagcacaccaggcgtcttgccatattttcctcctgggctccccccacccgatgccggcggcgcccctcagtctagcatgtccgaatctcctgatgtcaatctggtaactcagcaactatcaaaatcccaagtcgaggatcccctaccgccagtgtttagcggcacccccaaggggtccggcgcagggtatggagtgggttttgatttggaggagtttttgaaccagtcctttgacatgggagtggccgacggcccccaggatggccaggccgatagcgctagcctgtcagcgagccttctcgccgattggctagagggccatggcatgaaccccgcagacatcgagtcactgcaaagagagatccagatggactcccccatgctgctggccgacctccccgatctgcaggacccttag

SEQ ID NO: 131561 - DNA, 2451 bp, Artificial Sequence
  derived and/or modified sequence
atggccgaacccctaaaagaagaggacggagaagacggtagcgccgagcctccagggcctgtgaaggcagagcccgcccacacggcagccagcgtggccgccaaaaacctcgctctgctgaaggcacggagttttgacgtaaccttcgacgtgggagacgagtatgagattatagaaacaattgggaatggagcctatggagttgtgtcttcagcgaggaggagattgactggccagcaggtggctatcaaaaagatccccaacgccttcgatgtagtcaccaacgcaaaacggaccctgcgggagctcaagatcctcaagcacttcaaacatgacaacatcatcgccataaaggacatcttgagacctaccgtgccatacggagagttcaagagcgtctatgtcgttctggatctgatggagtctgacttgcaccagataatccacagtagccagcctctgactctggagcatgtgagatattttctgtatcagttgctccgaggtctgaagtatatgcattctgcccaggtcattcacagagacctgaaaccatccaacctgctcgtgaatgagaactgcgagcttaaaatcggcgacttcggtatggcccgtggtttgtgtacaagcccagcagagcatcagtatttcatgactgagtacgtggctaccagatggtatcgagcacctgagcttatgctctcgcttcatgaatacacacaggctatcgacctgtggagcgtgggatgcattttcggagagatgctcgcgagaaggcagctctttccaggaaaaaactatgtgcaccaattgcagctgatcatgatggtgctgggaacccctagccccgcagtgattcaggctgtgggcgctgagagagttagggcctacatccagagtctccccccccggcaacccgttccctgggaaacagtttatccaggcgctgatagacaggcactgtcactcctgggacgaatgcttagattcgaaccttccgcccggatcagtgccgcagctgcattgcgtcacccatttctggccaaatatcacgatcccgatgatgaacctgactgcgcccccccctttgattttgcatttgatcgagaggctttaaccagagaacggattaaggaggctatagtggccgagattgaggacttccacgctcgcagagagggcatcagacagcagatcagatttcagccttccctgcagcccgtcgcgtctgagcctggatgtcctgatgttgagatgccgtcaccttgggctccctctggagactgcgctatggaatctccgcccccggctccaccaccatgtcctggaccggctccagacaccatcgatttaaccctccagccaccgccgccagtgagcgaacccgctccccccaaaaaagatggggctatctcggacaacacaaaagcggctcttaaggccgccctcctcaagtccttgaggtccagattgagagatggaccgagcgctcccctggaagctcccgagccccgcaagcctgttaccgcccaggagagacagcgggaaagggaggagaagcgccgacgaaggcaggagagggctaaggaacgcgagaagcgtagacaggagagagaacgaaaggagaggggggcaggggccagcggcggcccatccacagatccgctggcgggcttggtcctcagcgacaacgacaggagtttgttggagcgttggacacgaatggcccgccccgcagccccagccctgacctctgtgccggcccccgcaccggctcccacacccacccccacacccgttcagcccacgtctcctcctcccgggcccgtcgcccaaccaacaggccctcagcctcagtcagcaggcagcacctccggtcccgtccctcagcctgcgtgcccgccccctggtcctgccccacaccccacaggccctccgggaccgatcccggttcccgcccctccccaaatcgcaaccagcacttcccttctggccgcccaatctctggtgcccccccccggcctccccggttcttcaaccccaggtgtcctgccatacttcccgccgggactgccacctccagatgctggcggggctccacagtcctccatgagcgagtctcctgatgtgaacttagtgactcagcagctgtccaagtctcaagtggaggaccctctgccaccagtttttagtgggaccccaaaaggtagtggggccggttatggggtgggttttgacctcgaagaattcctcaaccagagctttgatatgggagtggccgatgggccacaagacgggcaggctgactcggcctcactgagtgcgagtcttctggcagactggctcgaaggccatggtatgaaccctgctgatatagagagcctccagcgcgaaattcagatggactctccgatgctgctagctgatctcccagacctccaggacccatag

SEQ ID NO: 131562 - DNA, 726 bp, Artificial Sequence
  derived and/or modified sequence
atggcagagcccctgaaggaggaggacggagaggacggttctgccgaacccccaggccctgtcaaggcagaaccggcccacaccgcagcaagtgtcgccgcaaagaatttggcacttttgaaagctagaagctttgacgtgacatttgatgttggagatgaatatgagattattgagacaatcgggaacggggcttacggagtggtaagtagcgcccgccgaagactgaccggccaacaggtcgctattaaaaaaatccccaatgcttttgatgttgtcacgaacgcaaaaagaacactgcgagagctgaaaattctgaaacactttaagcacgacaacatcatcgcaatcaaggacatcctgagaccaacggtgccatatggcgaattcaagagcgtgtacgttgtgcttgacctgatggagtctgacctccaccaaattattcactccagccagcctttaacccttgagcacgtgcgatacttcctgtaccagctgctgaggggattaaagtacatgcactccgctcaggtgatacacagggatctgaaaccatccaacctactggtgaatgaaaactgtgagctaaagattggtgactttggaatggcaaggggcctgtgtacatctcctgccgaacaccaatactttatgactgaatatgttgccactagatggtaccgcgcccctgagctcatgctctccctacatgaatacacccaatag

SEQ ID NO: 131563 - DNA, 2451 bp, Artificial Sequence
  derived and/or modified sequence
atggccgagcccctgaaggaggaggatggagaagatggcagcgctgagcccccaggccctgtgaaggccgagcccgcccacacagctgcctctgtggccgccaagaacctggccctgctgaaggcccggagctttgatgtgacctttgatgtgggagatgaatatgagatcatcgagaccatcggaaatggagcctacggcgtggtgtcctctgcccggcggcggctgaccggccagcaggtggccatcaagaagatccccaatgcctttgatgtggtgaccaatgccaagaggaccctgcgggagctgaagatcctgaagcacttcaagcatgacaacatcatcgccatcaaggacatcctgcggcccaccgtgccctatggagagttcaagtctgtgtatgtggtgctggacctgatggagagtgacctgcaccagatcatccacagcagccagcccctgaccctggagcacgtgcgctacttcctgtaccagctgctgcggggcctgaagtacatgcacagcgcccaggtgatccaccgggacctgaagcccagcaacctgctggtgaatgaaaactgtgagctgaagatcggggactttggcatggcccggggcctgtgcaccagccctgctgagcaccagtacttcatgacagaatatgtggccacccgctggtaccgggcccctgagctgatgctgagcctgcacgagtacacccaggccatcgacctgtggagcgtgggctgcatctttggagagatgctggcccggcggcagctgtttcctgggaagaactacgtgcaccagctgcagctgatcatgatggtgctgggcacccccagccctgctgtgatccaggccgtgggcgctgagcgggtgcgggcctacatccagagcctgcccccccggcagcctgtgccctgggagaccgtgtacccaggagctgaccggcaggccctgagcctgctgggccgcatgctgcgctttgagcccagcgcccgcatctctgctgctgctgccctgcggcaccccttcctggccaagtaccatgaccctgatgatgagccagactgtgcccccccatttgattttgcctttgaccgggaggccctgacccgggagcgcatcaaggaggccatcgtggccgagattgaggacttccacgcccggcgggagggcatccggcagcagatccgcttccagcccagcctgcagcctgtggccagcgagcccggctgcccagatgtggagatgcccagcccctgggcccccagcggggactgtgccatggagagccccccaccagcccccccaccctgccccggccctgccccagacaccatcgacctgaccctgcagcccccacctcctgtgtctgagcccgccccacccaagaaggatggagccatcagtgacaacaccaaggccgccctgaaggccgccctgctgaagagcctgcggagccggctgagagatggccccagcgcccccctggaggcccctgagcccaggaagcctgtgacagcccaggagcggcagcgggagcgggaggagaagagaagaagacggcaggagcgggccaaggagcgggagaagaggcggcaggagcgggagaggaaggagagaggagctggggccagcggcggccccagcacagaccccctggccggcctggtgctgagtgacaatgacaggagcctgctggagcgctggaccaggatggcccggcctgctgccccagccctgacctctgtgcctgccccagccccagcccccacccccacccccacccctgtgcagcccaccagccccccacctggccctgtggcccagcccaccggcccccagccccagagcgctggcagcaccagcggccctgtgccccagcctgcctgccccccacctggccctgccccccaccccactggacctcctggccccatccctgtgcctgccccaccccagatcgccaccagcaccagcctgctggccgcccagagcctggtgcccccacctggcctgcccggcagcagcaccccaggagtgctgccctacttccccccaggcctgcccccaccagatgctgggggcgccccccagagctccatgtctgagagcccagatgtgaacctggtgacccagcagctgagcaagagccaggtggaggaccccctgccccctgtgttttctggcacccccaagggcagcggggccggctatggagtgggctttgacctggaggagttcctgaaccagagctttgacatgggcgtggctgatggcccccaggacggccaggccgacagcgccagcctgagcgccagcctgctggccgactggctggagggccacggcatgaacccagctgacatcgagagcctgcagcgggagatccagatggacagccccatgctgctggccgacctgcctgacctgcaggacccctag

SEQ ID NO: 131564 - DNA, 726 bp, Artificial Sequence
  derived and/or modified sequence
atggccgagcccctgaaggaggaggatggagaagatggcagcgctgagcccccaggccctgtgaaggccgagcccgcccacacagctgcctctgtggccgccaagaacctggccctgctgaaggcccggagctttgatgtgacctttgatgtgggagatgaatatgagatcatcgagaccatcggaaatggagcctacggcgtggtgtcctctgcccggcggcggctgaccggccagcaggtggccatcaagaagatccccaatgcctttgatgtggtgaccaatgccaagaggaccctgcgggagctgaagatcctgaagcacttcaagcatgacaacatcatcgccatcaaggacatcctgcggcccaccgtgccctatggagagttcaagtctgtgtatgtggtgctggacctgatggagagtgacctgcaccagatcatccacagcagccagcccctgaccctggagcacgtgcgctacttcctgtaccagctgctgcggggcctgaagtacatgcacagcgcccaggtgatccaccgggacctgaagcccagcaacctgctggtgaatgaaaactgtgagctgaagatcggggactttggcatggcccggggcctgtgcaccagccctgctgagcaccagtacttcatgacagaatatgtggccacccgctggtaccgggcccctgagctgatgctgagcctgcacgagtacacccagtag

SEQ ID NO: 131565 - DNA, 3149 bp, Artificial Sequence
  derived and/or modified sequence
acagctcggttccagcgagggctccgcccacccgcgggctccgcagaggagcagaggttgggcggccgcctcggttaactccgctgcagcccaaagcacgggaatcgcgggacagacaaacgagcggagggaagatacctagaagccaggaaaccgcgagctgcagtccaacttggccggaagctgcggagaggctcagccaccggaagtcagtggagggttcggccggacgctctagaatcccggaggaccgggatctctgtggttggccgtgacgggcaccctctaccggggatgacacattcccagagctcctgggaccaagcaaatggcggacacaattccctgggcggaaggggacttcgggagccagtagccaagacaccatggccgagcctctgaaggaggaagacggcgaggacggctctgcggagccccccgggcccgtgaaggccgaacccgcccacaccgctgcctctgtagcggccaagaacctggccctgcttaaagcccgctccttcgatgtgacctttgacgtgggcgacgagtacgagatcatcgagaccataggcaacggggcctatggagtggtgtcctccgcccgccgccgcctcaccggccagcaggtggccatcaagaagatccctaatgctttcgatgtggtgaccaatgccaagcggaccctcagggagctgaagatcctcaagcactttaaacacgacaacatcatcgccatcaaggacatcctgaggcccaccgtgccctatggcgaattcaaatctgtctacgtggtcctggacctgatggaaagcgacctgcaccagatcatccactcctcacagcccctcacactggaacacgtgcgctacttcctgtaccaactgctgcggggcctgaagtacatgcactcggctcaggtcatccaccgtgacctgaagccctccaacctattggtgaatgagaactgtgagctcaagattggtgactttggtatggctcgtggcctgtgcacctcgcccgctgaacatcagtacttcatgactgagtatgtggccacgcgctggtaccgtgcgcccgagctcatgctctctttgcatgagtatacacaggctattgacctctggtctgtgggctgcatctttggtgagatgctggcccggcgccagctcttcccaggcaaaaactatgtacaccagctacagctcatcatgatggtgctgggtaccccatcaccagccgtgattcaggctgtgggggctgagagggtgcgggcctatatccagagcttgccaccacgccagcctgtgccctgggagacagtgtacccaggtgccgaccgccaggccctatcactgctgggtcgcatgctgcgttttgagcccagcgctcgcatctcagcagctgctgcccttcgccaccctttcctggccaagtaccatgatcctgatgatgagcctgactgtgccccgccctttgactttgcctttgaccgcgaagccctcactcgggagcgcattaaggaggccattgtggctgaaattgaggacttccatgcaaggcgtgagggcatccgccaacagatccgcttccagccttctctacagcctgtggctagtgagcctggctgtccagatgttgaaatgcccagtccctgggctcccagtggggactgtgccatggagtctccaccaccagccccgccaccatgccccggccctgcacctgacaccattgatctgaccctgcagccacctccaccagtcagtgagcctgccccaccaaagaaagatggtgccatctcagacaatactaaggctgcccttaaagctgccctgctcaagtctttgaggagccggctcagagatggccccagcgcacccctggaggctcctgagcctcggaagccggtgacagcccaggagcgccagcgggagcgggaggagaagcggcggaggcggcaagaacgagccaaggagcgggagaaacggcggcaggagcgggagcgaaaggaacggggggctggggcctctgggggcccctccactgaccccttggctggactagtgctcagtgacaatgacagaagcctgttggaacgctggactcgaatggcccggcccgcagccccagccctcacctctgtgccggcccctgccccagcgccaacgccaaccccaaccccagtccaacctaccagtcctcctcctggccctgtagcccagcccactggcccgcaaccacaatctgcgggctctacctctggccctgtaccccagcctgcctgcccaccccctggccctgcaccccaccccactggccctcctgggcccatccctgtccccgcgccaccccagattgccacctccaccagcctcctggctgcccagtcacttgtgccaccccctgggctgcctggctccagcaccccaggagttttgccttacttcccacctggcctgccgcccccagacgccgggggagcccctcagtcttccatgtcagagtcacctgatgtcaaccttgtgacccagcagctatctaagtcacaggtggaggaccccctgccccctgtgttctcaggcacaccaaagggcagtggggctggctacggtgttggctttgacctggaggaattcttaaaccagtctttcgacatgggcgtggctgatgggccacaggatggccaggcagattcagcctctctctcagcctccctgcttgctgactggctcgaaggccatggcatgaaccctgccgatattgagtccctgcagcgtgagatccagatggactccccaatgctgctggctgacctgcctgacctccaggacccctgaggcccccagcctgtgccttgctgccacagtagacctagttccaggatccatgggagcattctcaaaggctttagccctggacccagcaggtgaggctcggcttggattattctgcaggttcatctcagacccacctttcagccttaagcagccacctgagccaccaccgagccatggcaggatcgggagaccccaactccccctgaacaatccttttcagtattatatttttattattattatgttattattacactgtctttttgccatcaaaatgaggcctgtgaaatacaaggttcccttctgcacctg

SEQ ID NO: 131566 - DNA, 2845 bp, Artificial Sequence
  derived and/or modified sequence
gccttgggaggcggggcggagggggacggacagggcagctcaagacgctgaggtggtggctgcggcctttgaacaaacaccatggccgagcctctgaaggaggaagacggcgaggacggctctgcggagccccccgggcccgtgaaggccgaacccgcccacaccgctgcctctgtagcggccaagaacctggccctgcttaaagcccgctccttcgatgtgacctttgacgtgggcgacgagtacgagatcatcgagaccataggcaacggggcctatggagtggtgtcctccgcccgccgccgcctcaccggccagcaggtggccatcaagaagatccctaatgctttcgatgtggtgaccaatgccaagcggaccctcagggagctgaagatcctcaagcactttaaacacgacaacatcatcgccatcaaggacatcctgaggcccaccgtgccctatggcgaattcaaatctgtctacgtggtcctggacctgatggaaagcgacctgcaccagatcatccactcctcacagcccctcacactggaacacgtgcgctacttcctgtaccaactgctgcggggcctgaagtacatgcactcggctcaggtcatccaccgtgacctgaagccctccaacctattggtgaatgagaactgtgagctcaagattggtgactttggtatggctcgtggcctgtgcacctcgcccgctgaacatcagtacttcatgactgagtatgtggccacgcgctggtaccgtgcgcccgagctcatgctctctttgcatgagtatacacaggctattgacctctggtctgtgggctgcatctttggtgagatgctggcccggcgccagctcttcccaggcaaaaactatgtacaccagctacagctcatcatgatggtgctgggtaccccatcaccagccgtgattcaggctgtgggggctgagagggtgcgggcctatatccagagcttgccaccacgccagcctgtgccctgggagacagtgtacccaggtgccgaccgccaggccctatcactgctgggtcgcatgctgcgttttgagcccagcgctcgcatctcagcagctgctgcccttcgccaccctttcctggccaagtaccatgatcctgatgatgagcctgactgtgccccgccctttgactttgcctttgaccgcgaagccctcactcgggagcgcattaaggaggccattgtggctgaaattgaggacttccatgcaaggcgtgagggcatccgccaacagatccgcttccagccttctctacagcctgtggctagtgagcctggctgtccagatgttgaaatgcccagtccctgggctcccagtggggactgtgccatggagtctccaccaccagccccgccaccatgccccggccctgcacctgacaccattgatctgaccctgcagccacctccaccagtcagtgagcctgccccaccaaagaaagatggtgccatctcagacaatactaaggctgcccttaaagctgccctgctcaagtctttgaggagccggctcagagatggccccagcgcacccctggaggctcctgagcctcggaagccggtgacagcccaggagcgccagcgggagcgggaggagaagcggcggaggcggcaagaacgagccaaggagcgggagaaacggcggcaggagcgggagcgaaaggaacggggggctggggcctctgggggcccctccactgaccccttggctggactagtgctcagtgacaatgacagaagcctgttggaacgctggactcgaatggcccggcccgcagccccagccctcacctctgtgccggcccctgccccagcgccaacgccaaccccaaccccagtccaacctaccagtcctcctcctggccctgtagcccagcccactggcccgcaaccacaatctgcgggctctacctctggccctgtaccccagcctgcctgcccaccccctggccctgcaccccaccccactggccctcctgggcccatccctgtccccgcgccaccccagattgccacctccaccagcctcctggctgcccagtcacttgtgccaccccctgggctgcctggctccagcaccccaggagttttgccttacttcccacctggcctgccgcccccagacgccgggggagcccctcagtcttccatgtcagagtcacctgatgtcaaccttgtgacccagcagctatctaagtcacaggtggaggaccccctgccccctgtgttctcaggcacaccaaagggcagtggggctggctacggtgttggctttgacctggaggaattcttaaaccagtctttcgacatgggcgtggctgatgggccacaggatggccaggcagattcagcctctctctcagcctccctgcttgctgactggctcgaaggccatggcatgaaccctgccgatattgagtccctgcagcgtgagatccagatggactccccaatgctgctggctgacctgcctgacctccaggacccctgaggcccccagcctgtgccttgctgccacagtagacctagttccaggatccatgggagcattctcaaaggctttagccctggacccagcaggtgaggctcggcttggattattctgcaggttcatctcagacccacctttcagccttaagcagccacctgagccaccaccgagccatggcaggatcgggagaccccaactccccctgaacaatccttttcagtattatatttttattattattatgttattattacactgtctttttgccatcaaaatgaggcctgtgaaatacaaggttcccttctgcacctga

SEQ ID NO: 131567 - DNA, 3077 bp, Artificial Sequence
  derived and/or modified sequence
cggctcccgccggcgagctggacagcggcgcgcgccaggcgtggctttctcggccggtgggctaggattggacgcagtaggtagaaggggcaggaccctccgcagcagtagctcagcgattggccaggagctggagggagcgtggccttgggaggcggggcggagggggacggacagggcagctcaagacgctgaggtggtggctgcggcctttgaacaagtaagtgagccaccctcggagacccccgcgctggggacgggaggccggcgagcctcgggacctctgaaagccttgaggaggcgcggggacaccatggccgagcctctgaaggaggaagacggcgaggacggctctgcggagccccccgggcccgtgaaggccgaacccgcccacaccgctgcctctgtagcggccaagaacctggccctgcttaaagcccgctccttcgatgtgacctttgacgtgggcgacgagtacgagatcatcgagaccataggcaacggggcctatggagtggtgtcctccgcccgccgccgcctcaccggccagcaggtggccatcaagaagatccctaatgctttcgatgtggtgaccaatgccaagcggaccctcagggagctgaagatcctcaagcactttaaacacgacaacatcatcgccatcaaggacatcctgaggcccaccgtgccctatggcgaattcaaatctgtctacgtggtcctggacctgatggaaagcgacctgcaccagatcatccactcctcacagcccctcacactggaacacgtgcgctacttcctgtaccaactgctgcggggcctgaagtacatgcactcggctcaggtcatccaccgtgacctgaagccctccaacctattggtgaatgagaactgtgagctcaagattggtgactttggtatggctcgtggcctgtgcacctcgcccgctgaacatcagtacttcatgactgagtatgtggccacgcgctggtaccgtgcgcccgagctcatgctctctttgcatgagtatacacaggctattgacctctggtctgtgggctgcatctttggtgagatgctggcccggcgccagctcttcccaggcaaaaactatgtacaccagctacagctcatcatgatggtgctgggtaccccatcaccagccgtgattcaggctgtgggggctgagagggtgcgggcctatatccagagcttgccaccacgccagcctgtgccctgggagacagtgtacccaggtgccgaccgccaggccctatcactgctgggtcgcatgctgcgttttgagcccagcgctcgcatctcagcagctgctgcccttcgccaccctttcctggccaagtaccatgatcctgatgatgagcctgactgtgccccgccctttgactttgcctttgaccgcgaagccctcactcgggagcgcattaaggaggccattgtggctgaaattgaggacttccatgcaaggcgtgagggcatccgccaacagatccgcttccagccttctctacagcctgtggctagtgagcctggctgtccagatgttgaaatgcccagtccctgggctcccagtggggactgtgccatggagtctccaccaccagccccgccaccatgccccggccctgcacctgacaccattgatctgaccctgcagccacctccaccagtcagtgagcctgccccaccaaagaaagatggtgccatctcagacaatactaaggctgcccttaaagctgccctgctcaagtctttgaggagccggctcagagatggccccagcgcacccctggaggctcctgagcctcggaagccggtgacagcccaggagcgccagcgggagcgggaggagaagcggcggaggcggcaagaacgagccaaggagcgggagaaacggcggcaggagcgggagcgaaaggaacggggggctggggcctctgggggcccctccactgaccccttggctggactagtgctcagtgacaatgacagaagcctgttggaacgctggactcgaatggcccggcccgcagccccagccctcacctctgtgccggcccctgccccagcgccaacgccaaccccaaccccagtccaacctaccagtcctcctcctggccctgtagcccagcccactggcccgcaaccacaatctgcgggctctacctctggccctgtaccccagcctgcctgcccaccccctggccctgcaccccaccccactggccctcctgggcccatccctgtccccgcgccaccccagattgccacctccaccagcctcctggctgcccagtcacttgtgccaccccctgggctgcctggctccagcaccccaggagttttgccttacttcccacctggcctgccgcccccagacgccgggggagcccctcagtcttccatgtcagagtcacctgatgtcaaccttgtgacccagcagctatctaagtcacaggtggaggaccccctgccccctgtgttctcaggcacaccaaagggcagtggggctggctacggtgttggctttgacctggaggaattcttaaaccagtctttcgacatgggcgtggctgatgggccacaggatggccaggcagattcagcctctctctcagcctccctgcttgctgactggctcgaaggccatggcatgaaccctgccgatattgagtccctgcagcgtgagatccagatggactccccaatgctgctggctgacctgcctgacctccaggacccctgaggcccccagcctgtgccttgctgccacagtagacctagttccaggatccatgggagcattctcaaaggctttagccctggacccagcaggtgaggctcggcttggattattctgcaggttcatctcagacccacctttcagccttaagcagccacctgagccaccaccgagccatggcaggatcgggagaccccaactccccctgaacaatccttttcagtattatatttttattattattatgttattattacactgtctttttgccatcaaaatgaggcctgtgaaatacaaggttcccttctgcacctga

SEQ ID NO: 131568 - DNA, 850 bp, Artificial Sequence
  derived and/or modified sequence
gcggggagcacacccctgcgaagtgccgggcaccctttgggcggctcccgccggcgagctggacagcggcgcgcgccaggcgtggctttctcggccggtgggctaggattggacgcagtagacaccatggccgagcctctgaaggaggaagacggcgaggacggctctgcggagccccccgggcccgtgaaggccgaacccgcccacaccgctgcctctgtagcggccaagaacctggccctgcttaaagcccgctccttcgatgtgacctttgacgtgggcgacgagtacgagatcatcgagaccataggcaacggggcctatggagtggtgtcctccgcccgccgccgcctcaccggccagcaggtggccatcaagaagatccctaatgctttcgatgtggtgaccaatgccaagcggaccctcagggagctgaagatcctcaagcactttaaacacgacaacatcatcgccatcaaggacatcctgaggcccaccgtgccctatggcgaattcaaatctgtctacgtggtcctggacctgatggaaagcgacctgcaccagatcatccactcctcacagcccctcacactggaacacgtgcgctacttcctgtaccaactgctgcggggcctgaagtacatgcactcggctcaggtcatccaccgtgacctgaagccctccaacctattggtgaatgagaactgtgagctcaagattggtgactttggtatggctcgtggcctgtgcacctcgcccgctgaacatcagtacttcatgactgagtatgtggccacgcgctggtaccgtgcgcccgagctcatgctctctttgcatgagtatacacagg

SEQ ID NO: 131569 - DNA, 2451 bp, Artificial Sequence
  derived and/or modified sequence
atggccgagcccctgaaggaggaggacggcgaggacggcagcgccgagccacctggccctgtcaaagccgaacctgcacacactgctgccagtgttgccgcaaaaaatcttgccctcctgaaagctcgaagcttcgacgtaaccttcgatgtgggagatgaatacgagatcatcgaaactattggaaatggcgcctacggggtggtcagcagcgcccgccgcaggctgactgggcaacaagtggctattaagaagattccgaatgctttcgatgtcgtaaccaatgctaagagaacgcttagagagctaaagatactcaagcactttaagcatgataacatcatcgcaattaaagatattctgaggcctaccgttccatacggggagttcaagagtgtttacgtggtactggatctcatggaaagtgacctccaccagattattcacagctcccagcctctgacactcgagcacgttaggtactttctctaccagctcttgcggggcctgaagtacatgcattcagcccaggtcatccatagggacttgaagccctccaacttattggtgaacgagaattgcgagctcaagatcggtgactttggaatggcccgtggactgtgcacgagtccagctgagcatcagtacttcatgaccgagtatgttgcaaccaggtggtacagggcgcctgaactcatgctgtcccttcacgaatacacccaggctattgacctgtggagcgtcggatgcattttcggtgaaatgctggcacgccgccaactattcccagggaagaactacgtgcatcagttacagctgattatgatggttctcggtaccccctcccccgcggtgatacaggccgtgggcgctgagcgggtacgggcatatatccagtctctgcctccaaggcaacctgtaccctgggagacagtctaccccggcgcagacaggcaggctctgtcactcttagggcgcatgctgaggtttgaacctagcgctaggatttctgcagctgctgctctcagacatccgtttttggccaagtatcacgacccagatgatgagcctgactgcgcccccccattcgactttgcatttgatcgggaggctctgacccgggagcgaataaaggaggccatcgttgccgagattgaagacttccatgccagaagggaagggatcaggcagcagatcagatttcagcctagcttgcagcccgtcgccagcgaaccggggtgccccgacgtggaaatgccgagtccttgggccccatctggagattgtgctatggagtcccccccccctgctccgcccccgtgtcccggaccagccccggacacaattgatctcactctgcagccgccgcctcccgtttcggaacctgcgccccctaagaaggatggagcaatctcagataacaccaaagccgcacttaaggccgctctgctgaaaagcttgaggagccggctgcgtgacggaccttctgcgccactggaggccccggagcctcgtaagcccgttaccgcccaggagcggcagcgagagagggaggagaaacgcagaagacgtcaggagagggcgaaagagcgggagaaaaggcgccaagagagagagaggaaagaaagaggagccggcgcgagcgggggacctagcaccgatccattagctggtctggtgctcagtgataacgataggtcacttctcgaacggtggacgcgcatggccaggcctgcagcccccgctctaactagtgtaccagcacctgccccggctccaactcctactcctacacccgtgcagcccacctcccctcctccagggcccgtggcacagcctacagggccgcagcctcagtcagccggctccaccagtgggccggttccacagcccgcctgtccaccgcctggcccggccccacaccccaccgggccgcccggacctatccctgtgccagctccaccacagatcgccacctcaacgtccctcctggccgcccagtcgctggtgcctcctcctgggcttcctggcagttcaacccccggtgtgctcccatattttcctccgggactgccgccccctgatgcaggaggagctccgcagtcaagcatgagtgagtctcctgacgttaacttggttacgcaacagctgagcaagagtcaggtcgaagatccacttccacctgttttttccggaacacctaagggcagcggcgctgggtacggcgtcggttttgatcttgaggagtttctcaatcaaagctttgacatgggtgtagcagatggacctcaggacggccaggccgatagtgcatccttaagtgccagtcttctcgctgattggcttgagggacatgggatgaaccctgccgatatagagagtctgcagagagagattcagatggactcccctatgctgctggccgacttacctgatctgcaggacccctag

SEQ ID NO: 131570 - DNA, 2451 bp, Artificial Sequence
  derived and/or modified sequence
atggccgagcccctgaaggaggaggacggcgaggacggcagcgccgagccgcccgggccagttaaagctgaacccgcccataccgcagcctcggtcgcggcaaagaatctggccctcctgaaggctcggagcttcgacgtaacttttgacgtgggagatgagtacgaaatcatagagactattggaaacggagcttacggggtggtctcttcagccagacgtagactgaccgggcagcaggtcgcgatcaagaaaattccaaatgctttcgatgtggtaactaatgcgaagagaacccttagggagcttaagatcctaaaacactttaaacacgacaatataatcgctatcaaggatatcctgcgacccactgtaccctatggagaattcaagtcggtgtatgtggttcttgatctaatggagtccgatcttcaccaaatcatacattctagccaacctctgacactggagcatgttaggtattttctctaccagctgctgcggggtttgaagtatatgcactctgcacaggtcatacacagggacctgaagccatcaaatttactggtcaatgagaactgtgaacttaagatcggagacttcggaatggcccgaggtctgtgtactagccccgcagagcaccagtactttatgaccgagtatgtggccaccagatggtaccgcgccccggagctcatgttgagcctccacgaatacacccaggccatcgacctttggtccgtggggtgtatctttggcgaaatgctggcacggcggcagctgttccctggcaaaaattacgtgcatcagctacaactcatcatgatggtgctaggcaccccatccccagctgtgatccaggctgtcggagccgagcgcgttcgtgcatatatccagtcactgcctcctcgccagccagttccttgggagactgtgtaccctggagcagacagacaggcactgagtcttttaggcaggatgctgaggtttgaaccctctgcacgtatctccgcggccgccgctctccgccacccgttcttggccaaataccatgaccccgatgatgagcctgattgtgctcccccttttgattttgccttcgatcgcgaagctcttacacgcgagaggatcaaggaagctatcgtggcagaaatcgaggactttcacgcccgacgggaaggtattcggcagcaaattcgcttccaaccaagtcttcagcccgtagcctctgagccagggtgtccagatgtcgaaatgccgtctccatgggccccgagcggcgattgtgctatggaatctccacctcccgctcctcctccctgtcctggccccgctccggataccattgatctgacactgcagccaccaccaccagtgtctgagccggctcccccgaagaaggacggggccattagcgataacacaaaggccgcattgaaagccgcactgttaaagtcactgaggtcacggctgcgggatgggccgtccgcccctctcgaggcaccggagccccgaaaacccgtaaccgcacaggaaagacagagggaacgagaggaaaaacggaggaggagacaggagcgcgcaaaagagagggagaagagaagacaggagagagaaagaaaagagcgtggtgctggggcaagcggggggccttctacagacccactcgccggattggtactgtctgacaacgatcggtccttgttggagcggtggacccgcatggcaaggcctgctgcgccagctcttactagcgtgccagcccctgcgccagcccccactcccaccccaacccctgtccaacccacgtcccctcctcctggtccagtcgctcagcccactggaccacagcctcagagcgctggctctacttccggccccgtgccgcagcccgcatgcccccctccggggccagcccctcatccaaccgggccccccggacccattccggtgccagcccccccccagatcgcaactagcactagcctgcttgccgctcagtcactcgtgccaccacctggccttcccgggtcttccactccgggcgtcctgccatactttccccctggcctccctccgcccgacgccggaggggccccacagtcatctatgtcagagtcccccgatgtcaacctggtgacccagcaactcagcaagagtcaagtggaagatcccctgccccctgtcttcagtggtacccctaaaggaagtggagcaggctacggcgtagggttcgacctcgaggagttcttgaatcagtctttcgacatgggcgtagccgatggacctcaagatggccaagccgactctgcttcattgtctgcgagtctcctcgcagactggctcgagggccacggtatgaatcccgctgacattgagtcattacagcgggaaatccagatggacagcccaatgctcctcgccgaccttcctgacctgcaggatccttag

SEQ ID NO: 131571 - DNA, 2451 bp, Artificial Sequence
  derived and/or modified sequence
atggccgagcccctgaaggaggaggacggcgaggacggcagcgccgagcccccaggccctgtgaaggccgaaccggctcacaccgctgcgtccgtcgccgctaagaatctggctctgcttaaagcgagatcatttgacgtgacttttgatgtgggtgatgaatacgagatcatcgaaacaattgggaacggagcctatggtgtggtgagcagtgccagacggcggctgaccggccagcaggtggcaataaaaaagatcccaaatgccttcgatgtggtaaccaatgccaaacgaactttgcgcgagctcaaaatcctgaaacacttcaagcatgataacattatcgcaattaaagatatccttaggccaaccgtgccctacggggagttcaagtcagtctacgtggtcctcgatctgatggagagtgatctgcaccagatcatccattcctcccagcctcttaccttggagcacgtgcgttactttctttatcagctgctgcgaggcctgaaatacatgcactctgctcaggtcattcatcgggatctgaagccgtctaatctgctcgtcaacgaaaactgcgagcttaaaattggggattttggcatggcacgcggactttgtaccagtcccgccgagcaccaatacttcatgaccgaatacgtggccacacggtggtatagagccccagagctgatgctgtctttacacgaatatacccaggcaattgatttgtggtccgtgggttgtatcttcggagaaatgctggcccggcggcaattgttccctgggaaaaattatgtccaccagctgcaattgattatgatggtgctggggacaccttctccggctgttattcaggccgtcggcgctgaaagagtccgcgcttacatacagtctcttccaccgagacaaccagtcccctgggagacggtgtatccgggcgccgaccggcaggcgctatccctcctgggacgcatgctgcgcttcgaacctagcgctagaatttcagcagcggccgccctgagacatccattcctggctaaataccacgatccggatgatgagccggactgtgctcctccttttgattttgcctttgaccgcgaagcactcaccagggaacggattaaggaggctattgtcgctgagattgaagattttcacgcccgcagggaggggattcgtcagcagatccggttccagccttcgttgcagcccgtggccagcgagccaggctgtcctgacgtagaaatgccttccccctgggcccctagtggtgactgtgctatggaaagtcctccgccggctccccccccatgccccggcccagctcctgataccatcgacttaaccctgcaacctcccccgcccgtgtccgaacctgcacctccgaagaaagatggcgccatctcggataacactaaggccgccttgaaggccgccttgcttaaaagcctgcgcagtcgacttcgagacggtccgtcagccccactagaggcacccgaaccaaggaagcctgtgaccgcccaagaacgacaacgtgagcgggaagagaagcggaggagaagacaggagcgggccaaagagcgggagaagaggcggcaggagagggaaaggaaggaacggggagctggcgcatcaggggggccctctaccgaccccttagctggcctagtgctgagcgacaacgacagaagcctgctagagcgatggacacggatggcacggcccgcggccccagcactaacctctgtgccagctccagccccggcccctactccaacccctactccagtgcagcccacctccccacctcctggtccagtggcccaacccacaggaccccaaccacagtcggcgggctctactagcggaccagtgccacagcctgcttgccccccccccggccccgctccacaccctactggcccacccggacctattcccgtgcccgcccctcctcagatcgctacaagcacctcactcttggccgcccagtccttagtgcctccccccggattgccaggatccagtactccaggcgtcctgccatacttccctcccgggctgcctccccccgatgccggaggtgccccacaaagcagtatgtccgagtcgccagacgtcaatctggtgacacagcagttatctaagagtcaggtagaagatcccctgccaccggtcttttctgggaccccaaaagggtcaggagcgggctatggtgtgggctttgatctggaggaatttttaaaccaatcctttgacatgggcgtggctgacggccctcaggacgggcaggccgactctgcctctctatccgcttcactgttagccgattggttggaaggtcatggaatgaatcctgcagatattgaatctcttcaaagggagattcaaatggactcccccatgctgctggctgatctccccgatcttcaggatccttag

SEQ ID NO: 131572 - DNA, 726 bp, Artificial Sequence
  derived and/or modified sequence
atggccgagcccctgaaggaggaggacggcgaggacggcagcgccgaacctccagggcccgttaaggccgagcctgcgcacaccgctgcaagcgtcgccgccaagaacctggctctccttaaagctaggagcttcgacgtgacatttgatgtgggagatgagtatgagattatagaaaccattgggaatggggcctatggcgtcgtttcttcagcacgtcgaaggcttacaggtcagcaggttgcgattaaaaagatcccgaatgccttcgatgtggtaaccaatgcaaagcgaacactacgtgagctcaagatactcaaacactttaagcacgataacatcatcgccattaaggatatcctgcgccccactgttccttacggggagtttaagagcgtgtacgtggtgctggacctgatggaatcagatctccaccagatcatccatagctcccagcccctgacactagagcacgtacgctatttcttataccagctgttacgcgggttgaaatacatgcactccgctcaggtgattcaccgggacctgaagccgagcaatctgttagtgaacgaaaactgtgaattgaaaataggagacttcggcatggccaggggactgtgcacctctcccgccgaacatcagtattttatgactgaatatgttgcgacaagatggtatagggcccccgagctgatgttaagcctgcacgagtatactcaatag

SEQ ID NO: 131573 - DNA, 2451 bp, Artificial Sequence
  derived and/or modified sequence
atggctgaacctctgaaggaggaggatggggaagacggatctgcggagccccctggcccagtgaaagcggagccagcacataccgccgctagtgtggccgctaagaatctcgctctcctgaaggcgaggtcatttgacgtgaccttcgatgtgggggacgagtatgagattatagagaccatcgggaacggggcatacggcgtcgtgtcaagcgctcggaggcgactgaccggacaacaggtggctatcaagaagattccaaacgcgtttgatgttgtaacaaacgcgaaaaggacactgagagagcttaaaatactgaagcactttaagcacgacaatatcatcgctattaaagatattttgcgacccaccgtaccgtatggcgagttcaagtcagtgtatgtggtcctggaccttatggaatccgatctgcatcagatcatccattcttcccaacctttaactttagagcatgtacgatactttttgtatcagttgttacgtggactgaaatacatgcattctgctcaggtcatacaccgggaccttaaaccttccaacctgctcgttaacgagaactgcgaacttaagattggcgactttggcatggccaggggtctgtgcacctcacctgccgagcaccagtatttcatgaccgagtatgtggccacccgatggtacagagctcccgagctgatgttgagtttgcatgagtacacacaagccattgacctgtggtccgttggatgcatctttggagaaatgctggcccgaagacagcttttcccgggaaagaactatgtgcatcagttacagctgattatgatggtcctgggcacaccttctcccgctgtcattcaggctgtgggggctgaaagagtgcgggcatatatccagagccttccccctcgacaaccggtgccatgggagacagtatatcctggcgctgatagacaggctttatccctgctcggacgcatgctgaggtttgaaccctcagcgaggatcagcgcggctgccgctctccggcatccatttctagctaagtaccacgatccagatgatgagcctgactgtgcccctccgttcgactttgctttcgaccgcgaggccctgacccgagagcggatcaaggaagcgattgtcgccgaaatagaagattttcatgccagacgcgagggcataaggcaacagattaggttccagccttcccttcagcccgtggcgagtgagccagggtgtcctgatgtcgagatgcccagcccctgggcgccttcaggggattgtgctatggagagccctcctcccgcacccccaccttgtccagggcctgcccctgacaccatcgacttgacactgcagccccctcctccagtctccgaaccagcccctcctaagaaagatggcgcaatctctgataatacaaaggccgcactgaaggctgctcttctgaagtctctaaggagtaggttgcgagatggtccttctgctcctctcgaggctcccgaacctaggaaacctgtaacagcacaggaacggcaaagagagcgggaagaaaagaggcgcaggaggcaggagagggctaaggagcgcgagaaacgacgccaggaacgggaacgaaaagagagaggtgccggagcctccgggggtcccagcactgatccactggcgggactggttctgtcagacaacgatcggagtctacttgagcggtggactagaatggcccgacccgcagccccagcccttacttctgtacccgcaccagctccagccccaacccccaccccgaccccagtgcaacctacgtccccacccccaggacccgtcgcccagccaaccgggcctcagccacagagcgctggcagtacctctggccctgtaccccagcctgcatgcccaccccctggacctgcgccacacccgaccggtcccccaggacctattcccgtgccggctcctccgcagattgcaacaagcacctccctgctcgccgctcagagcctggttccccctccgggactgcccggatcatccaccccgggtgtcttaccatatttccctcccggtctgccacccccagatgccggaggcgctccccagtccagtatgtctgagtctccagatgtgaatctagttacgcagcagctgtcaaagagccaagtcgaggatcctcttcccccagtgttttcgggtacccctaaggggtccggagcgggttatggagttggattcgacctggaagaatttctgaaccaatcatttgacatgggggtagcagatgggccacaggacggccaggctgactccgcttccctctctgcatcccttcttgctgattggctggaggggcatggcatgaatccagcagatatcgagagcctgcagcgtgagatacagatggactcccccatgcttttggcagacttgcccgatttgcaggacccatag

SEQ ID NO: 131574 - DNA, 2451 bp, Artificial Sequence
  derived and/or modified sequence
atggctgagccactcaaggaagaagacggcgaggatgggtctgcggaacccccaggcccagtaaaagccgaaccagctcatacggcggcatcagtagccgcaaagaatttggcgcttctgaaggccaggtccttcgacgtgacctttgacgttggggatgaatacgagatcattgaaacgattgggaacggggcttacggtgtggtcagttctgctcgcagacgcctgaccggacagcaggttgccatcaaaaaaatccccaacgctttcgatgtcgttaccaatgcaaaacgtaccctgcgggagttaaagattctcaagcactttaaacacgataatatcatagctattaaggatatcctgaggccaacagtcccctacggcgagtttaaaagcgtgtatgtggttcttgatttgatggagtcagatctccatcaaatcattcactccagtcagccccttactctggaacatgtacgctatttcttataccagttgctgagaggtctcaagtacatgcattcagcccaggtcattcatcgggaccttaagccttcaaacttgctggtgaacgagaactgtgaactcaaaatcggcgacttcggtatggctagggggctttgcacttcccctgctgaacatcaatactttatgaccgaatacgtggcgacaagatggtatcgcgctcctgaactgatgctttcactacacgaatacacacaggctatcgatctctggagcgttggatgcatcttcggggagatgctggcccgacgacagcttttccctggcaagaattacgttcaccaattgcaactgataatgatggtgttgggcacaccatcccccgcagtgatacaagctgtgggtgccgaacgggttcgtgcatatattcaaagcttacccccaagacaacccgtaccctgggagacagtatatccaggagccgataggcaggctcttagcttgctgggcaggatgctgcgtttcgagccctctgcacgaataagtgcggctgccgctctgaggcacccgttcctggccaagtatcatgaccccgacgacgagcctgactgcgctccaccttttgacttcgcctttgatcgggaggctttgacgcgagaacgcattaaggaagctattgtggccgagatagaggactttcatgcccgacgggagggcatccgccaacaaatcagatttcagcctagcctgcagccagtggccagcgaaccagggtgtcctgacgtcgagatgccctcaccatgggccccatccggcgactgcgctatggagtccccaccgcctgcaccacccccttgtcctggacccgctcccgatacgatcgacttaactttacagccacctccccctgtttccgaacccgcacctcccaaaaaagatggggcaatctcggacaacacaaaagccgcactgaaggccgctctgcttaagagcctgagaagcagactgcgggatggaccctccgcacccctagaggcccctgagccgcgaaaacctgtcacagcgcaagagcgtcagagggagcgggaagaaaaaagacgacggaggcaagagcgggctaaagagcgagaaaagaggcgtcaggaacgagagaggaaagagcgaggtgctggagcctcagggggaccgtcaacggatcctctggccggattggtgttatccgacaacgatcgttctctgcttgagagatggactcggatggctcggccagctgcacccgctctgactagtgtacctgcgccagctcccgctcccactcccacgcctacgcctgttcagccaacgtccccccctcctggtcctgttgctcagccaacagggccacagccacagtcggcaggatcaacaagcgggcctgtcccccagcctgcctgtcccccacccggtccggctcctcacccaactgggcctcctggaccaattccagtgccagctccccctcaaattgcaacctctacttcattgctggccgctcagtctctagtccctcccccaggactccctgggagctccactcctggggtgctgccctacttccctcccggactcccgccaccagacgcagggggagcgccacagagttctatgtctgaaagccccgatgtgaacctggtcactcaacagctgtctaaaagtcaagtagaggacccactcccaccagtgtttagcggcaccccaaagggcagcggggctggttacggcgtcggctttgaccttgaggaatttctgaatcagagcttcgacatgggcgtggccgacggcccacaagacggccaggccgatagcgccagtctgtcagccagtctgctggccgactggctggagggacacgggatgaacccggcagatatagagtcgctccaaagggagatccagatggattcccctatgctccttgcagacctgcctgacctgcaggatccgtag

SEQ ID NO: 131575 - DNA, 2451 bp, Artificial Sequence
  derived and/or modified sequence
atggctgaaccattaaaagaggaggatggcgaagacggatctgcagaaccacctggtcccgttaaggctgagcctgcacataccgccgcttctgtcgcggctaaaaatctggctttgctcaaggctcggtccttcgacgtgaccttcgatgttggcgatgagtatgagatcatcgagaccatcggtaacggtgcttacggcgtggtgagcagcgcgaggcggagattaacgggccagcaagtggcaatcaaaaagattccgaacgccttcgacgtagtcacaaatgcaaagcgcacactgagggagttaaaaatcctgaagcatttcaaacatgataatattattgccatcaaggatatcttgcgcccaacagtgccctatggagaatttaagtccgtgtacgtcgtcttagatcttatggaatcagacctgcatcaaatcatccattcatcacagccgcttaccctcgagcacgttaggtacttcctctaccaactacttcgcggactaaagtacatgcactccgcacaagtcatccatagagacctcaaaccatccaatctgctagtcaacgagaactgcgagctgaaaatcggtgactttggaatggctagaggcctgtgcaccagtccggcagaacaccagtatttcatgacggagtatgttgccacccgctggtaccgggctccggaacttatgctgtctctgcacgaatatacacaggcaatagatctgtggagtgtcgggtgcatattcggagaaatgcttgcacgcagacagcttttcccgggaaaaaactacgtccaccaactgcagctgataatgatggtcctgggcactccctcccccgcagtgattcaggcagtgggcgctgaacgagtgcgcgcttatatacagtctctgccacccagacaaccggttccttgggaaactgtataccctggagctgataggcaggcactgtccctgctcggcaggatgctgcgctttgaaccatccgcgcgaatatccgcagcggcagcactgcgacacccgtttctagcgaagtatcatgatcccgacgatgaaccagactgcgcacccccatttgattttgcatttgaccgggaagcactgacacgggaaaggatcaaggaggcaattgtggccgagatcgaggacttccacgccagaagggaaggtatccgacagcaaattcgctttcagccttccctacagcctgtcgctagcgagcccggatgcccggatgtcgagatgccttctccttgggcaccaagcggggactgcgcaatggaaagtcccccacccgctccaccgccttgtcccggacccgctcctgacacgatcgacctaaccctgcagccaccgcctccagtttccgagcccgcacctcccaaaaaagatggcgctatatctgacaatacaaaggctgcactgaaagctgctttactgaagtcccttcgctcccgcttgcgggacggccctagcgcgcctctcgaggcccctgaaccccgaaaaccggtcactgctcaggaacgccagagggagcgggaagaaaagagacggagacggcaggaacgggcaaaggaacgagagaaacgccgacaagaaagagagcgtaaggagcgtggcgctggtgcctctggtgggccatcgacagaccctttggcaggcctggtactctctgacaacgatagatcactcctcgagcgatggactcggatggctcggcctgcagcccctgccctcacatctgtgccagctccagcccctgctcccactccaactccaacacccgtccaaccaaccagccccccacccggaccagtagcccaaccaacgggtccccagcctcagtccgccggatcgacttctggtccagtgccccagccggcttgcccacccccaggcccagcaccccatccaaccggccctccgggacccattcctgttcccgcacctccgcaaatagcaactagcacatcactactggccgctcagtcattggtaccccctcccggactgcctgggtcatcaacccccggtgtgctgccatactttccaccaggccttcccccaccagacgcaggcggagccccacagagttcaatgtccgagtcccctgatgttaacctcgtcacccagcagttaagcaaatctcaggtcgaagatcctcttccccctgttttctccggtactcctaagggctctggagcagggtatggggtggggttcgatctcgaggagttcctgaaccagtcctttgatatgggtgttgcagacgggccacaggacggccaggctgacagcgcatctctgtctgcttcgctgctagctgactggttggaaggccatgggatgaaccctgcagatatcgaatcacttcagcgggaaatccaaatggactcaccaatgcttttggctgacctgcctgaccttcaggacccgtag

SEQ ID NO: 131576 - DNA, 726 bp, Artificial Sequence
  derived and/or modified sequence
atggccgagccgttgaaagaggaagacggtgaggacggtagcgccgagccgccaggtcccgtcaaagcagagcccgctcacaccgccgcttccgtggccgctaagaacctcgctctccttaaagcccgatcatttgatgtgacatttgacgtgggagatgaatatgagatcattgagactatagggaacggggcatacggagttgtgtcctccgccaggcggcgacttacaggccagcaggtggctattaagaagattcctaatgccttcgacgtggtcactaacgcaaaacgcacactgagggaactgaagatcttaaaacacttcaagcacgacaatataatagccatcaaagacatactcaggcccacagttccgtacggcgaattcaagagtgtttacgtagtgctagatctgatggaatccgacctgcaccagatcatccactcctctcagcctctcaccttagaacacgtgagatattttttgtaccagctgctccgcggactgaaatatatgcatagtgctcaggtgatccatcgggatctgaaaccttcgaacttgcttgtgaatgagaattgtgaactgaagataggcgacttcggaatggctcgcggactatgtacgtcgcccgctgaacatcaatacttcatgaccgagtatgtggccactcggtggtatcgagcccctgaactcatgctcagtctccatgaatacactcagtag

SEQ ID NO: 131577 - DNA, 2451 bp, Artificial Sequence
  derived and/or modified sequence
atggccgagcccctgaaggaggaggacggcgaggacggcagcgccgagccccccggccccgtgaaggccgagcccgcccacaccgccgccagcgtggccgccaagaacctggccctgctgaaggccagaagcttcgacgtgaccttcgacgtgggcgacgagtacgagatcatcgagaccatcggcaacggcgcctacggcgtggtgagcagcgccagaagaagactgaccggccagcaggtggccatcaagaagatccccaacgccttcgacgtggtgaccaacgccaagagaaccctgagagagctgaagatcctgaagcacttcaagcacgacaacatcatcgccatcaaggacatcctgagacccaccgtgccctacggcgagttcaagagcgtgtacgtggtgctggacctgatggagagcgacctgcaccagatcatccacagcagccagcccctgaccctggagcacgtgagatacttcctgtaccagctgctgagaggcctgaagtacatgcacagcgcccaggtgatccacagagacctgaagcccagcaacctgctggtgaacgagaactgcgagctgaagatcggcgacttcggcatggccagaggcctgtgcaccagccccgccgagcaccagtacttcatgaccgagtacgtggccaccagatggtacagagcccccgagctgatgctgagcctgcacgagtacacccaggccatcgacctgtggagcgtgggctgcatcttcggcgagatgctggccagaagacagctgttccccggcaagaactacgtgcaccagctgcagctgatcatgatggtgctgggcacccccagccccgccgtgatccaggccgtgggcgccgagagagtgagagcctacatccagagcctgccccccagacagcccgtgccctgggagaccgtgtaccccggcgccgacagacaggccctgagcctgctgggcagaatgctgagattcgagcccagcgccagaatcagcgccgccgccgccctgagacaccccttcctggccaagtaccacgaccccgacgacgagcccgactgcgccccccccttcgacttcgccttcgacagagaggccctgaccagagagagaatcaaggaggccatcgtggccgagatcgaggacttccacgccagaagagagggcatcagacagcagatcagattccagcccagcctgcagcccgtggccagcgagcccggctgccccgacgtggagatgcccagcccctgggcccccagcggcgactgcgccatggagagccccccccccgccccccccccctgccccggccccgcccccgacaccatcgacctgaccctgcagccccccccccccgtgagcgagcccgccccccccaagaaggacggcgccatcagcgacaacaccaaggccgccctgaaggccgccctgctgaagagcctgagaagcagactgagagacggccccagcgcccccctggaggcccccgagcccagaaagcccgtgaccgcccaggagagacagagagagagagaggagaagagaagaagaagacaggagagagccaaggagagagagaagagaagacaggagagagagagaaaggagagaggcgccggcgccagcggcggccccagcaccgaccccctggccggcctggtgctgagcgacaacgacagaagcctgctggagagatggaccagaatggccagacccgccgcccccgccctgaccagcgtgcccgcccccgcccccgcccccacccccacccccacccccgtgcagcccaccagccccccccccggccccgtggcccagcccaccggcccccagccccagagcgccggcagcaccagcggccccgtgccccagcccgcctgccccccccccggccccgccccccaccccaccggcccccccggccccatccccgtgcccgcccccccccagatcgccaccagcaccagcctgctggccgcccagagcctggtgcccccccccggcctgcccggcagcagcacccccggcgtgctgccctacttcccccccggcctgcccccccccgacgccggcggcgccccccagagcagcatgagcgagagccccgacgtgaacctggtgacccagcagctgagcaagagccaggtggaggaccccctgccccccgtgttcagcggcacccccaagggcagcggcgccggctacggcgtgggcttcgacctggaggagttcctgaaccagagcttcgacatgggcgtggccgacggcccccaggacggccaggccgacagcgccagcctgagcgccagcctgctggccgactggctggagggccacggcatgaaccccgccgacatcgagagcctgcagagagagatccagatggacagccccatgctgctggccgacctgcccgacctgcaggacccctag

SEQ ID NO: 131578 - DNA, 726 bp, Artificial Sequence
  derived and/or modified sequence
atggccgagcccctgaaggaggaggacggcgaggacggcagcgccgagccccccggccccgtgaaggccgagcccgcccacaccgccgccagcgtggccgccaagaacctggccctgctgaaggccagaagcttcgacgtgaccttcgacgtgggcgacgagtacgagatcatcgagaccatcggcaacggcgcctacggcgtggtgagcagcgccagaagaagactgaccggccagcaggtggccatcaagaagatccccaacgccttcgacgtggtgaccaacgccaagagaaccctgagagagctgaagatcctgaagcacttcaagcacgacaacatcatcgccatcaaggacatcctgagacccaccgtgccctacggcgagttcaagagcgtgtacgtggtgctggacctgatggagagcgacctgcaccagatcatccacagcagccagcccctgaccctggagcacgtgagatacttcctgtaccagctgctgagaggcctgaagtacatgcacagcgcccaggtgatccacagagacctgaagcccagcaacctgctggtgaacgagaactgcgagctgaagatcggcgacttcggcatggccagaggcctgtgcaccagccccgccgagcaccagtacttcatgaccgagtacgtggccaccagatggtacagagcccccgagctgatgctgagcctgcacgagtacacccagtag

SEQ ID NO: 131579 - protein, 364 aa, Artificial Sequence
  derived and/or modified sequence
MSGPRAGFYRQELNKTVWEVPQRLQGLRPVGSGAYGSVCSAYDARLRQKVAVKKLSRPFQSLIHARRTYRELRLLKHLKHENVIGLLDVFTPATSIEDFSEVYLVTTLMGADLNNIVKCQALSDEHVQFLVYQLLRGLKYIHSAGIIHRDLKPSNVAVNEDCELRILDFGLARQADEEMTGYVATRWYRAPEIMLNWMHYNQTVDIWSVGCIMAELLQGKALFPGSDYIDQLKRIMEVVGTPSPEVLAKISSEHARTYIQSLPPMPQKDLSSIFRGANPLAIDLLGRMLVLDSDQRVSAAEALAHAYFSQYHDPEDEPEAEPYDESVEAKERTLEEWKELTYQEVLSFKPPEPPKPPGSLEIEQ

SEQ ID NO: 131580 - protein, 213 aa, Artificial Sequence
  derived and/or modified sequence
MGADLNNIVKCQALSDEHVQFLVYQLLRGLKYIHSAGIIHRDLKPSNVAVNEDCELRILDFGLARQADEEMTGYVATRWYRAPEIMLNWMHYNQTGAGGRPWGDEGQGPRLALDWLCMPGLRGQARSPRMWDPHSKVALQRPLEHDGCWPPLAVQLWTSPCLGGLGMAEEGVCPSWGLDVTVGLLEEGRGVGTLMEVPSPSHSGYLVRGLHHG

SEQ ID NO: 131581 - DNA, 1095 bp, Artificial Sequence
  derived and/or modified sequence
atgagcggccccagagccggcttctacagacaggagctgaacaagaccgtgtgggaggtgccccagagactgcagggcctgagacccgtgggcagcggcgcctacggcagcgtgtgcagcgcctacgacgccagactgagacagaaggtggccgtgaagaagctgagcagacccttccagagcctgatccacgccagaagaacctacagagagctgagactgctgaagcacctgaagcacgagaacgtgatcggcctgctggacgtgttcacccccgccaccagcatcgaggacttcagcgaggtgtacctggtgaccaccctgatgggcgccgacctgaacaacatcgtgaagtgccaggccctgagcgacgagcacgtgcagttcctggtgtaccagctgctgagaggcctgaagtacatccacagcgccggcatcatccacagagacctgaagcccagcaacgtggccgtgaacgaggactgcgagctgagaatcctggacttcggcctggccagacaggccgacgaggagatgaccggctacgtggccaccagatggtacagagcccccgagatcatgctgaactggatgcactacaaccagaccgtggacatctggagcgtgggctgcatcatggccgagctgctgcagggcaaggccctgttccccggcagcgactacatcgaccagctgaagagaatcatggaggtggtgggcacccccagccccgaggtgctggccaagatcagcagcgagcacgccagaacctacatccagagcctgccccccatgccccagaaggacctgagcagcatcttcagaggcgccaaccccctggccatcgacctgctgggcagaatgctggtgctggacagcgaccagagagtgagcgccgccgaggccctggcccacgcctacttcagccagtaccacgaccccgaggacgagcccgaggccgagccctacgacgagagcgtggaggccaaggagagaaccctggaggagtggaaggagctgacctaccaggaggtgctgagcttcaagccccccgagccccccaagccccccggcagcctggagatcgagcagtag

SEQ ID NO: 131582 - DNA, 1095 bp, Artificial Sequence
  derived and/or modified sequence
atgagcggaccaagggcgggattttacagacaggaactgaacaagacagtgtgggaggtgccccagcgtctgcaaggtctcaggccggtagggtctggagcatatggctctgtgtgttcagcttacgacgctcggctcaggcaaaaggtagccgtgaagaagctgagcagaccatttcagagtctgatacacgctagacgtacttatcgcgaactgcgtctcctgaagcacctcaagcacgagaatgttatcggcctcctagacgtgtttaccccagcgacctccattgaagacttctccgaggtttacttagtcacaacactgatgggcgcggatctaaacaacattgttaaatgtcaggcactgtctgatgaacacgtacagttcctggtttatcagcttctgcgtggtttgaaatatatccatagtgccggcatcattcatagagacctgaagccgagcaacgttgcagttaatgaggactgcgagttacgcatcctggactttggcctcgctcggcaggcggacgaggaaatgactggctacgttgccacacggtggtatcgcgccccagagatcatgctgaactggatgcactataaccaaacagtggatatttggagcgttggttgtatcatggccgaattactgcaagggaaggccctgtttccaggatccgactatatcgaccagctgaagagaattatggaagtcgtcggtaccccttcccccgaagtgctggccaaaatatcttctgaacacgcccgcacttatattcaatctctgccgccgatgccccagaaggacctgtccagtattttcaggggggcaaatccacttgcaatagacttgctcgggcgtatgctagtgttggactcagatcagagggtttctgccgcagaagcccttgcccatgcctatttctcccagtaccatgatcccgaagatgaaccagaggcagaaccgtatgatgaatcagtggaagccaaggagcgcacactggaggaatggaaggagctaacatatcaagaagtacttagctttaagccacccgagccacccaaaccacccggctctttagaaatcgaacagtag

SEQ ID NO: 131583 - DNA, 1095 bp, Artificial Sequence
  derived and/or modified sequence
atgagcggtccacgcgctggcttctacaggcaggagctaaataagactgtgtgggaagtgccgcaacgcctgcagggtctcaggccagtgggcagcggggcttacggcagcgtttgtagcgcctatgacgcacggcttagacagaaagttgcggtgaagaagctgtctcgaccattccagtccctcatccacgcacggcggacataccgggaattgaggctgctgaaacatctgaaacacgagaatgttattggattgctggacgtgtttacacctgcaacttcaatcgaggacttcagcgaagtgtatcttgtgaccacactgatgggagcagacctgaacaatatcgtgaagtgtcaggcccttagtgacgagcatgtgcagtttctggtgtatcagcttcttcggggactgaaatacatccattctgctggaatcattcaccgtgacctaaagccctctaatgtcgcagtgaacgaagattgcgagcttagaattttggatttcggtcttgccaggcaagccgacgaggaaatgactggttatgtagctactaggtggtatagggcccctgagatcatgctgaactggatgcactacaatcaaaccgtggacatttggtccgtgggatgtattatggccgagctgctgcaaggcaaagctctgtttccaggctccgactatattgaccagctgaaacgcattatggaagtagtgggaacacctagccctgaggtgctggcgaaaatatccagcgaacacgcacgcacctatatccagtctttaccacctatgccacagaaggatctttctagtatttttcggggtgccaacccccttgccatagacctcctgggcaggatgctcgtcttggattctgaccagagggtgtccgccgcggaggccctggcacacgcctatttctcacagtaccatgatccagaggacgagcctgaagccgagccctatgatgagtctgtcgaggccaaagagaggaccttagaggagtggaaagaactgacctatcaggaagttctgtcctttaaaccgcctgagccccctaaaccaccaggaagcctggagattgagcaatag

SEQ ID NO: 131584 - DNA, 1095 bp, Artificial Sequence
  derived and/or modified sequence
atgagcggcccccgggccggcttctaccggcaggagctgaacaagacagtgtgggaggtgccccagaggctgcagggcctgcggcctgtgggcagcggggcctacggctctgtgtgcagcgcctatgatgcccggctgcggcagaaggtggccgtgaagaagctgagccggcccttccagagcctcatccacgcccggaggacctaccgggagctgcggctgctgaagcacctgaagcatgaaaatgtcatcggcctgctggatgtgttcaccccagccaccagcattgaggacttcagcgaggtgtacctggtgaccaccctgatgggcgctgacctgaacaacatcgtgaagtgccaggccctgagtgatgagcacgtgcagttcctggtgtaccagctgctgcggggcctgaagtacatccacagcgctggcatcatccaccgggacctgaagcccagcaatgtggccgtgaatgaagactgtgagctgcgcatcctggactttggcctggcccggcaggctgatgaggagatgacaggctacgtggccacccgctggtaccgggcccctgagatcatgctgaactggatgcactacaaccagacagtggacatctggagcgtgggctgcatcatggccgagctgctgcagggcaaggccctcttccctggcagtgactacatcgaccagctgaagaggatcatggaggtggtgggcacccccagccctgaggtgctggccaagatcagcagcgagcacgcccggacctacatccagagcctgccccccatgccccagaaggacctgagcagcatcttccggggggccaaccccctggccatcgacctgctgggccgcatgctggtgctggacagcgaccagagggtgtctgctgctgaggccctggcccacgcctacttcagccagtaccatgaccctgaagatgagcctgaggccgagccctatgatgagagcgtggaggccaaggagaggaccctggaggagtggaaggagctgacctaccaggaggtgctgtccttcaagcccccagagccccccaagcccccaggcagcctggagattgagcagtag

SEQ ID NO: 131585 - DNA, 2431 bp, Artificial Sequence
  derived and/or modified sequence
cgccgcctccgccgccctccgctccgctcggctcgggctcggctcgggcgcgggcgcggggcgcggggctgggcccgggcggagcggcggctgctccggacatgtcgggccctcgcgccggcttctaccggcaggagctgaacaagaccgtgtgggaggtgccgcagcggctgcaggggctgcgcccggtgggctccggcgcctacggctccgtctgttcggcctacgacgcccggctgcgccagaaggtggcggtgaagaagctgtcgcgccccttccagtcgctgatccacgcgcgcagaacgtaccgggagctgcggctgctcaagcacctgaagcacgagaacgtcatcgggcttctggacgtcttcacgccggccacgtccatcgaggacttcagcgaagtgtacttggtgaccaccctgatgggcgccgacctgaacaacatcgtcaagtgccaggcgctgagcgacgagcacgttcaattcctggtttaccagctgctgcgcgggctgaagtacatccactcggccgggatcatccaccgggacctgaagcccagcaacgtggctgtgaacgaggactgtgagctcaggatcctggattttgggctggcgcgccaggcggacgaggagatgaccggctatgtggccacgcgctggtaccgggcacctgagatcatgctcaactggatgcattacaaccaaacagtggatatctggtccgtgggctgcatcatggctgagctgctccagggcaaggccctcttcccgggaagcgactacattgaccagctgaagcgcatcatggaagtggtgggcacacccagccctgaggttctggcaaaaatctcctcagaacacgcccggacatatatccagtccctgccccccatgccccagaaggacctgagcagcatcttccgtggagccaaccccctggccatagacctccttggaaggatgctggtgctggacagtgaccagagggtcagtgcagctgaggcactggcccacgcctacttcagccagtaccacgaccccgaggatgagccagaggccgagccatatgatgagagcgttgaggccaaggagcgcacgctggaggagtggaaggagctcacttaccaggaagtcctcagcttcaagcccccagagccaccgaagccacctggcagcctggagattgagcagtgaggtgctgcccagcagcccctgagagcctgtggaggggcttgggcctgcacccttccacagctggcctggtttcctcgagaggcacctcccacactcctatggtcacagacttctggcctaggacccctcgccttcaggagaatctacacgcatgtatgcatgcacaaacatgtgtgtacatgtgcttgccatgtgtaggagtctgggcacaagtgtccctgggcctaccttggtcctcctgtcctcttctggctactgcactctccactgggacctgactgtggggtcctagatgccaaaggggttcccctgcggagttcccctgtctgtcccaggccgacccaagggagtgtcagccttgggctctcttctgtcccagggctttctggaggacgcgctggggccgggaccccgggagactcaaagggagaggtctcagtggttagagctgctcagcctggaggtagggggctgtcttggtcactgctgagacccacaggtctaagaggagaggcagagccagtgtgccaccaggctgggcagggacaaccaccaggtgtcaaatgagaaaagctgcctggagtcttgtgttcacccgtgggtgtgtgtgggcacgtgtggatgagcgtgcactccccgtgttcatatgtcagggcacatgtgatgtggtgcgtgtgaatctgtgggcgcccaaggccagcagccatatctggcaagaagctggagccggggtgggtgtgctgttgccttccctctcctcggttcctgatgccttgaggggtgtttcagactggcggctccagtgggccaaagggcaaccacatgagcatgggcaggggctttctccttggatgtgggacccacagcagcttcctgaggctgggggtgggtgggtgggtggtttggccttgaggacgctagggcaggcagcacacctggatgtggacttggactcggacacttctgccctgcaccctggcccgctctctacctctgcccaccgttgtggccctgcagccggagatctgaggtgctctggtctgtgggtcagtcctctttccttgtcccaggatggagctgatccagtaacctcggagacgggaccctgcccagagctgagttgggggtgtggctctgccctggaaagggggtgacctcttgcctcgaggggcccagggaagcctgggtgtcaagtgcctgcaccaggggtgcacaataaagggggttctctctca

SEQ ID NO: 131586 - DNA, 1512 bp, Artificial Sequence
  derived and/or modified sequence
cgccgcctccgccgccctccgctccgctcggctcgggctcggctcgggcgcgggcgcggggcgcggggctgggcccgggcggagcggcggctgctccggacatgtcgggccctcgcgccggcttctaccggcaggagctgaacaagaccgtgtgggaggtgccgcagcggctgcaggggctgcgcccggtgggctccggcgcctacggctccgtctgttcggcctacgacgcccggctgcgccagaaggtggcggtgaagaagctgtcgcgccccttccagtcgctgatccacgcgcgcagaacgtaccgggagctgcggctgctcaagcacctgaagcacgagaacgtcatcgggcttctggacgtcttcacgccggccacgtccatcgaggacttcagcgaagtgtacttggtgaccaccctgatgggcgccgacctgaacaacatcgtcaagtgccaggcgctgagcgacgagcacgttcaattcctggtttaccagctgctgcgcgggctgaagtacatccactcggccgggatcatccaccgggacctgaagcccagcaacgtggctgtgaacgaggactgtgagctcaggatcctggattttgggctggcgcgccaggcggacgaggagatgaccggctatgtggccacgcgctggtaccgggcacctgagatcatgctcaactggatgcattacaaccaaacagtggatatctggtccgtgggctgcatcatggctgagctgctccagggcaaggccctcttcccgggaagcgactacattgaccagctgaagcgcatcatggaagtggtgggcacacccagccctgaggttctggcaaaaatctcctcagaacacgcccggacatatatccagtccctgccccccatgccccagaaggacctgagcagcatcttccgtggagccaaccccctggccatagacctccttggaaggatgctggtgctggacagtgaccagagggtcagtgcagctgaggcactggcccacgcctacttcagccagtaccacgaccccgaggatgagccagaggccgagccatatgatgagagcgttgaggccaaggagcgcacgctggaggagtggaaggagctcacttaccaggaagtcctcagcttcaagcccccagagccaccgaagccacctggcagcctggagattgagcagtgaggtgctgcccagcagcccctgagagcctgtggaggggcttgggcctgcacccttccacagctggcctggtttcctcgagaggcacctcccacactcctatggtcacagacttctggcctaggacccctcgccttcaggagaatctacacgcatgatggagctgatccagtaacctcggagacgggaccctgcccagagctgagttgggggtgtggctctgccctggaaagggggtgacctcttgcctcgaggggcccagggaagcctgggtgtcaagtgcctgcaccaggggtgcacaataaagggggttctctct

SEQ ID NO: 131587 - DNA, 1408 bp, Artificial Sequence
  derived and/or modified sequence
ggctcgggctcggctcgggcgcgggcgcggggcgcggggctgggcccgggcggagcggcggctgctccggacatgtcgggccctcgcgccggcttctaccggcaggagctgaacaagaccgtgtgggaggtgccgcagcggctgcaggggctgcgcccggtgggctccggcgcctacggctccgtctgttcggcctacgacgcccggctgcgccagaaggtggcggtgaagaagctgtcgcgccccttccagtcgctgatccacgcgcgcagaacgtaccgggagctgcggctgctcaagcacctgaagcacgagaacgtacttggtgaccaccctgatgggcgccgacctgaacaacatcgtcaagtgccaggcgctgagcgacgagcacgttcaattcctggtttaccagctgctgcgcgggctgaagtacatccactcggccgggatcatccaccgggacctgaagcccagcaacgtggctgtgaacgaggactgtgagctcaggatcctggattttgggctggcgcgccaggcggacgaggagatgaccggctatgtggccacgcgctggtaccgggcacctgagatcatgctcaactggatgcattacaaccaaacaggtgcagggggaaggccttggggggacgaaggccaagggcctcgtctggccctcgactggctctgcatgccaggtcttagggggcaggcaaggtccccaagaatgtgggacccacattcaaaagtagcccttcagaggccgctagagcatgatgggtgctggcctcctctggctgtgcagctatggacctccccctgcctaggggggttgggtatggcagaggagggggtctgcccatcttggggtctggatgtgactgtgggtctcctggaggagggacgtggggtgggcacactgatggaggtcccctcgccctcgcacagtggatatctggtccgtgggctgcatcatggctgagctgctccagggcaaggccctcttcccgggaagcgactgtatccttggcccaggttggggagcagggtcaaacagggcccctcctgtagggtagggaccagcgctggccccttctggcgggtcttgcctcctctgccccccatgctatgctactttgggctggccatcctcacctataggagagcgggctctgggcagcgccccaaagttttgggtctgggggcccaggaggggtctgtggctggcccgtgggtgtttcctgagtgacacagacattgaccagctgaagcgcatcatggaagtggtgggcacacccagccctgaggttctggcaaaaatctcctcagaacacgtgagttggtgcccgccagccagcagctccctctcctggctgagcccccaggctctctgggggagagggtggtgtgg

SEQ ID NO: 131588 - DNA, 1095 bp, Artificial Sequence
  derived and/or modified sequence
atgagcggcccccgggccggcttctaccggcaggagctgaacaagaccgtgtgggaggtgccccaaaggttgcaaggacttaggcccgtagggtctggggcctatgggtccgtctgctcagcctacgatgctcgtctgagacagaaggtggccgtcaagaagttgagcagacctttccagtcccttattcacgcccgaaggacttatcgtgagttaagactccttaagcacttgaagcacgagaatgttatcggcctgctggatgtgtttactcctgctacatctatcgaggatttcagtgaggtctacttagtgactactctcatgggcgccgatctgaacaacattgtgaagtgccaagctctgagtgacgagcacgttcagtttctcgtctaccagctgttgcggggactgaagtacatccactcagctggaataattcacagagacttgaagccctctaatgtggcggtgaacgaggattgtgaacttcggattttggattttggcctggctaggcaggccgatgaggagatgactggatatgtcgccactcgctggtaccgagctccggaaattatgctgaattggatgcactacaatcaaaccgtcgatatctggtccgtgggttgcattatggcagagctgctgcagggcaaggctctgttccccgggagcgattacatcgatcagttaaagcggattatggaagtggtgggaaccccttcccccgaggtactggcaaaaatctcttcagagcacgcacgaacatacatacagtctctgcctcctatgccacagaaggacctttcctctatcttccggggggcaaatccactggcaatagatttgctggggagaatgctcgttctcgactcagatcagagggtgagcgccgcagaggccctcgctcacgcttatttctcccaataccacgacccagaagacgagccagaagcggagccctatgacgagtctgtggaagctaaggagcggacactggaagagtggaaagagttaacctatcaggaagtgctgagctttaaaccccccgagccgccaaaaccccccggaagtctcgaaattgagcagtag

SEQ ID NO: 131589 - DNA, 1095 bp, Artificial Sequence
  derived and/or modified sequence
atgagcggcccccgggccggcttctaccggcaggagctgaacaagacagtgtgggaggtaccccagagactccaggggcttaggccagtgggctccggcgcttacgggtctgtctgttctgcctacgatgcaaggctcaggcagaaggttgcagttaagaaactgtcacggcctttccagtcgctgatccacgcgcgaagaacgtaccgggagctgaggttgctgaagcatctgaaacacgagaatgttattggacttctggatgtgtttacccccgccacttccattgaagacttttcagaggtgtacctggttactacacttatgggtgccgacctcaacaacatagtgaaatgccaggcccttagcgatgagcatgttcagtttctggtataccagttgctcaggggtctgaagtacattcattcagccggcattatccatcgtgacctaaaaccctctaacgtggccgtcaacgaggattgtgagcttcgaatactggacttcggcttggcaagacaagcagacgaggaaatgactggatacgtggccactcggtggtaccgtgcccccgaaattatgcttaattggatgcattataaccaaacagtggacatttggtcagtcgggtgcatcatggccgaactgctccagggcaaggctctatttccagggtctgattacatagatcagttgaagcgcataatggaggtcgtgggtacgccctctccagaagtccttgccaagatttcgagtgagcatgctcgaacttacatccaaagcttgccccccatgccacagaaagatctttccagcatcttccgtggcgctaacccacttgccattgacctcctgggcaggatgctggtgctggactctgatcagagagtgagtgccgcagaagcacttgcccacgcttattttagccagtatcatgatcccgaggatgagccagaggctgaaccctacgatgaatcagtggaagccaaggagagaaccctcgaagaatggaaagagttgacgtaccaggaagtgctgtcttttaagccacccgaacccccaaagccaccaggctcactcgagatcgaacagtag

SEQ ID NO: 131590 - DNA, 1095 bp, Artificial Sequence
  derived and/or modified sequence
atgtccggccctagagctggattttatcggcaggaactcaacaagacagtgtgggaagtgccccagcggctgcagggactacggccagtaggatctggtgcatatggatcagtatgctctgcctacgatgccagacttaggcagaaggtggccgtgaaaaaattatcaagaccatttcagagcttgattcacgcaagaagaacttatcgcgagctgcggctcctgaaacatctgaaacacgagaatgtcatcggcttactcgatgtattcactcccgctacatccatcgaggacttcagcgaagtatacctggtgactacacttatgggagccgacctcaataacattgtgaagtgccaggcactgagtgatgaacacgttcaattcctggtttaccaactactgagagggctgaagtatatccacagcgctgggatcatccacagagaccttaaaccctccaacgtcgccgtaaatgaagattgtgaactacgcatcctggactttggcctggcgaggcaagccgacgaagaaatgactggctatgtggcaacccggtggtaccgggcacctgagattatgttgaattggatgcactataatcagaccgttgacatctggtcggttggttgtatcatggccgaattgttgcaggggaaggctctcttcccgggaagtgactacatcgaccagcttaaacgcatcatggaagtagtgggcaccccttccccggaagtgctggccaagatttccagtgaacatgcacgcacctacatacagtctctccctcccatgccccagaaagatttgagttcaattttccggggagcaaatccgctggccatcgacctgctgggcagaatgttagtccttgattctgatcagagggtgagcgccgcagaagccttagcacacgcatacttttcccagtatcacgatcccgaggatgaacctgaggctgagccctatgatgaatccgtagaggccaaagagcggactttagaagaatggaaggagctgacctaccaagaggtactgagcttcaaacctccagaaccgccaaagccccctgggtccctggaaatcgaacagtag

SEQ ID NO: 131591 - DNA, 1095 bp, Artificial Sequence
  derived and/or modified sequence
atgtccgggccaagagctggattctataggcaggaactgaacaagacagtgtgggaagtcccacagaggctacagggactcaggcccgttggtagcggagcttacggctctgtatgctctgcctatgatgcgaggctcaggcaaaaggttgccgtaaagaagctttcaagacccttccagagcctgattcacgcccgtcgaacctaccgagagctccgccttttgaaacaccttaagcacgaaaacgttatcggattgttagatgtgttcacaccagccacatcaatcgaggatttttcagaggtgtacctggtcactaccctaatgggagccgacctcaacaatatcgtaaaatgtcaggctctgtccgatgagcatgtccagtttctcgtgtaccagctcttgcgcggactcaagtatatacattcagcaggcatcatccacagagatctgaagcctagcaacgtggctgtcaacgaggactgtgagctcagaatactcgattttggcttagccaggcaggctgacgaggaaatgactggctacgtggccacacggtggtaccgtgccccagaaataatgctgaactggatgcactataaccagaccgtggacatttggagcgttggctgcataatggcagagcttctccagggcaaagcactcttcccaggcagcgattatatcgatcagttgaaacgcattatggaagtcgtgggaaccccaagtcccgaagtgttagcgaagatcagcagcgaacacgctcgcacttatatccagtccctgccccctatgcctcagaaggatttgagctctatctttcggggtgcaaatcctctggccattgatctgttggggcgtatgctggtgcttgatagtgaccagcgggtcagcgctgctgaggcactagcacacgcttacttcagccagtaccatgatcctgaggacgagcctgaggctgaaccctacgacgaatccgtcgaagccaaggaacgtaccctggaggaatggaaggagttgacttatcaggaggtgctgtcatttaagccaccagagccacccaaaccaccgggaagtctcgagatagagcagtag

SEQ ID NO: 131592 - protein, 424 aa, Artificial Sequence
  derived and/or modified sequence
MSDSKCDSQFYSVQVADSTFTVLKRYQQLKPIGSGAQGIVCAAFDTVLGINVAVKKLSRPFQNQTHAKRAYRELVLLKCVNHKNIISLLNVFTPQKTLEEFQDVYLVMELMDANLCQVIHMELDHERMSYLLYQMLCGIKHLHSAGIIHRDLKPSNIVVKSDCTLKILDFGLARTACTNFMMTPYVVTRYYRAPEVILGMGYKENVDIWSVGCIMGELVKGCVIFQGTDHIDQWNKVIEQLGTPSAEFMKKLQPTVRNYVENRPKYPGIKFEELFPDWIFPSESERDKIKTSQARDLLSKMLVIDPDKRISVDEALRHPYITVWYDPAEAEAPPPQIYDAQLEEREHAIEEWKELIYKEVMDWEERSKNGVVKDQPSDAAVSSNATPSQSSSINDISSMSTEQTLASDTDSSLDASTGPLEGCR

SEQ ID NO: 131593 - DNA, 1275 bp, Artificial Sequence
  derived and/or modified sequence
atgtcagacagcaaatgtgactcacaattctattcggtgcaggtggctgattctacctttacggtgttgaaaaggtaccagcaattgaagcccattggttctggggcgcagggcattgtctgtgcggccttcgacacggtattaggaatcaacgtcgcggtcaaaaagctctccaggcctttccagaaccaaacacacgctaaaagggcgtaccgggagctggttttactcaaatgcgtgaaccacaagaacataatctcactcttaaatgttttcacacctcaaaagaccctcgaggaattccaagatgtgtacctggtaatggagctgatggatgccaacttgtgtcaggttatccatatggaattagatcacgaaaggatgtcctacctgctttaccagatgctgtgtggcattaagcatttacattccgcaggcatcatccaccgagacctgaagccgtccaatatagtcgtgaaatccgactgcactctgaaaatccttgatttcgggctcgctaggaccgcttgcactaattttatgatgacaccctacgttgtgacacggtactatagagccccggaagtgatcctgggaatggggtacaaggagaacgtggatatctggagtgtgggctgcatcatgggcgagctggtgaaaggatgcgtcattttccaaggtacagaccatatcgaccaatggaataaggttatcgaacagctcggtacgcccagtgcggaatttatgaaaaagctccagccaaccgtaaggaattacgtggagaaccgccctaaatatcccggcatcaaattcgaagaactttttcctgattggatctttccaagcgaatctgaacgggataaaatcaaaacttcccaagccagggatctcctgagcaaaatgctggtcattgatccagacaagaggatttccgtggacgaggcccttcgacacccatacattacagtctggtatgatcccgcagaagccgaggccccacccccccagatctacgatgctcagctcgaagaaagggagcacgccatcgaggaatggaaagagttgatctataaagaggtcatggactgggaggagcggtccaaaaatggggtggtcaaggatcagccttccgacgccgccgtcagtagcaatgcaacgccgagccagagcagttccattaatgacataagcagcatgtcgactgaacagaccctggccagcgataccgactcaagcctggacgctagcacgggcccactcgagggttgccgctag

SEQ ID NO: 131594 - DNA, 1275 bp, Artificial Sequence
  derived and/or modified sequence
atgtctgacagcaaatgtgacagccagttctacagcgtgcaggtggccgacagcaccttcaccgtgctgaagcgctaccagcagctgaagcccatcggcagcggggcccagggcatcgtgtgtgccgcctttgacacagtgctgggcatcaacgtggccgtgaagaagctgagccggcccttccagaaccagacccacgccaagagggcctaccgggagctggtgctgctgaagtgtgtgaaccacaagaacatcatcagcctgctgaatgtgttcaccccccagaagaccctggaggagttccaggatgtgtacctggtgatggagctgatggatgccaacctgtgccaggtgatccacatggagctggaccacgagaggatgagctacctgctgtaccagatgctgtgtggcatcaagcacctgcacagcgctggcatcatccaccgggacctgaagcccagcaacatcgtggtgaagagtgactgcaccctgaagatcctggactttggcctggccaggacagcctgcaccaacttcatgatgaccccctacgtggtgacccgctactaccgggcccctgaggtgatcctgggcatgggctacaaggaaaatgtggacatctggagcgtgggctgcatcatgggagagctggtgaagggctgcgtcatcttccagggcacagaccacatcgaccagtggaacaaggtgattgagcagctgggcaccccatctgctgagttcatgaagaagctgcagcccaccgtgagaaattatgtggagaaccggcccaagtacccaggcatcaagtttgaggagctgttcccagactggatcttccccagcgagagcgagcgggacaagatcaagaccagccaggcccgggacctgctgagcaagatgctggtgattgatcctgacaagaggatctctgtggatgaggccctgcggcacccctacatcaccgtgtggtatgaccctgctgaggccgaggcccccccaccccagatctatgatgcccagctggaggagcgggagcacgccatcgaggagtggaaggagctgatctacaaggaggtgatggactgggaggagaggagcaagaatggagtggtgaaggaccagcccagtgatgctgctgtgagcagcaatgccacccccagccagagcagcagcatcaatgacatcagctccatgagcacagagcagaccctggccagtgacacagacagcagcctggatgccagcacaggccccctggagggctgcaggtag

SEQ ID NO: 131595 - DNA, 4815 bp, Artificial Sequence
  derived and/or modified sequence
ggcgcgagggtctgtcagaccgggcgccgcggcggcggcagcggcggagaagggagcgggaccggaagggtcgcagcgccccggcgcccctcacacccactgcggcggcggcggcggcggcggcggcggggcggagcggagcggggcgggccggcggcggagccggggccgcggagccaggagtgactagcacgcagcgccgccagtccgcccgcccgccctctccccgtggcgcggcggcggggaggcgagggatctgaaacttgcccacccttcgggatattgcaggacgctgcatcatgagcgacagtaaatgtgacagtcagttttatagtgtgcaagtggcagactcaaccttcactgtcctaaaacgttaccagcagctgaaaccaattggctctggggcccaagggattgtttgtgctgcatttgatacagttcttgggataaatgttgcagtcaagaaactaagccgtccttttcagaaccaaactcatgcaaagagagcttatcgtgaacttgtcctcttaaaatgtgtcaatcataaaaatataattagtttgttaaatgtgtttacaccacaaaaaactctagaagaatttcaagatgtgtatttggttatggaattaatggatgctaacttatgtcaggttattcacatggagctggatcatgaaagaatgtcctaccttctttaccagatgctttgtggtattaaacatctgcattcagctggtataattcatagagatttgaagcctagcaacattgttgtgaaatcagactgcaccctgaagatccttgactttggcctggcccggacagcgtgcactaacttcatgatgaccccttacgtggtgacacggtactaccgggcgcccgaagtcatcctgggtatgggctacaaagagaacgttgatatctggtcagtgggttgcatcatgggagagctggtgaaaggttgtgtgatattccaaggcactgaccatattgatcagtggaataaagttattgagcagctgggaacaccatcagcagagttcatgaagaaacttcagccaactgtgaggaattatgtcgaaaacagaccaaagtatcctggaatcaaatttgaagaactctttccagattggatattcccatcagaatctgagcgagacaaaataaaaacaagtcaagccagagatctgttatcaaaaatgttagtgattgatcctgacaagcggatctctgtagacgaagctctgcgtcacccatacatcactgtttggtatgaccccgccgaagcagaagccccaccacctcaaatttatgatgcccagttggaagaaagagaacatgcaattgaagaatggaaagagctaatttacaaagaagtcatggattgggaagaaagaagcaagaatggtgttgtaaaagatcagccttcagatgcagcagtaagtagcaacgccactccttctcagtcttcatcgatcaatgacatttcatccatgtccactgagcagacgctggcctcagacacagacagcagtcttgatgcctcgacgggaccccttgaaggctgtcgatgataggttagaaatagcaaacctgtcagcattgaaggaactctcacctccgtgggcctgaaatgcttgggagttgatggaaccaaatagaaaaactccatgttctgcatgtaagaaacacaatgccttgccctactcagacctgataggattgcctgcttagatgataaaatgaggcagaatatgtctgaagaaaaaaattgcaagccacacttctagagattttgttcaagatcatttcaggtgagcagttagagtaggtgaatttgtttcaaattgtactagtgacagtttctcatcatctgtaactgttgagatgtatgtgcatgtgaccacaaatgcttgcttggacttgcccatctagcactttggaaatcagtatttaaatgccaaataatcttccaggtagtgctgcttctgaagttatctcttaatcctcttaagtaatttggtgtctgtccagaaaaagtcgatttatgtgtattaattggccatcatgatgttatcatatcttattcccttttatgctatgatttattctatcttttgtatttcagaagacatataattaaatctatttaataaataaaaatatatagcttttcttagatttgtgatgtttggggctgagaattatcacggctaaaaccaagacacttatgtggacatcttgttttctttaaactgtcttgtctgggatgattgtacattcagctttactgcacgatacaattttaagttttgcttagtgctgcttgaaatcctagctaccttatctcttttcttcttggtcttctagacttcttatgaatttaaaatgctacctagaacttcaccttctttattaggtgcgtaacactccatcttaattaaatatgatggcagataggttcctgcatccatggcctaacgttggagtggaattttacaaaatgctcactagagatcactgcagtcatttcctaagtgcttcctttgccacagactggcctgggtcctttatttaccttccctcattcactttccctcggccaataccacgttcttgattttctttcttcactggaagaaagcagataaactcctctttggtctgttttcagaggccaggctgattcagatgcctgttgctattgttgctctccattgttgggaggcattccttttcacaagaatgttctgggaaactcttcagaggacgtgaaggaaataccctgaagagtcatgattaactattgactattttctgatttaaaactgctcacctgaaattgatacttttagactttacgatcagtaaattattcagaattcatgaagatgctgagtatgttaagtgtcactgcaggaacggagctgtggtgatcacgttttgcctgcctgtgcccatgtctcttcccttgagcttattctgttgctgattcatatcttgtgttcaattattttggaagcttttcagtcgacattctgtagagtgtgttctgaggaggaactgtgataagaaagtttattataaatattatgtaaaatatatggctctctctgcaccagttatatcttattggttggtcatatcactggaaactggaacctttgattagcaaaattaatattgaaataagaaatagttcttttatattgtgtcatttggacactttcaagtacaaaatggtaataataacttggattgaggcggaaacacctattttatggctatctatctaaacatcttaaaatggccttctctgtaatacactttcttttaaaagacttcactaaatctatctttaaaaggaaaaacaaaagggagaggttgaaaatgcgcgagctgccctgcactgtgtgatgctccctccccgggagacgtggacgggggacgaggcacccgcagacgcccttctgctcactcgctcctctgtgcattcagcgagccacttgccacagatggagcccgtgacggtgtggagggtttcctggaaaggccatcttccaccaggtagaggcgagcgtgcctaggacaggccacagggctccacagaaatacctcaccccagcttcagggttctctctcctgagcctagatttgccagggtcttggtgccacgcaaatggtttcaaactgatctctatggataaatgctgatgttggttaaagaactgaaaaatgtgctcaactgtttcatcttttctattttatttttgtaatttatattgtacacaacccaggaagtaactattttggacatgtatttttataaaccaggtaatttactattatcctggaatttagactaggtttgtttcatttgttgacttagtttccagccaagaaggaaacgactgtctcccccatgtccaggtctcagtttcaagggcagagtccagagagcagacagagttctgtgagagcaggagagcagtctggaaaccctggctgtgcataccgtgtcagccgtgggcctggagatgggagcaggtgagacgcagagccccagtactgagaggaggaagccctcttacagggccccttgcccaccccaagtccgtgtctgaaacacggagcgggtgctgcttcaacccgcatttaatgctgtgtaagtagcgataaccacgtacgagtctgtctggttgatttctaatgtgactcctctggtatttcctcctggtaataaatacaagtgtgacctttcagattgcatatctcaaaagtaacattgctaatgttttataataaaatatattatgtgtgttttggttggtgaaaataatacagactacattttaaaagataaatgtatagcatgtccaatttttgtgtgtttttacatggcaattagatatttctccatcaccatctctgatgacagatttaacatgaacacagatagatgataaagtgtcatgcttttgatcaatattagcaagaggtttcacactgagaggcagaaacattgctgtttgttctcttattgaaaatattctgcaaattcctaaatctgtgttttcaaaactaatggcagtaagttttgacttcaccaatatgcaggtccaattcagagtattggtgtaattgttttctcatgaggcgtggccaggagaattcaccagtcagccttagtcatgttacttaacgtcattcatggtgcttgtggctttgtgcctgggatgagccaagttcatctgacgtctgtgtttgaagcacttcaggctgtttagtacttaataccacaggagtggaaggaca

SEQ ID NO: 131596 - DNA, 1275 bp, Artificial Sequence
  derived and/or modified sequence
atgagcgacagcaagtgcgacagccagttctacagcgtgcaggtggccgacagtacctttacagtgttgaaaagataccagcagctgaaacccatcggcagcggcgcacaggggatcgtatgtgcagcgttcgatactgttctaggtatcaacgtggctgtgaagaaattgagccgcccctttcagaaccagacacatgctaaacgagcgtaccgggagctcgttctgctgaagtgcgtcaatcacaagaacatcatttcacttctaaacgtgtttaccccacagaaaaccctcgaggagtttcaggacgtgtatttagtgatggagctaatggatgcgaatctgtgccaagtgatccatatggaactcgaccacgagaggatgagttacctcctgtaccagatgttatgcggcatcaagcatctgcattctgctggaatcatacatcgagatctaaaaccttctaatatcgtagtcaagagtgactgtactctgaaaattctcgattttggcttagcaagaaccgcttgtactaatttcatgatgacgccctatgtagtgactcggtattatagagctccagaggtgattcttggtatgggctataaagaaaatgttgacatctggagcgtgggatgcatcatgggggagttggtaaagggatgcgtgatcttccagggcactgaccacatcgatcaatggaataaagttatagaacagctgggaaccccttctgcagagttcatgaaaaaactgcaacctacagtcagaaattacgttgagaaccggcctaagtacccaggcataaagttcgaggagctctttcccgactggatctttccttccgagagcgaaagagacaaaatcaaaacatcccaagcacgcgacctgctgtcaaaaatgttggtcatagatcctgataaaagaatcagcgtcgacgaagcccttcgccacccctatataacagtatggtatgaccccgccgaggcagaagctcctcctcctcagatatatgatgcccaactggaggaaagggagcacgccatcgaagaatggaaggagctgatttataaggaagtaatggactgggaagagagatccaagaatggcgtggtgaaagaccagccctccgacgccgcagtaagtagtaatgcaaccccaagccagtcttcatcgatcaatgatatctcctctatgagcaccgagcaaaccctggcaagtgatacggactcctccctggatgctagtacgggaccgctcgaagggtgtcgttag

SEQ ID NO: 131597 - DNA, 1275 bp, Artificial Sequence
  derived and/or modified sequence
atgagtgatagtaagtgtgactcacagttttacagtgtacaggtcgctgatagcaccttcaccgtgctgaagagataccaacagttgaagccaatcgggtcgggtgctcaaggtattgtttgcgcagcctttgacactgttctggggataaacgttgccgtgaaaaaactcagtcgtccatttcagaatcaaacccatgcaaagcgggcttacagggaactcgttttactgaagtgcgtcaatcacaaaaacataatctcactccttaacgtattcacaccccagaaaaccctcgaggagtttcaagacgtatacctggttatggagttaatggatgccaacctgtgccaggtcatccacatggaactcgaccacgagagaatgagctacttgctgtaccaaatgctgtgcgggataaaacatctccatagcgcagggattattcatagggatctgaaaccatccaatatcgtggttaagtccgattgcaccctcaaaatccttgatttcggcctggcccgaacagcctgtaccaatttcatgatgactccatacgttgtcacgagatactaccgcgctccggaggtgatcctcggtatgggctacaaggagaacgttgacatctggagtgttggttgcatcatgggtgagcttgttaaaggttgcgtcatctttcaggggaccgatcacattgaccagtggaataaggtgattgaacagctggggactccttccgccgagttcatgaaaaaactccagcccacagtccggaactatgttgagaacagaccgaaatatccaggaattaagtttgaagagctctttccagactggatttttccgtccgagtcagagcgcgacaaaataaaaacatcgcaggcgagggacctcctgtctaaaatgctggtaatcgacccagataagcggatctccgtggatgaagcattgcgccatccctacataacagtgtggtatgatcctgcagaggccgaagcacccccaccccaaatttatgatgcccagcttgaggaacgagaacatgcaatagaagagtggaaagaattgatttacaaggaagttatggactgggaagagagatcgaagaatggtgtggtcaaagaccagccttctgacgcggctgtgagtagtaatgccaccccatcacagagcagttcaattaatgacatcagctctatgtcgacagagcaaactttagcaagcgatactgacagcagtctcgatgctagcaccggcccattggaggggtgtagatag

SEQ ID NO: 131598 - DNA, 1275 bp, Artificial Sequence
  derived and/or modified sequence
atgagcgacagcaagtgcgacagccagttctacagcgtgcaggtggccgacagcaccttcaccgtgctgaagagataccagcagctgaagcccatcggcagcggcgcccagggcatcgtgtgcgccgccttcgacaccgtgctgggcatcaacgtggccgtgaagaagctgagcagacccttccagaaccagacccacgccaagagagcctacagagagctggtgctgctgaagtgcgtgaaccacaagaacatcatcagcctgctgaacgtgttcaccccccagaagaccctggaggagttccaggacgtgtacctggtgatggagctgatggacgccaacctgtgccaggtgatccacatggagctggaccacgagagaatgagctacctgctgtaccagatgctgtgcggcatcaagcacctgcacagcgccggcatcatccacagagacctgaagcccagcaacatcgtggtgaagagcgactgcaccctgaagatcctggacttcggcctggccagaaccgcctgcaccaacttcatgatgaccccctacgtggtgaccagatactacagagcccccgaggtgatcctgggcatgggctacaaggagaacgtggacatctggagcgtgggctgcatcatgggcgagctggtgaagggctgcgtgatcttccagggcaccgaccacatcgaccagtggaacaaggtgatcgagcagctgggcacccccagcgccgagttcatgaagaagctgcagcccaccgtgagaaactacgtggagaacagacccaagtaccccggcatcaagttcgaggagctgttccccgactggatcttccccagcgagagcgagagagacaagatcaagaccagccaggccagagacctgctgagcaagatgctggtgatcgaccccgacaagagaatcagcgtggacgaggccctgagacacccctacatcaccgtgtggtacgaccccgccgaggccgaggccccccccccccagatctacgacgcccagctggaggagagagagcacgccatcgaggagtggaaggagctgatctacaaggaggtgatggactgggaggagagaagcaagaacggcgtggtgaaggaccagcccagcgacgccgccgtgagcagcaacgccacccccagccagagcagcagcatcaacgacatcagcagcatgagcaccgagcagaccctggccagcgacaccgacagcagcctggacgccagcaccggccccctggagggctgcagatag

SEQ ID NO: 131599 - protein, 422 aa, Artificial Sequence
  derived and/or modified sequence
MSLHFLYYCSEPTLDVKIAFCQGFDKQVDVSYIAKHYNMSKSKVDNQFYSVEVGDSTFTVLKRYQNLKPIGSGAQGIVCAAYDAVLDRNVAIKKLSRPFQNQTHAKRAYRELVLMKCVNHKNIISLLNVFTPQKTLEEFQDVYLVMELMDANLCQVIQMELDHERMSYLLYQMLCGIKHLHSAGIIHRDLKPSNIVVKSDCTLKILDFGLARTAGTSFMMTPYVVTRYYRAPEVILGMGYKENVDIWSVGCIMGEMVRHKILFPGRDYIDQWNKVIEQLGTPCPEFMKKLQPTVRNYVENRPKYAGLTFPKLFPDSLFPADSEHNKLKASQARDLLSKMLVIDPAKRISVDDALQHPYINVWYDPAEVEAPPPQIYDKQLDEREHTIEEWKELIYKEVMNSEEKTKNGVVKGQPSPSAQVQQ

SEQ ID NO: 131600 - protein, 277 aa, Artificial Sequence
  derived and/or modified sequence
MELMDANLCQVIQMELDHERMSYLLYQMLCGIKHLHSAGIIHRDLKPSNIVVKSDCTLKILDFGLARTAGTSFMMTPYVVTRYYRAPEVILGMGYKENVDIWSVGCIMGEMVRHKILFPGRDYIDQWNKVIEQLGTPCPEFMKKLQPTVRNYVENRPKYAGLTFPKLFPDSLFPADSEHNKLKASQARDLLSKMLVIDPAKRISVDDALQHPYINVWYDPAEVEAPPPQIYDKQLDEREHTIEEWKELIYKEVMNSEEKTKNGVVKGQPSPSAQVQQ

SEQ ID NO: 131601 - protein, 52 aa, Artificial Sequence
  derived and/or modified sequence
MSKSKVDNQFYSVEVGDSTFTVLKRYQNLKPIGSGAQGIVCAAYDAVLDRNV

SEQ ID NO: 131602 - DNA, 1269 bp, Artificial Sequence
  derived and/or modified sequence
atgagccttcacttcctgtattattgcagtgaaccaactcttgacgtgaagatcgcattctgtcagggctttgataagcaagtagacgtcagctatatcgccaagcattacaatatgtccaaaagtaaggtcgataaccagttctattctgtggaggtgggtgacagtacatttacagtgctcaaacgttaccagaacttaaagcctatcggaagcggcgcccaagggatcgtctgtgcagcctacgatgcagtcctggaccggaacgtcgcaatcaaaaagctgagtaggcccttccagaatcagacacatgccaaacgggcctaccgggagctcgtgctcatgaagtgcgtcaaccacaagaatatcatcagcctgctgaacgtgtttacacctcagaaaacacttgaggagttccaggacgtttatctggttatggagcttatggatgcaaacctctgccaggtcatccaaatggaactcgatcatgagcgcatgtcctacctcctgtaccagatgctgtgtggcatcaagcacttgcatagtgcgggtatcattcatcgggacctcaaaccatccaatatcgtcgttaagagcgattgtacccttaagattctggattttggcctggcgcggacggctggcacaagctttatgatgactccttatgtagttacgagatactatcgggctccagaagtgatactcggaatgggttacaaagaaaatgttgatatatggtcagtagggtgcatcatgggcgagatggtgcgacacaagatcctcttccctggccgcgattacattgatcagtggaacaaggtcatcgaacagctaggaaccccctgcccagaattcatgaaaaaactgcaaccgaccgtcagaaactacgtcgagaatcggcctaaatatgcaggattaacatttcctaagctctttcctgatagcctcttccctgccgactccgagcacaacaagcttaaggctagtcaagcccgtgacttgctgtccaaaatgctggtaattgatcctgctaaacgcatctcagtcgatgatgcgctacagcatccctatatcaacgtctggtacgatccagccgaagtggaagcacccccacctcagatttatgataaacagctggatgagagagaacataccattgaggagtggaaggagttaatttacaaagaagtgatgaattctgaggagaaaaccaagaacggagtggtgaagggccaaccctcgccctcagctcaggtgcagcaatag

SEQ ID NO: 131603 - DNA, 834 bp, Artificial Sequence
  derived and/or modified sequence
atggagttaatggatgcgaacttgtgccaggtgatccagatggaattagatcacgaacgcatgtcctacctgctttatcagatgctttgcgggataaaacatctgcactctgcgggaattatccacagagacctcaagcccagcaacatcgtcgtcaagagcgattgtaccctgaaaattctggacttcgggctggcccgcacggccggtaccagcttcatgatgacaccatatgtggtgactcgctactatagggccccagaggtgatactgggaatgggctacaaggagaacgtggacatttggtccgtgggatgtatcatgggggagatggtccgccacaagattctattcccggggcgagattatatcgaccagtggaataaggtgatagagcagctgggaactccatgtcccgagttcatgaagaagctgcagccaactgtgcggaattacgtagaaaacagacctaaatacgccggtctgactttccccaaactttttcctgatagtctgttcccagccgattctgagcataataagctgaaggcaagtcaggctcgtgaccttctatctaaaatgctggtgatcgaccccgccaaacggatctcagtggacgacgcattgcagcatccttacataaacgtgtggtacgaccccgccgaagtggaagcaccccctcctcagatttacgataagcaactggacgagagggaacacacaattgaggagtggaaggagctgatttacaaggaggtgatgaatagcgaagaaaagacaaagaacggtgttgtgaagggccaacctagccctagtgctcaggtgcagcagtag

SEQ ID NO: 131604 - DNA, 1269 bp, Artificial Sequence
  derived and/or modified sequence
atgagcctacacttcctatattactgctcggagcccaccctggatgtgaagatcgccttttgccagggcttcgacaaacaggtagatgtgtcctacattgctaagcactacaacatgtccaagagcaaggtggacaaccagttttattccgtagaagtaggtgactcaacctttactgtcctgaagcgttaccagaatttaaagccaatcggttctggggcccaggggattgtgtgtgctgcctacgatgccgtgcttgaccgaaacgtggccatcaaaaagctgtcacggccttttcaaaatcagacacacgccaagcgagcctatcgtgagctggtgttgatgaaatgcgttaaccataagaatattatatcgctgcttaacgtatttacgcctcagaaaactctggaggagttccaagacgtctatttagttatggagcttatggacgcaaacctgtgccaagtgatccagatggaactggatcacgagcgcatgtcttacctgctgtatcagatgttgtgcggcattaagcacctgcacagtgccggcattatccaccgagaccttaagcccagcaacattgtggtaaagagtgattgtacccttaaaattcttgacttcggactggcacgcaccgccggaacctcattcatgatgacgccctatgtggtgactaggtattatcgcgctcctgaggttatcttgggaatggggtataaagaaaacgtggatatttggagtgtgggatgcatcatgggagagatggtcaggcataagatcttgtttcccggccgcgattatatcgatcagtggaacaaagtcatcgagcaactgggaacaccctgtccggagtttatgaagaaacttcagccgaccgtccggaattacgtggagaatcggcctaaatatgccgggttaacatttccgaagttatttcccgacagcctgtttcccgctgactctgaacataataaattgaaggcttcacaggccagggatctcctgtctaaaatgttggtgatagaccccgccaagcgcataagcgtggatgacgccctgcagcatccttacatcaatgtctggtacgatcctgcggaagttgaggcacctccgccacagatatatgataagcagcttgacgagagagagcatacaatcgaggaatggaaggagctgatttataaggaggtgatgaactctgaggagaaaacaaagaatggagtggtgaagggccagccgtccccatcagctcaagtccaacagtag

SEQ ID NO: 131605 - DNA, 1269 bp, Artificial Sequence
  derived and/or modified sequence
atgagcctgcacttcctgtactactgcagcgagcccaccctggatgtgaagatcgccttctgccagggctttgacaagcaggtggatgtgtcctacatcgccaagcactacaacatgagcaagagcaaggtggacaaccagttctacagcgtggaggtgggggacagcaccttcaccgtgctgaagcgctaccagaacctgaagcccatcggcagcggggcccagggcatcgtgtgtgccgcctatgatgctgtgctggacagaaatgtggccatcaagaagctgagccggcccttccagaaccagacccacgccaagagggcctaccgggagctggtgctgatgaagtgtgtgaaccacaagaacatcatcagcctgctgaatgtgttcaccccccagaagaccctggaggagttccaggatgtgtacctggtgatggagctgatggatgccaacctgtgccaggtgatccagatggagctggaccacgagaggatgagctacctgctgtaccagatgctgtgtggcatcaagcacctgcacagcgctggcatcatccaccgggacctgaagcccagcaacatcgtggtgaagagtgactgcaccctgaagatcctggactttggcctggccaggacagctggcaccagcttcatgatgaccccctacgtggtgacccgctactaccgggcccctgaggtgatcctgggcatgggctacaaggaaaatgtggacatctggagcgtgggctgcatcatgggagagatggtgcgccacaagatcctcttccctggccgggactacatcgaccagtggaacaaggtgattgagcagctgggcaccccctgcccagagttcatgaagaagctgcagcccaccgtgagaaattatgtggagaaccggcccaagtatgccggcctgaccttccccaagctgttcccagacagcctcttccctgctgacagcgagcacaacaagctgaaggccagccaggcccgggacctgctgagcaagatgctggtgattgatcctgccaagaggatctctgtggatgatgccctgcagcacccctacatcaacgtgtggtatgaccctgctgaggtggaggcccccccaccccagatctatgacaagcagctggatgagcgggagcacaccatcgaggagtggaaggagctgatctacaaggaggtgatgaacagcgaggagaagaccaagaatggagtggtgaagggccagcccagccccagcgcccaggtgcagcagtag

SEQ ID NO: 131606 - DNA, 834 bp, Artificial Sequence
  derived and/or modified sequence
atggagctgatggatgccaacctgtgccaggtgatccagatggagctggaccacgagaggatgagctacctgctgtaccagatgctgtgtggcatcaagcacctgcacagcgctggcatcatccaccgggacctgaagcccagcaacatcgtggtgaagagtgactgcaccctgaagatcctggactttggcctggccaggacagctggcaccagcttcatgatgaccccctacgtggtgacccgctactaccgggcccctgaggtgatcctgggcatgggctacaaggaaaatgtggacatctggagcgtgggctgcatcatgggagagatggtgcgccacaagatcctcttccctggccgggactacatcgaccagtggaacaaggtgattgagcagctgggcaccccctgcccagagttcatgaagaagctgcagcccaccgtgaggaactacgtggagaaccggcccaagtatgccggcctgaccttccccaagctgttcccagacagcctcttccctgctgacagcgagcacaacaagctgaaggccagccaggcccgggacctgctgagcaagatgctggtgattgatcctgccaagaggatctctgtggatgatgccctgcagcacccctacatcaacgtgtggtatgaccctgctgaggtggaggcccccccaccccagatctatgacaagcagctggatgagcgggagcacaccatcgaggagtggaaggagctgatctacaaggaggtgatgaacagcgaggagaagaccaagaatggagtggtgaagggccagcccagccccagcgcccaggtgcagcagtag

SEQ ID NO: 131607 - DNA, 2371 bp, Artificial Sequence
  derived and/or modified sequence
agaaatggcgtggcaggggacccagcgagcccagagggattttgccgctgcttcctctacccctgtatttcacgcagctctctaaattgactcagctccaggctagtgtgagaaacaccaacagcaggcccatctcagatcttcactatggcaacttatgcaagaaactgttgaattagacccgtttcctatagatgagaaaccatacaagctgtggtatttatgagcctccatttcttatactactgcagtgaaccaacattggatgtgaaaattgccttttgtcagggattcgataaacaagtggatgtgtcatatattgccaaacattacaacatgagcaaaagcaaagttgacaaccagttctacagtgtggaagtgggagactcaaccttcacagttctcaagcgctaccagaatctaaagcctattggctctggggctcagggcatagtttgtgccgcgtatgatgctgtccttgacagaaatgtggccattaagaagctcagcagaccctttcagaaccaaacacatgccaagagagcgtaccgggagctggtcctcatgaagtgtgtgaaccataaaaacattattagtttattaaatgtcttcacaccccagaaaacgctggaggagttccaagatgtttacttagtaatggaactgatggatgccaacttatgtcaagtgattcagatggaattagaccatgagcgaatgtcttacctgctgtaccaaatgttgtgtggcattaagcacctccattctgctggaattattcacagggatttaaaaccaagtaacattgtagtcaagtctgattgcacattgaaaatcctggactttggactggccaggacagcaggcacaagcttcatgatgactccatatgtggtgacacgttattacagagcccctgaggtcatcctggggatgggctacaaggagaacgtggatatatggtctgtgggatgcattatgggagaaatggttcgccacaaaatcctctttccaggaagggactatattgaccagtggaataaggtaattgaacaactaggaacaccatgtccagaattcatgaagaaattgcaacccacagtaagaaactatgtggagaatcggcccaagtatgcgggactcaccttccccaaactcttcccagattccctcttcccagcggactccgagcacaataaactcaaagccagccaagccagggacttgttgtcaaagatgctagtgattgacccagcaaaaagaatatcagtggacgacgccttacagcatccctacatcaacgtctggtatgacccagccgaagtggaggcgcctccacctcagatatatgacaagcagttggatgaaagagaacacacaattgaagaatggaaagaacttatctacaaggaagtaatgaattcagaagaaaagactaaaaatggtgtagtaaaaggacagccttctccttcagcacaggtgcagcagtgaacagcagtgagagtctccctccatcctcgtctgtcaatgacatctcctccatgtccaccgaccagaccctggcatctgacactgacagcagcctggaagcctcggcaggacccctgggttgttgcaggtgactagccgcctgcctgcgaaacccagcgttcttcaggagatgatgtgatggaacacacacacacgcagacacacacacacacacaaatgcagacacacaacatcaagaaaacagcaagggagagaatccaagcctaaaattaaataaatctttcagcctgcttcttccccagggttctgtattgcagctaagctcaaatgtatatttaacttctagttgctcttgctttggtcttcttccaatgatgcttactacagaaagcaaatcagacacaattagagaagccttttccataaagtgtaattttaatggctgcaaaaccggcaacctgtaactgcccttttaaatggcatgacaaggtgtgcagtggccccatccagcatgtgtgtgtctctatcttgcatctacctgctccttggcctagtcagatggatgtagatacagatccgcatgtgtctgtattcatacagcactacttacttagagatgctactgtcagtgtcctcagggctctaccaagacataatgcactggggtaccacatggtccatttcatgtgatctattactctgacataaacccatctgtaatatattgccagtatataagctgtttagtttgttaattgattaaactgtatgtcttataagaaaacatgtaaagggggaatatatggggggagtgagctctctcagacccttgaagatgtagcttccaaatttgaatggattaaatggcacctgtatacca

SEQ ID NO: 131608 - DNA, 2154 bp, Artificial Sequence
  derived and/or modified sequence
aattatatgctatattcttggcaagatctttttcttctcctttgccctcttctactccttccccccttctcctgtttctccttcttcccttcctccaactcttcttcatcctcctagcatgtagaatattcttatgccagtcactcatatctttacttaaagcctgattggcatgtgaccagagtagacagtatctaagattccgaaatagcattttctttaccagtatccttaatcaagtaggcaagagttctaaggaatcttttgttcttaattctgagttgctcttggatctctacagtgccgcgtatgatgctgtccttgacagaaatgtggccattaagaagctcagcagaccctttcagaaccaaacacatgccaagagagcgtaccgggagctggtcctcatgaagtgtgtgaaccataaaaacttacttagtaatggaactgatggatgccaacttatgtcaagtgattcagatggaattagaccatgagcgaatgtcttacctgctgtaccaaatgttgtgtggcattaagcacctccattctgctggaattattcacagggatttaaaaccaagtaacattgtagtcaagtctgattgcacattgaaaatcctggactttggactggccaggacagcaggcacaagcttcatgatgactccatatgtggtgacacgttattacagagcccctgaggtcatcctggggatgggctacaaggagaacgtggatatatggtctgtgggatgcattatgggagaaatggttcgccacaaaatcctctttccaggaagggactatattgaccagtggaataaggtaattgaacaactaggaacaccatgtccagaattcatgaagaaattgcaacccacagtaagaaactatgtggagaatcggcccaagtatgcgggactcaccttccccaaactcttcccagattccctcttcccagcggactccgagcacaataaactcaaagccagccaagccagggacttgttgtcaaagatgctagtgattgacccagcaaaaagaatatcagtggacgacgccttacagcatccctacatcaacgtctggtatgacccagccgaagtggaggcgcctccacctcagatatatgacaagcagttggatgaaagagaacacacaattgaagaatggaaagaacttatctacaaggaagtaatgaattcagaagaaaagactaaaaatggtgtagtaaaaggacagccttctccttcagcacaggtgcagcagtgaacagcagtgagagtctccctccatcctcgtctgtcaatgacatctcctccatgtccaccgaccagaccctggcatctgacactgacagcagcctggaagcctcggcaggacccctgggttgttgcaggtgactagccgcctgcctgcgaaacccagcgttcttcaggagatgatgtgatggaacacacacacacgcagacacacacacacacacaaatgcagacacacaacatcaagaaaacagcaagggagagaatccaagcctaaaattaaataaatctttcagcctgcttcttccccagggttctgtattgcagctaagctcaaatgtatatttaacttctagttgctcttgctttggtcttcttccaatgatgcttactacagaaagcaaatcagacacaattagagaagccttttccataaagtgtaattttaatggctgcaaaaccggcaacctgtaactgcccttttaaatggcatgacaaggtgtgcagtggccccatccagcatgtgtgtgtctctatcttgcatctacctgctccttggcctagtcagatggatgtagatacagatccgcatgtgtctgtattcatacagcactacttacttagagatgctactgtcagtgtcctcagggctctaccaagacataatgcactggggtaccacatggtccatttcatgtgatctattactctgacataaacccatctgtaatatattgccagtatataagctgtttagtttgttaattgattaaactgtatgtcttataagaaaacatgtaaagggggaatatatggggggagtgagctctctcagacccttgaagatgtagcttccaaatttgaatggattaaatggcacctgtatacc

SEQ ID NO: 131609 - DNA, 1955 bp, Artificial Sequence
  derived and/or modified sequence
ttcaccggaaaacacagtagctgtagctgcacatagacgcttcctctttctgtttccccctcatccccctccctagacctctctgggctttgacgtcatgtgtgctcctttcggttgccatagcaaccccattccccaagccctctgtccgtctcctctggtaggttccacaatggtacaggcagcatcacgctgcacaatggtttccaggcagtgaaagagggtgattcagcaagccactcttcttctattttctttaacctccccttcactttttatttttatgggggtgggtggtgcttgctatatgcttacctttttcttttcttttttcatttttacaaatttccttttttgtcctcacccctcaattcctaggggcttgagtgagtttaagattgggttttcttggaaatcacctgtccatcgttaattttaaacaatctccatatctccaaagaatctcttccatgttagtctggaatgtggttaatgaaaaacaagtagggaggatttctggggcaaacactgccggatcaggatcgtagttctcaggcacggaatggctagtgtgagaaacaccaacagcaggcccatctcagatcttcactatggcaacttatgcaagaaactgttgaattagacccgtttcctatagatgagaaaccatacaagctgtggtatttatgagcctccatttcttatactactgcagtgaaccaacattggatgtgaaaattgccttttgtcagggattcgataaacaagtggatgtgtcatatattgccaaacattacaacatgagcaaaagcaaagttgacaaccagttctacagtgtggaagtgggagactcaaccttcacagttctcaagcgctaccagaatctaaagcctattggctctggggctcagggcatagtttgtgccgcgtatgatgctgtccttgacagaaatgtggccattaagaagctcagcagaccctttcagaaccaaacacatgccaagagagcgtaccgggagctggtcctcatgaagtgtgtgaaccataaaaacattattagtttattaaatgtcttcacaccccagaaaacgctggaggagttccaagatgtttacttagtaatggaactgatggatgccaacttatgtcaagtgattcagatggaattagaccatgagcgaatgtcttacctgctgtaccaaatgttgtgtggcattaagcacctccattctgctggaattattcacagggatttaaaaccaagtaacattgtagtcaagtctgattgcacattgaaaatcctggactttggactggccaggacagcaggcacaagcttcatgatgactccatatgtggtgacacgttattacagagcccctgaggtcatcctggggatgggctacaaggagaacgtggatatatggtctgtgggatgcattatgggagaaatggttcgccacaaaatcctctttccaggaagggactatattgaccagtggaataaggtaattgaacaactaggaacaccatgtccagaattcatgaagaaattgcaacccacagtaagaaactatgtggagaatcggcccaagtatgcgggactcaccttccccaaactcttcccagattccctcttcccagcggactccgagcacaataaactcaaagccagccaagccagggacttgttgtcaaagatgctagtgattgacccagcaaaaagaatatcagtggacgacgccttacagcatccctacatcaacgtctggtatgacccagccgaagtggaggcgcctccacctcagatatatgacaagcagttggatgaaagagaacacacaattgaagaatggaaagaacttatctacaaggaagtaatgaattcagaagaaaagactaaaaatggtgtagtaaaaggacagccttctccttcagcacaggtgcagcagtga

SEQ ID NO: 131610 - DNA, 1269 bp, Artificial Sequence
  derived and/or modified sequence
atgagcctgcacttcctgtactactgcagcgagcccaccctggacgttaaaatagccttttgtcagggcttcgacaaacaggtagatgtcagctacatcgccaagcactataacatgagcaagtctaaggtggataaccaattttatagtgtggaagtgggagattccacctttacagttttgaaacgatatcaaaacttgaaacctataggttccggcgctcaaggaattgtgtgcgcagcatatgatgccgtcctggaccgcaacgtggccatcaagaaattgtctcgaccatttcagaaccaaacccatgccaagcgcgcctaccgggaacttgtacttatgaaatgtgtcaatcataaaaacataatctcgttactgaacgtctttacgccccaaaagacacttgaagagtttcaagacgtctacctggttatggaattgatggatgctaacttatgtcaagtcatccagatggagcttgatcacgaacgtatgtcatatctcctttatcagatgttatgcggaatcaaacatctccactccgcaggaattatccatagggacctgaagcccagcaacatcgtagttaagtctgactgtactctgaaaatactcgatttcggactggccaggactgccggcacttccttcatgatgaccccatatgtggtcacacggtactatagggccccagaagtcattctgggtatgggatataaagaaaatgtggatatctggagtgtaggatgtatcatgggggagatggtccgccataagatcctgttcccagggagggactacatcgatcagtggaacaaggtcatcgaacagttgggtaccccttgccccgaattcatgaaaaaactgcaacccaccgttaggaattacgtagaaaatcggccgaagtacgcagggctgacgttcccaaagctgtttcccgacagtctttttcctgcggattctgaacataacaagctcaaggcatctcaggctcgggacttactctcaaaaatgctcgtcatcgaccccgcgaagagaattagcgttgacgatgcacttcaacacccatacatcaacgtgtggtacgacccagctgaggttgaagcacccccgccccagatttacgacaaacagctcgatgagagggaacacacaatcgaagagtggaaggaattaatctacaaggaagtaatgaatagtgaagaaaagactaaaaacggggttgtgaagggtcagccctcacccagcgcacaggttcaacagtag

SEQ ID NO: 131611 - DNA, 834 bp, Artificial Sequence
  derived and/or modified sequence
atggagctgatggacgccaacctgtgccaggtgatccagatggagcttgaccacgaacgaatgtcctatcttctgtaccagatgctgtgtgggattaagcatttgcactctgcagggataatccaccgagacctgaagccaagcaatattgtggttaagagcgactgtacacttaagatcctggactttgggcttgcacgcacagcgggcacgtcatttatgatgaccccttacgtcgtgacccgttattatcgtgccccggaagtcatactgggcatgggttataaagaaaacgtggatatctggagtgtgggctgcatcatgggagaaatggtccgacacaagatcctcttcccgggtcgtgattacatcgaccaatggaacaaagtgattgaacagctgggcaccccatgtccagagttcatgaagaaactccagcccacagtacggaactatgtcgagaatagacccaagtacgccggcttgacgttcccaaagcttttccctgactccctttttccggcagattctgagcacaacaagttgaaggcatcacaggcccgagacttattatcgaagatgctggtaatcgaccccgccaagaggataagcgtggacgatgccctgcagcatccctatatcaatgtgtggtacgatccagcggaggtcgaggctccacccccccagatttacgacaagcagttggatgaacgcgagcacactattgaagagtggaaagagttgatctataaggaagtaatgaactcagaagagaagacaaagaatggggttgtcaaaggtcaaccctctccctccgctcaggtgcagcagtag

SEQ ID NO: 131612 - DNA, 1269 bp, Artificial Sequence
  derived and/or modified sequence
atgagcctgcacttcctgtactactgcagcgagcccaccctggacgtcaagattgcgttctgccaggggttcgataagcaagtggatgtcagttatattgcaaagcactacaatatgagcaagagtaaagtggacaaccagttctactcagtagaagtcggagatagtaccttcacagtcttgaagagatatcagaatctgaagcctattggcagtggggctcaggggatcgtttgtgcggcatacgacgcggtccttgaccgaaacgtggctattaagaaactcagtcggccctttcagaatcaaacacacgccaaaagagcataccgcgaactcgtcctgatgaagtgtgttaatcacaagaacattatttccctgcttaacgttttcacccctcagaagactctggaggaattccaagatgtatatctcgtaatggaactcatggacgctaatctgtgccaggtcattcagatggagctagaccatgaacgcatgagctatttactgtatcaaatgttgtgcggcataaagcaccttcattctgcaggaatcattcaccgggatttgaaacccagtaacatcgtggtaaagtcggactgtaccctgaagatactggacttcggtctggccagaactgccggtacaagcttcatgatgacaccttacgtggtgactcgatattatcgcgccccggaagtcattctgggcatgggctataaagagaacgttgatatctggtcagtcggctgtattatgggggaaatggttaggcataagatcttgtttcctggtagggactatatcgatcagtggaataaggtcatcgagcagctgggtacgccctgcccagaatttatgaagaagcttcagcccacagtaagaaattatgtggaaaatcgaccgaaatacgccggcctgactttcccaaaactgtttccagactcactattccccgctgattcagaacataacaagctgaaagcatcacaagcccgggatctcctctccaagatgctggtgattgatccagcgaagaggatttccgtggacgacgccctgcagcatccctacattaacgtctggtacgatccggctgaagtggaggccccgccaccacagatttacgataagcagctagacgagagggagcacactatagaggaatggaaggaactcatctacaaggaagtgatgaacagtgaggagaaaaccaaaaacggagtggtaaagggccagccttctccatcagcccaggtgcagcaatag

SEQ ID NO: 131613 - DNA, 1269 bp, Artificial Sequence
  derived and/or modified sequence
atgtctctccactttctctattattgctccgagcccaccctcgacgtcaaaattgcattttgtcagggtttcgataaacaggtggacgttagttatatcgccaaacattacaatatgtcgaagtcaaaggttgataaccagttctactccgtggaggtgggagatagcacctttaccgtgctgaaacgataccagaatctgaaaccaattggctccggcgctcagggaatcgtgtgtgcagcctatgacgcagtgttagataggaacgttgctatcaagaagttgtcccggcctttccagaaccagactcacgcaaaacgggcatatcgcgaactggtgctgatgaaatgtgtgaaccacaaaaatatcatctccctgctgaatgtgtttactccacagaagactctagaggaattccaggacgtgtatttggtgatggagttaatggacgctaacctctgccaggtgatccagatggagctggaccatgaacggatgtcctatctgctgtaccagatgctgtgcgggataaagcatctgcacagcgctggcatcattcatcgggacctcaagccttccaatatagtcgtgaaaagtgattgtactctaaaaatccttgattttggcctcgctagaactgcagggacctcctttatgatgacaccctacgttgtaacacgctattatagagcccctgaagtaattctcggaatgggatataaggaaaacgtggacatttggtccgtcggatgcattatgggggaaatggtccgccacaaaattcttttccccggacgggactatatagatcaatggaacaaggtgattgagcaactgggcactccatgtcctgaattcatgaagaagttacagccaacggtgagaaactacgtggagaaccggcctaagtacgcgggattaacattccccaaactattccccgattcattattccctgctgactctgagcacaataaactgaaagcctctcaggctagggatctgttgagtaaaatgctggtgatcgaccctgccaagagaatttctgtcgacgatgccctgcaacacccatacatcaatgtgtggtatgatccagccgaggtggaggctcctccacctcagatatacgacaaacagctggatgagagagaacatacaatcgaagaatggaaggagcttatttacaaagaggtgatgaactctgaagagaagaccaagaacggggtcgtcaagggacagccttccccgtctgcccaggtccagcagtag

SEQ ID NO: 131614 - DNA, 834 bp, Artificial Sequence
  derived and/or modified sequence
atggaattgatggacgcaaacctctgtcaagtgatccagatggagctggatcacgaaaggatgtcttacttgttgtatcagatgttgtgcggtatcaaacacctgcactcagctggcattatccaccgcgatcttaaacccagcaacattgtcgtcaagtccgactgcaccctgaagatcctggatttcggattggctcgaactgctggaacctcctttatgatgaccccttatgtggtgaccaggtattatcgagctcccgaagtaatcctcggaatgggctacaaagaaaatgttgatatctggagcgtgggctgcattatgggggagatggttcgccacaagattcttttccccggaagagattacatagaccaatggaacaaagtcatcgaacagttagggactccctgcccggagtttatgaaaaaattgcagccaacagtgcggaattacgtggaaaatcggccaaaatatgccggattaacatttccaaaactctttcctgacagcctgttccccgctgactctgagcataataagctcaaggcctcccaggctcgagatctcttatctaagatgctggtgattgacccggctaagagaatctccgtagacgacgccctacagcacccttatataaatgtatggtacgatccggctgaagtggaagctccaccaccacagatctacgacaagcagctggatgaacgagagcatactatcgaggagtggaaagagctcatttacaaggaggtcatgaactctgaggagaagaccaagaacggagtcgtgaagggacaacctagcccttccgcgcaagtgcagcaatag

SEQ ID NO: 131615 - DNA, 1269 bp, Artificial Sequence
  derived and/or modified sequence
atgagcctgcatttcctgtattactgcagcgaaccaacactggatgtgaagatagcattctgtcaggggttcgataagcaggttgatgtaagttacattgccaaacattataacatgtcaaaatctaaagtggacaatcagttctactctgtggaggtgggtgacagtacattcaccgtgcttaaaaggtaccagaacctgaagcccatcggtagcggagcacaaggcatcgtgtgcgctgcctatgatgcagttctcgatagaaacgtggcaatcaagaagctgtccagaccctttcagaaccaaacacatgccaagcgggcttacagggaactggtcctgatgaaatgcgtcaaccataagaatattataagccttctgaatgtgtttactcctcagaaaacacttgaggaattccaggacgtatacctggtgatggagctgatggacgcgaatttgtgtcaggtaatccagatggagctggaccatgagcgcatgagctacctgctttaccaaatgctctgcggcatcaagcatctgcatagcgctgggataatccaccgtgatttaaagccgagcaacatagtcgtgaaatccgattgtaccctcaagattttggactttgggctcgctcggacggcgggtaccagcttcatgatgaccccatatgtcgtgactaggtattacagagcccctgaggtaatccttggcatgggatacaaggaaaatgtggacatatggtcggtaggctgtatcatgggagagatggtgcggcataaaattctgttccctggcagagattatattgaccagtggaataaggtgatcgagcagcttggaacaccatgtccggaattcatgaaaaaactccagcctaccgttcggaactacgtagagaaccggccaaagtatgccggactgacattccctaagctgtttcctgacagcctcttcccagcagattcggagcacaataagctgaaggcgtcacaagctcgggatttgctctccaaaatgctggtcattgaccctgcgaaacgaatctctgtcgacgacgctctgcagcacccgtatatcaacgtatggtacgatccagccgaagtcgaagcccctcccccacagatttatgacaaacaactggacgaaagggagcataccatcgaagagtggaaagaactgatctacaaggaggtgatgaattccgaggagaagacaaagaacggggttgttaaaggacagccttcccctagtgcccaggtccaacagtag

SEQ ID NO: 131616 - DNA, 1269 bp, Artificial Sequence
  derived and/or modified sequence
atgagcctgcacttcctgtactactgcagcgagcccaccctggacgtgaagatcgccttctgccagggcttcgacaagcaggtggacgtgagctacatcgccaagcactacaacatgagcaagagcaaggtggacaaccagttctacagcgtggaggtgggcgacagcaccttcaccgtgctgaagagataccagaacctgaagcccatcggcagcggcgcccagggcatcgtgtgcgccgcctacgacgccgtgctggacagaaacgtggccatcaagaagctgagcagacccttccagaaccagacccacgccaagagagcctacagagagctggtgctgatgaagtgcgtgaaccacaagaacatcatcagcctgctgaacgtgttcaccccccagaagaccctggaggagttccaggacgtgtacctggtgatggagctgatggacgccaacctgtgccaggtgatccagatggagctggaccacgagagaatgagctacctgctgtaccagatgctgtgcggcatcaagcacctgcacagcgccggcatcatccacagagacctgaagcccagcaacatcgtggtgaagagcgactgcaccctgaagatcctggacttcggcctggccagaaccgccggcaccagcttcatgatgaccccctacgtggtgaccagatactacagagcccccgaggtgatcctgggcatgggctacaaggagaacgtggacatctggagcgtgggctgcatcatgggcgagatggtgagacacaagatcctgttccccggcagagactacatcgaccagtggaacaaggtgatcgagcagctgggcaccccctgccccgagttcatgaagaagctgcagcccaccgtgagaaactacgtggagaacagacccaagtacgccggcctgaccttccccaagctgttccccgacagcctgttccccgccgacagcgagcacaacaagctgaaggccagccaggccagagacctgctgagcaagatgctggtgatcgaccccgccaagagaatcagcgtggacgacgccctgcagcacccctacatcaacgtgtggtacgaccccgccgaggtggaggccccccccccccagatctacgacaagcagctggacgagagagagcacaccatcgaggagtggaaggagctgatctacaaggaggtgatgaacagcgaggagaagaccaagaacggcgtggtgaagggccagcccagccccagcgcccaggtgcagcagtag

SEQ ID NO: 131617 - DNA, 834 bp, Artificial Sequence
  derived and/or modified sequence
atggagctgatggacgccaacctgtgccaggtgatccagatggagctggaccacgagagaatgagctacctgctgtaccagatgctgtgcggcatcaagcacctgcacagcgccggcatcatccacagagacctgaagcccagcaacatcgtggtgaagagcgactgcaccctgaagatcctggacttcggcctggccagaaccgccggcaccagcttcatgatgaccccctacgtggtgaccagatactacagagcccccgaggtgatcctgggcatgggctacaaggagaacgtggacatctggagcgtgggctgcatcatgggcgagatggtgagacacaagatcctgttccccggcagagactacatcgaccagtggaacaaggtgatcgagcagctgggcaccccctgccccgagttcatgaagaagctgcagcccaccgtgagaaactacgtggagaacagacccaagtacgccggcctgaccttccccaagctgttccccgacagcctgttccccgccgacagcgagcacaacaagctgaaggccagccaggccagagacctgctgagcaagatgctggtgatcgaccccgccaagagaatcagcgtggacgacgccctgcagcacccctacatcaacgtgtggtacgaccccgccgaggtggaggccccccccccccagatctacgacaagcagctggacgagagagagcacaccatcgaggagtggaaggagctgatctacaaggaggtgatgaacagcgaggagaagaccaagaacggcgtggtgaagggccagcccagccccagcgcccaggtgcagcagtag

SEQ ID NO: 131618 - protein, 365 aa, Artificial Sequence
  derived and/or modified sequence
MSLIRKKGFYKQDVNKTAWELPKTYVSPTHVGSGAYGSVCSAIDKRSGEKVAIKKLSRPFQSEIFAKRAYRELLLLKHMQHENVIGLLDVFTPASSLRNFYDFYLVMPFMQTDLQKIMGMEFSEEKIQYLVYQMLKGLKYIHSAGVVHRDLKPGNLAVNEDCELKILDFGLARHADAEMTGYVVTRWYRAPEVILSWMHYNQTVDIWSVGCIMAEMLTGKTLFKGKDYLDQLTQILKVTGVPGTEFVQKLNDKAAKSYIQSLPQTPRKDFTQLFPRASPQAADLLEKMLELDVDKRLTAAQALTHPFFEPFRDPEEETEAQQPFDDSLEHEKLTVDEWKQHIYKEIVNFSPIARKDSRRRSGMKL

SEQ ID NO: 131619 - protein, 152 aa, Artificial Sequence
  derived and/or modified sequence
MQHENVIGLLDVFTPASSLRNFYDFYLVMPFMQTDLQKIMGMEFSEEKIQYLVYQMLKGLKYIHSAGVVHRDLKPGNLAVNEDCELKILDFGLARHADAEMTGYVVTRWYRAPEVILSWMHYNQTGQILHPVPATDPQEGFHSAVPTGQPPG

SEQ ID NO: 131620 - protein, 355 aa, Artificial Sequence
  derived and/or modified sequence
MSLIRKKGFYKQDVNKTAWELPKTYVSPTHVGSGAYGSVCSAIDKRSGEKVAIKKLSRPFQSEIFAKRAYRELLLLKHMQHENVIGLLDVFTPASSLRNFYDFYLVMPFMQTDLQKIMGMEFSEEKIQYLVYQMLKGLKDLKPGNLAVNEDCELKILDFGLARHADAEMTGYVVTRWYRAPEVILSWMHYNQTVDIWSVGCIMAEMLTGKTLFKGKDYLDQLTQILKVTGVPGTEFVQKLNDKAAKSYIQSLPQTPRKDFTQLFPRASPQAADLLEKMLELDVDKRLTAAQALTHPFFEPFRDPEEETEAQQPFDDSLEHEKLTVDEWKQHIYKEIVNFSPIARKDSRRRSGMKL

SEQ ID NO: 131621 - protein, 257 aa, Artificial Sequence
  derived and/or modified sequence
MSLIRKKGFYKQDVNKTAWELPKTYVSPTHVGSGAYGSVCSAIDKRSGEKVAIKKLSRPFQSEIFAKRAYRELLLLKHMQHENVIGLLDVFTPASSLRNFYDFYLVMPFMQTDLQKIMGMEFSEEKIQYLVYQMLKGLKYIHSAGVVHRDLKPGNLAVNEDCELKILDFGLARHADAEMTGYVVTRWYRAPEVILSWMHYNQTGQILHPVPATDPQEGFHSAVPTGQPPGCGPAGEDAGARRGQAPDGRAGPHPSLL

SEQ ID NO: 131622 - protein, 310 aa, Artificial Sequence
  derived and/or modified sequence
MSLIRKKGFYKQDVNKTAWELPKTYVSPTHVGSGAYGSVCSAIDKRSGEKVAIKKLSRPFQSEIFAKRAYRELLLLKHMQHENVIGLLDVFTPASSLRNFYDFYLVMPFMQTDLQKIMGMEFSEEKIQYLVYQMLKGLKYIHSAGVVHRDLKPGNLAVNEDCELKILDFGLARHADAEMTGYVVTRWYRAPEVILSWMHYNQTVDIWSVGCIMAEMLTGKTLFKGKDYLLEKMLELDVDKRLTAAQALTHPFFEPFRDPEEETEAQQPFDDSLEHEKLTVDEWKQHIYKEIVNFSPIARKDSRRRSGMKL

SEQ ID NO: 131623 - DNA, 1098 bp, Artificial Sequence
  derived and/or modified sequence
atgagcctgatcagaaagaagggcttctacaagcaggacgtgaacaagaccgcctgggagctgcccaagacctacgtgagccccacccacgtgggcagcggcgcctacggcagcgtgtgcagcgccatcgacaagagaagcggcgagaaggtggccatcaagaagctgagcagacccttccagagcgagatcttcgccaagagagcctacagagagctgctgctgctgaagcacatgcagcacgagaacgtgatcggcctgctggacgtgttcacccccgccagcagcctgagaaacttctacgacttctacctggtgatgcccttcatgcagaccgacctgcagaagatcatgggcatggagttcagcgaggagaagatccagtacctggtgtaccagatgctgaagggcctgaagtacatccacagcgccggcgtggtgcacagagacctgaagcccggcaacctggccgtgaacgaggactgcgagctgaagatcctggacttcggcctggccagacacgccgacgccgagatgaccggctacgtggtgaccagatggtacagagcccccgaggtgatcctgagctggatgcactacaaccagaccgtggacatctggagcgtgggctgcatcatggccgagatgctgaccggcaagaccctgttcaagggcaaggactacctggaccagctgacccagatcctgaaggtgaccggcgtgcccggcaccgagttcgtgcagaagctgaacgacaaggccgccaagagctacatccagagcctgccccagacccccagaaaggacttcacccagctgttccccagagccagcccccaggccgccgacctgctggagaagatgctggagctggacgtggacaagagactgaccgccgcccaggccctgacccaccccttcttcgagcccttcagagaccccgaggaggagaccgaggcccagcagcccttcgacgacagcctggagcacgagaagctgaccgtggacgagtggaagcagcacatctacaaggagatcgtgaacttcagccccatcgccagaaaggacagcagaagaagaagcggcatgaagctgtag

SEQ ID NO: 131624 - DNA, 1098 bp, Artificial Sequence
  derived and/or modified sequence
atgtctctgatccgaaagaagggcttttataagcaagacgttaacaagaccgcgtgggaactgccaaagacctatgtttcacccacacatgtgggtagtggcgcatacggaagcgtgtgctccgcaattgataagagaagtggcgagaaggtggcaattaagaaactctcaaggccctttcagagcgagatttttgccaaaagggcctacagagagctgctgttattaaaacacatgcagcacgagaacgtcattggcctgctagatgtcttcacacccgcttcgtctctccgaaacttctacgacttttacctggtgatgccattcatgcagaccgatctacagaaaattatgggcatggaattctctgaggaaaagattcagtacttagtctatcaaatgcttaagggacttaaatacatccattcagctggggtggtgcacagggacctaaagccaggtaatttggcagtaaacgaggactgtgagttgaaaattctggacttcggcctcgcacgacatgcagatgctgagatgaccggatatgtcgtaacccggtggtatcgcgcacccgaagttatcctgagctggatgcattacaaccagacggttgacatctggtccgttgggtgcatcatggcggaaatgctgaccggcaagaccctgttcaagggcaaggactatttagaccagctgactcaaattctgaaggtaacaggggtacctggcacagagtttgtccagaagttgaacgacaaggccgctaagtcttatatccagtctctccctcagaccccccggaaggattttactcagctcttcccacgggcatcaccacaagccgccgatctcctagagaaaatgctcgagcttgacgttgataagcggttgaccgcagcgcaggccctgacccatccgttctttgaaccttttagggatcctgaagaagagactgaagcacagcagcccttcgacgactccctggaacacgaaaagctgacagttgacgagtggaaacaacacatctacaaagagatagtcaatttctccccaatcgcgcgaaaagactctcggaggcggtcaggcatgaagctttag

SEQ ID NO: 131625 - DNA, 1098 bp, Artificial Sequence
  derived and/or modified sequence
atgagcctcatcaggaagaagggcttctacaagcaggatgtgaacaagacagcctgggagctgcccaagacctacgtgagccccacccacgtgggcagcggggcctacggctctgtgtgcagcgccatcgacaagaggtctggagagaaggtggccatcaagaagctgagccggcccttccagagcgagatctttgccaagagggcctaccgggagctgctgctgctgaagcacatgcagcatgaaaatgtgattggcctgctggatgtgttcaccccagccagcagcctgaggaacttctatgacttctacctggtgatgcccttcatgcagacagacctgcagaagatcatgggcatggagttcagcgaggagaagatccagtacctggtgtaccagatgctgaagggcctgaagtacatccacagcgctggggtggtgcaccgggacctgaagccaggcaacctggccgtgaatgaagactgtgagctgaagatcctggactttggcctggcccggcatgctgatgctgagatgacaggctacgtggtgacccgctggtaccgggcccctgaggtgatcctgtcctggatgcactacaaccagacagtggacatctggagcgtgggctgcatcatggccgagatgctgaccgggaagaccctcttcaagggcaaggactacctggaccagctgacccagatcctgaaggtgactggagtgcccggcacagaatttgtgcagaagctgaatgacaaggccgccaagagctacatccagagcctgccccagacccccaggaaggacttcacccagctgttcccccgggccagcccccaggccgctgacctgctggagaagatgctggagctggatgtggacaagaggctgacagctgcccaggccctgacccaccccttctttgagcccttccgggaccctgaggaggagacagaggcccagcagccctttgatgacagcctggagcacgagaagctgactgtggatgagtggaagcagcacatctacaaggagatcgtgaacttcagccccatcgccaggaaggacagcagaagaagaagtggcatgaagctgtag

SEQ ID NO: 131626 - DNA, 1098 bp, Artificial Sequence
  derived and/or modified sequence
atgagcctgatccggaagaagggcttctacaagcaggacgtgaacaaaaccgcatgggagctgcccaagacgtacgtgagtcccacacatgtgggaagtggtgcgtatggttccgtatgctctgcaatcgacaagcggagcggtgagaaggttgctatcaagaagttatctcgtccattccaaagtgaaatctttgccaaacgggcatacagagagttactgctgctgaaacatatgcagcacgagaacgtcatcgggctgttggatgtattcacaccagctagtagccttagaaacttttatgatttctacttggtgatgccctttatgcagactgatcttcagaagattatgggcatggagtttagtgaagagaagatccagtatctggtttaccagatgctcaagggactgaagtatatacattctgcaggagtggtacaccgtgatctgaagcccgggaacctggccgtgaacgaagattgcgagctgaagattcttgatttcggcctggcacggcatgctgatgctgagatgaccggctatgtggtgactaggtggtatcgggcacccgaggtgatcttatcttggatgcactacaaccaaaccgtggatatatggagcgtcggatgtatcatggcagaaatgctcaccggcaagacacttttcaaggggaaagattacctggatcagctaacacagatcctgaaggtcactggcgtgcccggaactgagttcgtccagaaacttaacgacaaggcggccaaatcatacatccagtcccttccccaaactcccaggaaggactttactcaactgtttccgcgggcaagcccccaggctgccgacctgttagaaaaaatgcttgagttggatgtggacaagagacttacagccgctcaggctttgactcaccccttttttgaaccttttcgcgatccggaggaggagacagaagctcagcagccattcgatgatagcctggaacacgaaaagttgacagtcgacgagtggaagcagcatatctacaaggaaattgtcaactttagccccattgcccggaaggattcgagaaggcggtcagggatgaaactatag

SEQ ID NO: 131627 - DNA, 1098 bp, Artificial Sequence
  derived and/or modified sequence
atgtctctgattcggaaaaaaggcttttataaacaggatgtgaacaaaactgcttgggaactgccaaaaacctacgtgtctccaacccacgtcggctcaggagcctacgggtcagtgtgctcagccatcgataaacggtccggcgaaaaggttgcaatcaagaaactgtcccgaccctttcagtccgagattttcgccaaaagggcgtatcgtgagttactacttctgaagcatatgcagcatgagaatgtcatcggactgctggatgtgttcacccctgcctctagcctgcggaatttttacgacttctatttggtcatgccttttatgcaaactgatcttcagaaaattatgggaatggagttcagtgaagaaaagattcagtacctggtttaccagatgctcaaagggctgaagtacatccactccgctggggtggtccatagggatctcaagccgggaaatctcgccgtgaacgaggactgtgaattgaagatcctcgacttcggcctagcacgccatgccgatgccgagatgacagggtacgttgtgacacggtggtatcgtgccccagaagtgatactgtcttggatgcactacaaccagactgttgatatctggagtgtgggatgcataatggcagagatgttgactgggaagacgctgttcaaggggaaggattatctcgatcagctgacccagatcctgaaagttaccggcgttccgggaactgagtttgtccagaaactgaacgacaaagctgcaaagtcgtatattcaatccctgcctcagactcctcgaaaagattttacacaactatttcccagagcaagtccccaggccgctgacctcctcgaaaaaatgctggaactcgatgtagataaaagactcacagctgcccaggcactgacacacccgttctttgagcctttcagagaccccgaagaggaaacggaagcgcagcaaccttttgatgattcactggaacacgaaaagttgacagtcgatgaatggaagcagcacatttacaaggagatagtgaacttcagcccaatagcgaggaaggatagtcggcgtaggtcggggatgaaactctag

SEQ ID NO: 131628 - DNA, 459 bp, Artificial Sequence
  derived and/or modified sequence
atgcagcacgagaacgtgatcggcctgctggacgtgttcacccccgccagcagcctgagaaacttctacgacttctacctggtgatgcccttcatgcagaccgacctgcagaagatcatgggcatggagttcagcgaggagaagatccagtacctggtgtaccagatgctgaagggcctgaagtacatccacagcgccggcgtggtgcacagagacctgaagcccggcaacctggccgtgaacgaggactgcgagctgaagatcctggacttcggcctggccagacacgccgacgccgagatgaccggctacgtggtgaccagatggtacagagcccccgaggtgatcctgagctggatgcactacaaccagaccggccagatcctgcaccccgtgcccgccaccgacccccaggagggcttccacagcgccgtgcccaccggccagccccccggctag

SEQ ID NO: 131629 - DNA, 1068 bp, Artificial Sequence
  derived and/or modified sequence
atgagcctgatcagaaagaagggcttctacaagcaggacgtgaacaagaccgcctgggagctgcccaagacctacgtgagccccacccacgtgggcagcggcgcctacggcagcgtgtgcagcgccatcgacaagagaagcggcgagaaggtggccatcaagaagctgagcagacccttccagagcgagatcttcgccaagagagcctacagagagctgctgctgctgaagcacatgcagcacgagaacgtgatcggcctgctggacgtgttcacccccgccagcagcctgagaaacttctacgacttctacctggtgatgcccttcatgcagaccgacctgcagaagatcatgggcatggagttcagcgaggagaagatccagtacctggtgtaccagatgctgaagggcctgaaggacctgaagcccggcaacctggccgtgaacgaggactgcgagctgaagatcctggacttcggcctggccagacacgccgacgccgagatgaccggctacgtggtgaccagatggtacagagcccccgaggtgatcctgagctggatgcactacaaccagaccgtggacatctggagcgtgggctgcatcatggccgagatgctgaccggcaagaccctgttcaagggcaaggactacctggaccagctgacccagatcctgaaggtgaccggcgtgcccggcaccgagttcgtgcagaagctgaacgacaaggccgccaagagctacatccagagcctgccccagacccccagaaaggacttcacccagctgttccccagagccagcccccaggccgccgacctgctggagaagatgctggagctggacgtggacaagagactgaccgccgcccaggccctgacccaccccttcttcgagcccttcagagaccccgaggaggagaccgaggcccagcagcccttcgacgacagcctggagcacgagaagctgaccgtggacgagtggaagcagcacatctacaaggagatcgtgaacttcagccccatcgccagaaaggacagcagaagaagaagcggcatgaagctgtag

SEQ ID NO: 131630 - DNA, 774 bp, Artificial Sequence
  derived and/or modified sequence
atgagcctgatcagaaagaagggcttctacaagcaggacgtgaacaagaccgcctgggagctgcccaagacctacgtgagccccacccacgtgggcagcggcgcctacggcagcgtgtgcagcgccatcgacaagagaagcggcgagaaggtggccatcaagaagctgagcagacccttccagagcgagatcttcgccaagagagcctacagagagctgctgctgctgaagcacatgcagcacgagaacgtgatcggcctgctggacgtgttcacccccgccagcagcctgagaaacttctacgacttctacctggtgatgcccttcatgcagaccgacctgcagaagatcatgggcatggagttcagcgaggagaagatccagtacctggtgtaccagatgctgaagggcctgaagtacatccacagcgccggcgtggtgcacagagacctgaagcccggcaacctggccgtgaacgaggactgcgagctgaagatcctggacttcggcctggccagacacgccgacgccgagatgaccggctacgtggtgaccagatggtacagagcccccgaggtgatcctgagctggatgcactacaaccagaccggccagatcctgcaccccgtgcccgccaccgacccccaggagggcttccacagcgccgtgcccaccggccagccccccggctgcggccccgccggcgaggacgccggcgccagaagaggccaggcccccgacggcagagccggcccccaccccagcctgctgtag

SEQ ID NO: 131631 - DNA, 933 bp, Artificial Sequence
  derived and/or modified sequence
atgagcctgatcagaaagaagggcttctacaagcaggacgtgaacaagaccgcctgggagctgcccaagacctacgtgagccccacccacgtgggcagcggcgcctacggcagcgtgtgcagcgccatcgacaagagaagcggcgagaaggtggccatcaagaagctgagcagacccttccagagcgagatcttcgccaagagagcctacagagagctgctgctgctgaagcacatgcagcacgagaacgtgatcggcctgctggacgtgttcacccccgccagcagcctgagaaacttctacgacttctacctggtgatgcccttcatgcagaccgacctgcagaagatcatgggcatggagttcagcgaggagaagatccagtacctggtgtaccagatgctgaagggcctgaagtacatccacagcgccggcgtggtgcacagagacctgaagcccggcaacctggccgtgaacgaggactgcgagctgaagatcctggacttcggcctggccagacacgccgacgccgagatgaccggctacgtggtgaccagatggtacagagcccccgaggtgatcctgagctggatgcactacaaccagaccgtggacatctggagcgtgggctgcatcatggccgagatgctgaccggcaagaccctgttcaagggcaaggactacctgctggagaagatgctggagctggacgtggacaagagactgaccgccgcccaggccctgacccaccccttcttcgagcccttcagagaccccgaggaggagaccgaggcccagcagcccttcgacgacagcctggagcacgagaagctgaccgtggacgagtggaagcagcacatctacaaggagatcgtgaacttcagccccatcgccagaaaggacagcagaagaagaagcggcatgaagctgtag

SEQ ID NO: 131632 - DNA, 459 bp, Artificial Sequence
  derived and/or modified sequence
atgcagcacgaaaacgtgatcgggctgctggacgtgtttacacctgccagttcactccgcaacttctacgacttctacctggtgatgccttttatgcaaactgatctccagaagatcatgggaatggaatttagtgaggaaaaaatacagtacttggtttatcagatgttgaaaggattgaaatatatacattctgccggagtggtccaccgggacttgaaacctggcaatctggcagtgaatgaggattgcgagctgaagatcctggatttcggattagcaaggcacgctgacgccgagatgaccggctatgtggtgactagatggtatcgggcccccgaggtcatcctgagttggatgcactacaatcagacgggacagatcttacaccccgtacctgccaccgacccacaggaagggttccatagcgccgtcccaaccggccagccacccggctag

SEQ ID NO: 131633 - DNA, 1068 bp, Artificial Sequence
  derived and/or modified sequence
atgtccctcattcggaaaaagggcttctataagcaggacgtgaataaaactgcatgggaactacctaagacgtatgtgagcccaactcatgtaggctctggggcctatgggagcgtttgttccgccattgataagcgaagtggcgagaaggtggccatcaagaagcttagtaggccctttcagagtgaaattttcgcaaagagagcttacagggaactgctattactgaagcacatgcagcacgagaacgtcataggcctgctggatgttttcacacctgcgtcatcactaaggaacttttacgatttctacctagtgatgcccttcatgcaaaccgacctccagaaaatcatgggtatggagttcagtgaagaaaagatacaatatctagtgtatcaaatgctgaagggtctgaaggacctgaagcctggcaacctggctgtaaatgaggattgcgaactcaaaatccttgattttggtctggcacgacacgcagacgccgagatgacaggatacgtggttacaagatggtaccgcgccccagaagtgatcttgtcatggatgcactacaaccaaaccgtggatatatggagcgtcggatgcatcatggccgagatgcttacagggaaaacactgtttaaaggtaaggattatctggatcagcttactcagatcctgaaagttaccggcgttcccggtaccgaattcgtgcagaagctgaacgataaagcggcaaagagctatattcaatcccttccgcagacaccccggaaggattttactcagctgtttccacgcgctagcccccaggctgccgacctgcttgagaagatgctcgagctggacgttgacaagagactcaccgccgcccaagcgcttacccacccatttttcgaaccctttagggatcccgaagaggagacagaagcccaacagcccttcgatgactccctggaacacgaaaagctgaccgtggatgagtggaagcagcacatctataaggagattgtcaatttttctcctatcgcaaggaaggactctaggcggcgcagcgggatgaagttgtag

SEQ ID NO: 131634 - DNA, 774 bp, Artificial Sequence
  derived and/or modified sequence
atgtcactgatcaggaagaaaggcttctacaaacaggatgtcaataagacagcatgggaattgcctaaaacctatgtaagtcctactcacgtgggctccggagcctatggaagcgtatgttccgcaatcgacaaaagatccggcgagaaagttgccatcaagaagctgtccagaccttttcaatctgagatctttgccaagagagcgtatcgagagctcctgcttctgaaacacatgcagcacgagaatgtgatcgggctcctagacgtattcacgcccgcttcatcgctgcgaaacttttacgatttttatttagtaatgccttttatgcagacagatctgcaaaagatcatgggcatggaattttccgaggagaagattcagtatcttgtgtaccagatgctgaagggactcaaatatattcacagcgctggggtggtgcatcgagacctgaagccaggcaacctggccgtgaatgaagattgtgagctgaagatattggactttggactggcccggcatgccgacgccgagatgactggatatgtagtcaccagatggtaccgagctcctgaggttatcctgagttggatgcactataatcagacaggccagattctacaccccgtcccggccactgatccccaggaaggctttcattcagccgtccctacgggtcaaccgccagggtgtgggcctgcgggcgaggatgcgggcgctcggcgaggacaggcccccgacggccgggctggccctcacccctccttgctgtag

SEQ ID NO: 131635 - DNA, 933 bp, Artificial Sequence
  derived and/or modified sequence
atgtctctaatacggaaaaaggggttttacaagcaggacgtgaacaagactgcttgggagctgccaaaaacatacgtctcccctacacacgtagggtccggggcttacggctctgtgtgctcagccatcgataagaggtcaggcgagaaagttgcaataaagaagctgtccagaccctttcaaagcgaaatatttgctaagagggcctacagagaactcctgcttctgaagcatatgcagcatgaaaatgtgatcggcctattggatgtattcacacccgcctctagtcttcgtaatttttatgacttctatttagtgatgccttttatgcaaactgacctccaaaaaatcatgggtatggagttttcggaggagaagattcagtatcttgtataccagatgctgaagggtctgaaatacattcactccgcgggagtggtccaccgcgatcttaaaccgggaaatcttgcagtcaatgaagactgtgagctaaagattctcgacttcggccttgctcggcacgccgacgcagagatgaccggatatgtcgtgacccgctggtatcgagcccctgaggttatcctgagctggatgcattacaaccaaaccgtggatatttggagcgtaggctgtataatggcagaaatgctgactgggaagactcttttcaaaggaaaagattatcttttggaaaagatgttggagctggacgtggataagcggctaactgctgcgcaagcactgactcatccctttttcgagcccttcagagaccctgaggaagaaactgaagcgcagcagccattcgatgattctctggagcatgagaagctcactgtggacgaatggaaacagcatatttataaagaaatagtcaatttctcccctatcgcgcgcaaggattccaggcgcaggtctgggatgaaactttag

SEQ ID NO: 131636 - DNA, 459 bp, Artificial Sequence
  derived and/or modified sequence
atgcagcatgaaaatgtgattggcctgctggatgtgttcaccccagccagcagcctgaggaacttctatgacttctacctggtgatgcccttcatgcagacagacctgcagaagatcatgggcatggagttcagcgaggagaagatccagtacctggtgtaccagatgctgaagggcctgaagtacatccacagcgctggggtggtgcaccgggacctgaagccaggcaacctggccgtgaatgaagactgtgagctgaagatcctggactttggcctggcccggcatgctgatgctgagatgacaggctacgtggtgacccgctggtaccgggcccctgaggtgatcctgtcctggatgcactacaaccagacaggccagatcctgcaccctgtgcctgccacagacccccaggagggcttccacagcgctgtgcccaccggccagcccccaggatag

SEQ ID NO: 131637 - DNA, 1068 bp, Artificial Sequence
  derived and/or modified sequence
atgagcctcatcaggaagaagggcttctacaagcaggatgtgaacaagacagcctgggagctgcccaagacctacgtgagccccacccacgtgggcagcggggcctacggctctgtgtgcagcgccatcgacaagaggtctggagagaaggtggccatcaagaagctgagccggcccttccagagcgagatctttgccaagagggcctaccgggagctgctgctgctgaagcacatgcagcatgaaaatgtgattggcctgctggatgtgttcaccccagccagcagcctgaggaacttctatgacttctacctggtgatgcccttcatgcagacagacctgcagaagatcatgggcatggagttcagcgaggagaagatccagtacctggtgtaccagatgctgaagggcctgaaggacctgaagccaggcaacctggccgtgaatgaagactgtgagctgaagatcctggactttggcctggcccggcatgctgatgctgagatgacaggctacgtggtgacccgctggtaccgggcccctgaggtgatcctgtcctggatgcactacaaccagacagtggacatctggagcgtgggctgcatcatggccgagatgctgaccgggaagaccctcttcaagggcaaggactacctggaccagctgacccagatcctgaaggtgactggagtgcccggcacagaatttgtgcagaagctgaatgacaaggccgccaagagctacatccagagcctgccccagacccccaggaaggacttcacccagctgttcccccgggccagcccccaggccgctgacctgctggagaagatgctggagctggatgtggacaagaggctgacagctgcccaggccctgacccaccccttctttgagcccttccgggaccctgaggaggagacagaggcccagcagccctttgatgacagcctggagcacgagaagctgactgtggatgagtggaagcagcacatctacaaggagatcgtgaacttcagccccatcgccaggaaggacagcagaagaagaagtggcatgaagctgtag

SEQ ID NO: 131638 - DNA, 774 bp, Artificial Sequence
  derived and/or modified sequence
atgagcctcatcaggaagaagggcttctacaagcaggatgtgaacaagacagcctgggagctgcccaagacctacgtgagccccacccacgtgggcagcggggcctacggctctgtgtgcagcgccatcgacaagaggtctggagagaaggtggccatcaagaagctgagccggcccttccagagcgagatctttgccaagagggcctaccgggagctgctgctgctgaagcacatgcagcatgaaaatgtgattggcctgctggatgtgttcaccccagccagcagcctgaggaacttctatgacttctacctggtgatgcccttcatgcagacagacctgcagaagatcatgggcatggagttcagcgaggagaagatccagtacctggtgtaccagatgctgaagggcctgaagtacatccacagcgctggggtggtgcaccgggacctgaagccaggcaacctggccgtgaatgaagactgtgagctgaagatcctggactttggcctggcccggcatgctgatgctgagatgacaggctacgtggtgacccgctggtaccgggcccctgaggtgatcctgtcctggatgcactacaaccagacaggccagatcctgcaccctgtgcctgccacagacccccaggagggcttccacagcgctgtgcccaccggccagcccccaggctgcggccctgctggggaggatgctggggcccggcggggccaggccccagatggccgggccggcccccaccccagcctgctgtag

SEQ ID NO: 131639 - DNA, 933 bp, Artificial Sequence
  derived and/or modified sequence
atgagcctcatcaggaagaagggcttctacaagcaggatgtgaacaagacagcctgggagctgcccaagacctacgtgagccccacccacgtgggcagcggggcctacggctctgtgtgcagcgccatcgacaagaggtctggagagaaggtggccatcaagaagctgagccggcccttccagagcgagatctttgccaagagggcctaccgggagctgctgctgctgaagcacatgcagcatgaaaatgtgattggcctgctggatgtgttcaccccagccagcagcctgaggaacttctatgacttctacctggtgatgcccttcatgcagacagacctgcagaagatcatgggcatggagttcagcgaggagaagatccagtacctggtgtaccagatgctgaagggcctgaagtacatccacagcgctggggtggtgcaccgggacctgaagccaggcaacctggccgtgaatgaagactgtgagctgaagatcctggactttggcctggcccggcatgctgatgctgagatgacaggctacgtggtgacccgctggtaccgggcccctgaggtgatcctgtcctggatgcactacaaccagacagtggacatctggagcgtgggctgcatcatggccgagatgctgaccgggaagaccctcttcaagggcaaggactacctgctggagaagatgctggagctggatgtggacaagaggctgacagctgcccaggccctgacccaccccttctttgagcccttccgggaccctgaggaggagacagaggcccagcagccctttgatgacagcctggagcacgagaagctgactgtggatgagtggaagcagcacatctacaaggagatcgtgaacttcagccccatcgccaggaaggacagcagaagaagaagtggcatgaagctgtag

SEQ ID NO: 131640 - DNA, 459 bp, Artificial Sequence
  derived and/or modified sequence
atgcagcacgagaacgtgatcggcctgctggacgtgttcacccccgcctctagtttaaggaatttctatgatttctatcttgtcatgcccttcatgcagaccgatctccagaagatcatgggaatggagttttcagaggaaaaaattcaatacctggtctaccagatgcttaaagggttgaagtatattcacagtgctggcgttgtgcatagagacctaaagcccggcaatcttgcggtgaatgaagactgtgagctcaagatactcgatttcgggctggctaggcacgctgatgctgagatgaccggttatgttgtgacacggtggtaccgcgctcctgaagtgatcctgagttggatgcattacaaccagacaggacagatcctgcatccggtacctgccaccgatccacaagaaggttttcactcagctgtgccaaccggacagccccctggctag

SEQ ID NO: 131641 - DNA, 1068 bp, Artificial Sequence
  derived and/or modified sequence
atgagcctgatccggaagaagggcttctacaagcaggacgtgaacaaaaccgcgtgggagttgccgaagacttatgtgagtcctacacacgtgggatccggtgcgtacgggagcgtctgcagcgctatagataagaggtcaggagagaaagtcgccatcaagaagctgtcccggccttttcagtctgaaatcttcgccaagagagcatatcgggagttgctcctgctaaagcatatgcagcacgagaacgtaatcggacttctggacgtctttacacctgcaagcagcctcaggaacttttatgatttttatctagtcatgcccttcatgcaaacggacttgcagaagattatgggaatggaattcagtgaagagaagattcagtatctggtgtaccaaatgctgaagggcctcaaggatctgaaacctggcaacctcgcggtgaacgaggactgtgagctcaagatacttgacttcgggctggcacgtcatgcagatgctgaaatgactggatatgtggttacccgctggtatcgggcccctgaagttattctatcatggatgcactataaccagacggttgatatatggagcgtgggttgcattatggccgagatgttgacaggtaagaccctgttcaaaggcaaagactacttggatcagctcacccagatcctgaaagtaacaggagtgcctgggactgagttcgtacagaaacttaacgataaggccgcaaagagttacatccagagcctgccgcagaccccacggaaagattttacgcagctctttccgagggcttctccccaggccgcagacttgcttgagaaaatgcttgagctggacgtagacaaaaggttaaccgccgcccaggctctcacccatcccttctttgagccctttagggatcctgaggaagagacagaggcgcagcaaccgtttgatgatagcttggaacacgaaaaacttaccgtcgacgagtggaagcagcacatctacaaagaaattgtgaatttttcccctatcgccagaaaggactcacgacgcagatccgggatgaagctgtag

SEQ ID NO: 131642 - DNA, 2052 bp, Artificial Sequence
  derived and/or modified sequence
cgtgcctgggccgcacctgccgcagtggctccgtcgggccgggcggaagcgcgggagcgcagggctggacaggcccgggcgtggcggccccggcgcacctgggcgagccggcaggtgggagcgtagcagcccggggcccccgccctcgcgcgggggaggagcgggcggcgcggggcgggcgcagcgggggtcggggcgctgggagcccgttgggccgcgaacgcagccgccacgctggggccgccgagatcgggtgcccgggatgagcctcatccggaaaaagggcttctacaagcaggacgtcaacaagacagcctgggagctgcccaagacctacgtgtccccgacgcacgtcggcagcggggcctatggctccgtgtgctcggccatcgacaagcggtcaggggagaaggtggccatcaagaagctgagccgaccctttcagtccgagatcttcgccaagcgcgcctaccgggagctgctgctgctgaagcacatgcagcatgagaacgtcattgggctcctggatgtcttcaccccagcctcctccctgcgcaacttctatgacttctacctggtgatgcccttcatgcagacggatctgcagaagatcatggggatggagttcagtgaggagaagatccagtacctggtgtatcagatgctcaaaggccttaagtacatccactctgctggggtcgtgcacagggacctgaagccaggcaacctggctgtgaatgaggactgtgaactgaagattctggattttgggctggcgcgacatgcagacgccgagatgactggctacgtggtgacccgctggtaccgagcccccgaggtgatcctcagctggatgcactacaaccagacagtggacatctggtctgtgggctgtatcatggcagagatgctgacagggaaaactctgttcaaggggaaagattacctggaccagctgacccagatcctgaaagtgaccggggtgcctggcacggagtttgtgcagaagctgaacgacaaagcggccaaatcctacatccagtccctgccacagacccccaggaaggatttcactcagctgttcccacgggccagcccccaggctgcggacctgctggagaagatgctggagctagacgtggacaagcgcctgacggccgcgcaggccctcacccatcccttctttgaacccttccgggaccctgaggaagagacggaggcccagcagccgtttgatgattccttagaacacgagaaactcacagtggatgaatggaagcagcacatctacaaggagattgtgaacttcagccccattgcccggaaggactcacggcgccggagtggcatgaagctgtagggactcatcttgcatggcaccgccggccagacactgcccaaggaccagtatttgtcactaccaaactcagcccttcttggaatacagcctttcaagcagaggacagaagggtccttctccttatgtgggaaatgggcctagtagatgcagaattcaaagatgtcggttgggagaaactagctctgatcctaacaggccacgttaaactgcccatctggagaatcgcctgcaggtggggccctttccttcccgccagagtggggctgagtgggcgctgagccaggccgggggcctatggcagtgatgctgtgttggtttcctagggatgctctaacgaattaccacaaacctggtggattgaaacagcagaacttgattcccttacagttctggaggctggaaatctgggatggaggtgttggcagggctgtggtccctttgaaggctctggggaagaatccttccttggctctttttagcttgtggcggcagtgggcagtccgtggcattccccagcttattgctgcatcactccagtctctgtctcttctgttctctcctcttttaacaacagtcattggatttagggcccaccctaatcctgtgtgatcttatcttgatccttattaattaaacctgcaaatactctagttccaaataaagtcacattctcaggttccaggtggacatga

SEQ ID NO: 131643 - DNA, 774 bp, Artificial Sequence
  derived and/or modified sequence
atgagcctgatccggaagaagggcttctacaagcaggacgtgaacaagaccgcatgggagctcccaaaaacatacgtgtcacccactcatgtcgggtctggagcttatgggtccgtgtgcagcgcaatcgacaagaggagcggggaaaaggtcgccatcaagaaactctccaggccctttcaatctgagatctttgccaaaagagcttacagggagctcctgttattaaaacacatgcaacacgaaaatgtcattgggctactggatgtgtttactcctgcaagctctcttcgaaacttttacgacttttatctggtcatgccgttcatgcagaccgacctgcagaagattatgggcatggagttttctgaagagaagatacaatacttggtatatcagatgctcaaaggattgaagtacatccatagtgcaggagtggtccacagagacctgaaacctggcaatttggccgtcaacgaagattgcgaattgaagatactggacttcggcctggcacggcatgctgacgccgagatgaccgggtatgtggtgactcggtggtacagggctcctgaggtaattctgtcgtggatgcactacaaccaaacggggcagatcctgcacccggtgccagcaactgatccccaagaagggtttcacagcgcggtcccaaccggtcagccccccgggtgcggccccgcaggcgaggacgcgggcgctaggaggggacaggcccccgacgggagagccggccctcatccgagtctgttgtag

SEQ ID NO: 131644 - DNA, 933 bp, Artificial Sequence
  derived and/or modified sequence
atgagcctgatccggaagaagggcttctacaagcaggacgtgaacaaaaccgcttgggagctccctaaaacgtatgtgagcccaacccacgtggggtccggcgcttatggaagcgtctgctccgcgattgataagcgttcaggggagaaagtggccattaaaaaactgtcccgcccttttcagtctgaaatctttgcaaaaagggcctaccgcgaacttctgctgctgaagcacatgcagcatgagaatgtgatcggactgctggatgtgttcacaccagcttcttctctgagaaacttttatgatttttaccttgtcatgcccttcatgcagaccgaccttcagaaaataatgggaatggagtttagcgaagagaagatccagtacctggtttaccagatgctgaagggtctgaagtacatccacagtgccggcgtcgtgcaccgcgatctcaaaccaggtaatttagccgttaacgaggactgcgagttgaaaattctcgactttggccttgccagacacgccgacgcagaaatgacagggtacgtcgtgactagatggtacagggccccagaggtaattctgtcgtggatgcactataaccagaccgtggacatttggagtgtaggctgtatcatggccgaaatgctgaccgggaaaacactctttaagggaaaagactacctactagagaagatgctcgagcttgatgttgataagcgcctgaccgccgctcaggctctgacacatcctttttttgaaccctttagggatccagaagaggagaccgaggcccagcagcctttcgacgactctctggagcacgagaaactgacggtagacgaatggaagcagcacatctacaaggaaatcgtgaatttttcccccatcgcccggaaagattcgcggagacgttccggcatgaagctgtag

SEQ ID NO: 131645 - DNA, 1036 bp, Artificial Sequence
  derived and/or modified sequence
cccgacgcacgtcggcagcggggcctatggctccgtgtgctcggccatcgacaagcggtcaggggagaaggtggccatcaagaagctgagccgaccctttcagtccgagatcttcgccaagcgcgcctaccgggagctgctgctgctgaagcacatgcagcatgagaacgtcattgggctcctggatgtcttcaccccagcctcctccctgcgcaacttctatgacttctacctggtgatgcccttcatgcagacggatctgcagaagatcatggggatggagttcagtgaggagaagatccagtacctggtgtatcagatgctcaaaggccttaagtacatccactctgctggggtcgtgcacagggacctgaagccaggcaacctggctgtgaatgaggactgtgaactgaagattctggattttgggctggcgcgacatgcagacgccgagatgactggctacgtggtgacccgctggtaccgagcccccgaggtgatcctcagctggatgcactacaaccagacaggccaaatcctacatccagtccctgccacagacccccaggaaggatttcactcagctgttcccacgggccagcccccagggtgagtctcagagcccgctccccaggggcctctcagcgtatcccagagggcgggctctcccagcccctggtgtgaggctcttggctctgcccctgcagctgcggacctgctggagaagatgctggagctagacgtggacaagcgcctgacggccgcgcaggccctcacccatcccttctttgaacccttccgggaccctgaggaagagacggaggcccagcagccgtttgatgattccttagaacacgagaaactcacagtggatgaatggaagcgtaagagctggggcctcgggcttcctcgcctccgcctgcagcctctcttccttgcttcctccatctttgtgcctggcctctgccagccctacctgccacctccttcttggtgggcattgtctcctgggtgcttctttctccttgagctgact

SEQ ID NO: 131646 - DNA, 1637 bp, Artificial Sequence
  derived and/or modified sequence
cgtgcctgggccgcacctgccgcagtggctccgtcgggccgggcggaagcgcgggagcgcagggctggacaggcccgggcgtggcggccccggcgcacctgggcgagccggcaggtgggagcgtagcagcccggggcccccgccctcgcgcgggggaggagcgggcggcgcggggcgggcgcagcgggggtcggggcgctgggagcccgttgggccgcgaacgcagccgccacgctggggccgccgagatcgggtgcccgggatgagcctcatccggaaaaagggcttctacaagcaggacgtcaacaagacagcctgggagctgcccaagacctacgtgtccccgacgcacgtcggcagcggggcctatggctccgtgtgctcggccatcgacaagcggtcaggggagaaggtggccatcaagaagctgagccgaccctttcagtccgagatcttcgccaagcgcgcctaccgggagctgctgctgctgaagcacatgcagcatgagaacgtcattgggctcctggatgtcttcaccccagcctcctccctgcgcaacttctatgacttctacctggtgatgcccttcatgcagacggatctgcagaagatcatggggatggagttcagtgaggagaagatccagtacctggtgtatcagatgctcaaaggccttaaggacctgaagccaggcaacctggctgtgaatgaggactgtgaactgaagattctggattttgggctggcgcgacatgcagacgccgagatgactggctacgtggtgacccgctggtaccgagcccccgaggtgatcctcagctggatgcactacaaccagacagtggacatctggtctgtgggctgtatcatggcagagatgctgacagggaaaactctgttcaaggggaaagattacctggaccagctgacccagatcctgaaagtgaccggggtgcctggcacggagtttgtgcagaagctgaacgacaaagcggccaaatcctacatccagtccctgccacagacccccaggaaggatttcactcagctgttcccacgggccagcccccaggctgcggacctgctggagaagatgctggagctagacgtggacaagcgcctgacggccgcgcaggccctcacccatcccttctttgaacccttccgggaccctgaggaagagacggaggcccagcagccgtttgatgattccttagaacacgagaaactcacagtggatgaatggaagcagcacatctacaaggagattgtgaacttcagccccattgcccggaaggactcacggcgccggagtggcatgaagctgtagggactcatcttgcatggcaccgccggccagacactgcccaaggaccagtatttgtcactaccaaactcagcccttcttggaatacagcctttcaagcagaggacagaagggtccttctccttatgtgggaaatgggcctagtagatgcagaattcaaagatgtcggttgggagaaactagctctgatcctaacaggccacgttaaactgcccatctggagaatcgcctgcaggtggggccctttccttcccgccagagtggggctgagtgggcgctgagccaggccgggggcctatggcagtgatgc

SEQ ID NO: 131647 - DNA, 1664 bp, Artificial Sequence
  derived and/or modified sequence
gggcgctgggagcccgttgggccgcgaacgcagccgccacgctggggccgccgagatcgggtgcccgggatgagcctcatccggaaaaagggcttctacaagcaggacgtcaacaagacagcctgggagctgcccaagacctacgtgtccccgacgcacgtcggcagcggggcctatggctccgtgtgctcggccatcgacaagcggtcaggggagaaggtggccatcaagaagctgagccgaccctttcagtccgagatcttcgccaagcgcgcctaccgggagctgctgctgctgaagcacatgcagcatgagaacgtcattgggctcctggatgtcttcaccccagcctcctccctgcgcaacttctatgacttctacctggtgatgcccttcatgcagacggatctgcagaagatcatggggatggagttcagtgaggagaagatccagtacctggtgtatcagatgctcaaaggccttaagtacatccactctgctggggtcgtgcacagggacctgaagccaggcaacctggctgtgaatgaggactgtgaactgaagattctggattttgggctggcgcgacatgcagacgccgagatgactggctacgtggtgacccgctggtaccgagcccccgaggtgatcctcagctggatgcactacaaccagacaggccaaatcctacatccagtccctgccacagacccccaggaaggatttcactcagctgttcccacgggccagcccccaggctgcggacctgctggagaagatgctggagctagacgtggacaagcgcctgacggccgcgcaggccctcacccatcccttctttgaacccttccgggaccctgaggaagagacggaggcccagcagccgtttgatgattccttagaacacgagaaactcacagtggatgaatggaagcagcacatctacaaggagattgtgaacttcagccccattgcccggaaggactcacggcgccggagtggcatgaagctgtagggactcatcttgcatggcaccgccggccagacactgcccaaggaccagtatttgtcactaccaaactcagcccttcttggaatacagcctttcaagcagaggacagaagggtccttctccttatgtgggaaatgggcctagtagatgcagaattcaaagatgtcggttgggagaaactagctctgatcctaacaggccacgttaaactgcccatctggagaatcgcctgcaggtggggccctttccttcccgccagagtggggctgagtgggcgctgagccaggccgggggcctatggcagtgatgctgtgttggtttcctagggatgctctaacgaattaccacaaacctggtggattgaaacagcagaacttgattcccttacagttctggaggctggaaatctgggatggaggtgttggcagggctgtggtccctttgaaggctctggggaagaatccttccttggctctttttagcttgtggcggcagtgggcagtccgtggcattccccagcttattgctgcatcactccagtctctgtctcttctgttctctcctcttttaacaacagtcattggatttagggcccaccctaatcctgtgtgatcttatcttgatccttattaattaaacctgcaaatactct

SEQ ID NO: 131648 - DNA, 1723 bp, Artificial Sequence
  derived and/or modified sequence
gcggcgcggggcgggcgcagcgggggtcggggcgctgggagcccgttgggccgcgaacgcagccgccacgctggggccgccgagatcgggtgcccgggatgagcctcatccggaaaaagggcttctacaagcaggacgtcaacaagacagcctgggagctgcccaagacctacgtgtccccgacgcacgtcggcagcggggcctatggctccgtgtgctcggccatcgacaagcggtcaggggagaaggtggccatcaagaagctgagccgaccctttcagtccgagatcttcgccaagcgcgcctaccgggagctgctgctgctgaagcacatgcagcatgagaacgtcattgggctcctggatgtcttcaccccagcctcctccctgcgcaacttctatgacttctacctggtgatgcccttcatgcagacggatctgcagaagatcatggggatggagttcagtgaggagaagatccagtacctggtgtatcagatgctcaaaggccttaagtacatccactctgctggggtcgtgcacagggacctgaagccaggcaacctggctgtgaatgaggactgtgaactgaagattctggattttgggctggcgcgacatgcagacgccgagatgactggctacgtggtgacccgctggtaccgagcccccgaggtgatcctcagctggatgcactacaaccagacagtggacatctggtctgtgggctgtatcatggcagagatgctgacagggaaaactctgttcaaggggaaagattacctgctggagaagatgctggagctagacgtggacaagcgcctgacggccgcgcaggccctcacccatcccttctttgaacccttccgggaccctgaggaagagacggaggcccagcagccgtttgatgattccttagaacacgagaaactcacagtggatgaatggaagcagcacatctacaaggagattgtgaacttcagccccattgcccggaaggactcacggcgccggagtggcatgaagctgtagggactcatcttgcatggcaccgccggccagacactgcccaaggaccagtatttgtcactaccaaactcagcccttcttggaatacagcctttcaagcagaggacagaagggtccttctccttatgtgggaaatgggcctagtagatgcagaattcaaagatgtcggttgggagaaactagctctgatcctaacaggccacgttaaactgcccatctggagaatcgcctgcaggtggggccctttccttcccgccagagtggggctgagtgggcgctgagccaggccgggggcctatggcagtgatgctgtgttggtttcctagggatgctctaacgaattaccacaaacctggtggattgaaacagcagaacttgattcccttacagttctggaggctggaaatctgggatggaggtgttggcagggctgtggtccctttgaaggctctggggaagaatccttccttggctctttttagcttgtggcggcagtgggcagtccgtggcattccccagcttattgctgcatcactccagtctctgtctcttctgttctctcctcttttaacaacagtcattggatttagggcccaccctaatcctgtgtgatcttatcttgatccttattaattaaacctgcaaatactctagttccaaataaagtcacattctcaggttccaggtggacatga

SEQ ID NO: 131649 - DNA, 459 bp, Artificial Sequence
  derived and/or modified sequence
atgcagcacgagaatgtgattggtttgctggatgtgttcactccggcttcatcccttagaaatttctacgacttctatctggtgatgcctttcatgcaaacggacctacaaaaaatcatgggcatggaattcagcgaggaaaagattcagtaccttgtgtaccagatgctgaaaggccttaagtacatacatagcgcgggtgtggtccaccgagacctcaaacccggaaatctggcagtgaacgaagattgtgagctgaaaatcctcgatttcgggctggcgaggcacgccgacgctgaaatgactggttatgtggtcactagatggtatagagcccctgaggtgattttaagctggatgcactataaccaaactggacaaatcttacacccagtccccgcaaccgacccacaggaaggcttccattccgcggtccccacaggtcagccccctgggtag

SEQ ID NO: 131650 - DNA, 1068 bp, Artificial Sequence
  derived and/or modified sequence
atgagtctcatacgcaagaaagggttttataaacaggacgtaaataagaccgcttgggagcttccgaagacctacgtttccccaactcatgtcggatctggagcatacggatctgtgtgcagtgctatcgataagaggagcggtgagaaggtcgccatcaagaagctgtccaggccatttcagtcagagatatttgcaaagagagcgtatcgtgaattactcttactgaaacatatgcaacacgagaatgtgattggactgctggatgtattcaccccagctagcagcctgcggaacttctatgatttttatctggttatgccctttatgcagaccgacctccagaaaataatgggaatggagttctcagaagagaaaattcagtatcttgtctatcagatgcttaaggggctgaaagacctgaagcctggcaatctcgccgtgaacgaagattgcgagcttaagatcttagactttggactggcaaggcatgccgacgcagaaatgactggatacgtcgtgaccagatggtatagggcccctgaagtcatcctctcctggatgcattacaaccagaccgtggacatatggtccgttgggtgtatcatggccgaaatgctaaccggcaaaacgctcttcaaaggcaaagactacctggatcagctgacacagattctgaaagtcacgggcgttcccggtaccgagtttgtgcagaagctaaacgacaaggccgctaagtcttacattcagtctctccctcaaactccccgaaaagactttactcagttattcccacgggcatcgccacaggcggctgatctactggagaaaatgttagaacttgatgtcgataagaggctgactgccgctcaggccttgacccacccgtttttcgagccttttagggatcctgaagaagaaactgaggcccagcaaccatttgacgatagcctggagcacgagaagttgaccgtggacgagtggaaacagcacatctacaaggaaattgtcaacttcagccccattgccaggaaggatagtagaaggcggtccgggatgaagttgtag

SEQ ID NO: 131651 - DNA, 774 bp, Artificial Sequence
  derived and/or modified sequence
atgtcactgatccggaagaaagggttctataaacaggacgtgaataagaccgcctgggagctacctaagacatacgtgtcaccgacacacgttgggagtggagcctacggctcggtgtgttctgccatcgataaacggagcggcgaaaaggtggccatcaaaaagctgagccgccctttccagtcagagatctttgcgaaacgtgcctatcgggaattgcttctgctgaagcacatgcaacacgaaaatgtaatcggactcctggatgtgttcactcccgcttccagcctgagaaacttttacgacttttacttagtaatgccctttatgcagaccgaccttcagaagataatgggcatggagttttcagaagagaaaattcagtacctagtgtatcagatgctgaagggcttgaagtacatccattcagcgggagtggtgcacagggatctgaagccaggaaatctggcagttaatgaagactgcgagctgaagattctcgatttcggactggcaagacacgcagacgctgagatgactgggtacgtagtgacacgctggtaccgggctcccgaggtgatcctttcatggatgcactataaccagactgggcagatcttgcaccccgtcccagcaactgaccctcaagagggattccactctgcagtgcccacagggcagcccccaggatgtggtcctgcaggggaagacgctggggctcgtcggggtcaagcacctgacggtcgagctggccctcatccctctcttctgtag

SEQ ID NO: 131652 - DNA, 933 bp, Artificial Sequence
  derived and/or modified sequence
atgtccttgatccgcaagaaaggattctataagcaggacgtgaataaaactgcttgggagctccccaagacgtatgttagccctacgcatgtggggtctggtgcctatggctcagtgtgctcagccatcgacaagcggtcaggagagaaggtggccataaagaagctctcccggccattccagagcgagatcttcgctaaacgggcttaccgggagctgctcctcttgaaacacatgcagcatgagaacgtaatcggcttacttgatgtgtttacacctgccagttccctgagaaacttttacgatttttatctggtcatgccctttatgcaaacagatctccaaaagattatgggaatggaatttagcgaggagaagattcagtatctggtctaccagatgcttaagggactgaagtacatccattcagccggtgtagtgcacagggatctgaaacccggaaacctggccgttaacgaagactgtgagttaaagatcctcgacttcggactggccaggcatgccgacgctgagatgacaggttacgtcgttacgagatggtatcgcgcacccgaggtcattctgagttggatgcactataaccagacagttgatatttggagcgtgggttgtattatggctgaaatgttgactggtaagacactgttcaaggggaaagattacttgctcgagaagatgctcgaactcgacgtggacaaaaggctgacagccgctcaagccctaacgcacccattcttcgaacccttccgcgaccccgaagaagagactgaagcccagcaaccattcgatgactcacttgagcacgaaaagctgacagtggacgagtggaagcagcacatatataaggagatcgtcaacttctccccaatagccagaaaagacagccggagaagatccggcatgaaattgtag

SEQ ID NO: 131653 - protein, 393 aa, Artificial Sequence [sequence omitted]

SEQ ID NO: 131654 - DNA, 1182 bp, Artificial Sequence
  derived and/or modified sequence
atgcccaagaagaagcccacccccatccagctgaaccccgcccccgacggcagcgccgtgaacggcaccagcagcgccgagaccaacctggaggccctgcagaagaagctggaggagctggagctggacgagcagcagagaaagagactggaggccttcctgacccagaagcagaaggtgggcgagctgaaggacgacgacttcgagaagatcagcgagctgggcgccggcaacggcggcgtggtgttcaaggtgagccacaagcccagcggcctggtgatggccagaaagctgatccacctggagatcaagcccgccatcagaaaccagatcatcagagagctgcaggtgctgcacgagtgcaacagcccctacatcgtgggcttctacggcgccttctacagcgacggcgagatcagcatctgcatggagcacatggacggcggcagcctggaccaggtgctgaagaaggccggcagaatccccgagcagatcctgggcaaggtgagcatcgccgtgatcaagggcctgacctacctgagagagaagcacaagatcatgcacagagacgtgaagcccagcaacatcctggtgaacagcagaggcgagatcaagctgtgcgacttcggcgtgagcggccagctgatcgacagcatggccaacagcttcgtgggcaccagaagctacatgagccccgagagactgcagggcacccactacagcgtgcagagcgacatctggagcatgggcctgagcctggtggagatggccgtgggcagataccccatccccccccccgacgccaaggagctggagctgatgttcggctgccaggtggagggcgacgccgccgagaccccccccagacccagaacccccggcagacccctgagcagctacggcatggacagcagaccccccatggccatcttcgagctgctggactacatcgtgaacgagcccccccccaagctgcccagcggcgtgttcagcctggagttccaggacttcgtgaacaagtgcctgatcaagaaccccgccgagagagccgacctgaagcagctgatggtgcacgccttcatcaagagaagcgacgccgaggaggtggacttcgccggctggctgtgcagcaccatcggcctgaaccagcccagcacccccacccacgccgccggcgtgtag

SEQ ID NO: 131655 - DNA, 1182 bp, Artificial Sequence
  derived and/or modified sequence
atgcctaaaaagaagcccacacctatccagctgaacccagctccagatggaagtgctgtgaacggtactagttccgcagaaactaacctagaagccctgcagaagaagctggaagagcttgagctggacgagcagcaacggaaacgcctggaggcattcttgacccagaaacaaaaagtgggggaacttaaagatgatgacttcgagaagatctctgagctcggggcggggaacggcggcgtcgtattcaaagttagtcacaagcccagcggactggtcatggcgcgtaaattgatacacctggaaatcaagcccgccatacggaatcagatcatccgagaattgcaggttcttcacgaatgtaatagtccctatattgtgggattttatggagctttttacagcgatggcgaaatttccatctgcatggaacacatggacggtggttctctggatcaggtgcttaagaaagccgggagaattcccgagcagatactgggcaaagtgtcaattgcagtgataaaggggcttacgtatctcagggagaaacataagattatgcaccgcgatgttaagcctagcaacatcctggtaaactcccggggcgaaattaaactttgcgatttcggcgtgtccggtcaacttatcgattctatggccaactcatttgtcgggacccgctcatatatgtcgcctgagagactccaggggacccactacagcgtccagtctgacatttggtccatgggcctgagtctggtcgaaatggcggttggaagataccccatccctccaccggatgccaaggaactggagctgatgtttgggtgtcaagtggaaggggatgcagcagagactcctcctagaccaagaacccccggacgacctttgagtagttacggcatggactctaggcctcccatggcgattttcgagctccttgactatatcgtcaatgagcctccacctaaactgccgagtggggtgttctccctggagttccaagactttgtgaataagtgccttattaagaatccagctgagcgggccgacctgaaacagctcatggtgcatgcattcatcaagagatctgatgcggaagaggtggactttgccggatggctgtgtagcacaataggcctgaaccaaccttccaccccgacacacgccgctggggtgtag

SEQ ID NO: 131656 - DNA, 1182 bp, Artificial Sequence
  derived and/or modified sequence
atgcccaagaagaagcccacccccatccagctgaacccagccccagatggcagcgctgtgaatggcaccagcagcgctgagaccaacctggaggccctgcagaagaagctggaggagctggagctggatgagcagcagaggaagaggctggaggccttcctgacccagaagcagaaggtgggggagctgaaggatgatgactttgagaagatcagcgagctgggcgctggaaatggaggagtggtgttcaaggtgagccacaagcccagcggcctggtgatggccaggaagctgatccacctggagatcaagccagccatccggaaccagatcatccgggagctgcaggtgctgcacgagtgcaacagcccctacatcgtgggcttctacggggccttctacagtgatggagagatcagcatctgcatggagcacatggatggcggcagcctggaccaggtgctgaagaaggccggccgcatccctgagcagatcctgggcaaggtgtccattgctgtgatcaagggcctgacctacctgcgggagaagcacaagatcatgcacagagatgtgaagcccagcaacatcctggtgaacagcagaggagagatcaagctgtgtgactttggagtgtctggccagctgattgacagcatggccaacagctttgtgggcaccaggagctacatgagccctgagcggctgcagggcacccactacagcgtgcagagcgacatctggagcatgggcctgagcctggtggagatggctgtgggccgctaccccatccccccaccagatgccaaggagctggagctgatgtttggctgccaggtggagggagatgctgctgagaccccaccccggcccaggaccccaggccggcccctgagcagctatggcatggacagccggccccccatggccatctttgagctgctggactacatcgtgaatgaacctccacccaagctgcccagcggggtcttcagcctggagttccaggactttgtgaacaagtgcctgatcaagaacccagctgagagagctgacctgaagcagctgatggtgcacgccttcatcaagagaagtgatgctgaggaggtggactttgctggctggctgtgcagcaccatcggcctgaaccagcccagcacccccacccacgccgccggcgtgtag

SEQ ID NO: 131657 - DNA, 1182 bp, Artificial Sequence
  derived and/or modified sequence
atgcccaagaagaagcccacccccatccagctgaaccccgcccccgatgggtccgcagttaacggtaccagcagtgcggagacaaacctcgaagcgctccagaaaaagttagaggagttagagctggatgagcagcagaggaaaaggctggaggcattccttactcagaagcagaaagtcggcgagttaaaagatgacgacttcgagaaaatttctgaactcggtgctggaaatggcggggtggttttcaaagtaagccataagccgagtggtctcgtgatggctcgtaaactgatacatttggagatcaaacctgcaattcgaaatcaaatcatccgggaactccaggttctgcacgagtgcaatagcccgtatatcgtgggattctatggggcgttctactcagatggagagatctcaatctgcatggaacatatggacggcggaagtttagatcaggtattgaaaaaagcagggcgtatccctgagcagatcttaggaaaggtgtctattgcagtcattaagggtcttacatatttgcgcgagaagcacaaaattatgcatcgcgacgtaaagccctctaacatcttagtgaattccaggggagaaataaaactctgcgattttggtgtgtcagggcagttgattgacagcatggctaacagttttgtgggcaccagatcttacatgtcccccgaaagactgcagggaacacactattcggtccagtcggacatatggagcatgggtctctccctagtcgaaatggccgtggggagatacccaataccgccccccgatgcgaaggaactcgagctgatgtttggttgccaggttgaaggagacgccgctgaaactcccccacgaccgcgaactcccggaagaccattgagctcctatggcatggattcccggccacctatggccatattcgagctcctggattacatcgtgaatgagcccccaccgaaactaccatccggcgtcttttctcttgaatttcaagatttcgtgaataaatgtctgatcaaaaaccccgccgagagggcagatttgaaacagctgatggtccacgccttcatcaaaaggtccgacgcagaggaagtcgacttcgccgggtggctctgtagcaccattggacttaaccagccctccacccctactcacgctgccggagtttag

SEQ ID NO: 131658 - DNA, 2642 bp, Artificial Sequence
  derived and/or modified sequence
gaggcaataggggcggagccgagtgggagtgtggaaagcgccgcatcccgggtgggaggcgaggcttccccttccccgcccctcccccggcctccagtccctcccagggccgcttcgcagagcggctaggagcacggcggcggcggcactttccccggcaggagctggagctgggctctggtgcgcgcgcggctgtgccgcccgagccggagggactggttggttgagagagagagaggaagggaatcccgggctgccgaaccgcacgttcagcccgctccgctcctgcagggcagcctttcggctctctgcgcgcgaagccgagtcccgggcgggtggggcgggggtccactgagaccgctaccggcccctcggcgctgacgggaccgcgcggggcgcacccgctgaaggcagccccggggcccgcggcccggacttggtcctgcgcagcgggcgcggggcagcgcagcgggaggaagcgagaggtgctgccctccccccggagttggaagcgcgttacccgggtccaaaatgcccaagaagaagccgacgcccatccagctgaacccggcccccgacggctctgcagttaacgggaccagctctgcggagaccaacttggaggccttgcagaagaagctggaggagctagagcttgatgagcagcagcgaaagcgccttgaggcctttcttacccagaagcagaaggtgggagaactgaaggatgacgactttgagaagatcagtgagctgggggctggcaatggcggtgtggtgttcaaggtctcccacaagccttctggcctggtcatggccagaaagctaattcatctggagatcaaacccgcaatccggaaccagatcataagggagctgcaggttctgcatgagtgcaactctccgtacatcgtgggcttctatggtgcgttctacagcgatggcgagatcagtatctgcatggagcacatggatggaggttctctggatcaagtcctgaagaaagctggaagaattcctgaacaaattttaggaaaagttagcattgctgtaataaaaggcctgacatatctgagggagaagcacaagatcatgcacagagatgtcaagccctccaacatcctagtcaactcccgtggggagatcaagctctgtgactttggggtcagcgggcagctcatcgactccatggccaactccttcgtgggcacaaggtcctacatgtcgccagaaagactccaggggactcattactctgtgcagtcagacatctggagcatgggactgtctctggtagagatggcggttgggaggtatcccatccctcctccagatgccaaggagctggagctgatgtttgggtgccaggtggaaggagatgcggctgagaccccacccaggccaaggacccccgggaggccccttagctcatacggaatggacagccgacctcccatggcaatttttgagttgttggattacatagtcaacgagcctcctccaaaactgcccagtggagtgttcagtctggaatttcaagattttgtgaataaatgcttaataaaaaaccccgcagagagagcagatttgaagcaactcatggttcatgcttttatcaagagatctgatgctgaggaagtggattttgcaggttggctctgctccaccatcggccttaaccagcccagcacaccaacccatgctgctggcgtctaagtgtttgggaagcaacaaagagcgagtcccctgcccggtggtttgccatgtcgcttttgggcctccttcccatgcctgtctctgttcagatgtgcatttcacctgtgacaaaggatgaagaacacagcatgtgccaagattctactcttgtcatttttaatattactgtctttattcttattactattattgttcccctaagtggattggctttgtgcttggggctatttgtgtgtatgctgatgatcaaaacctgtgccaggctgaattacagtgaaattttggtgaatgtgggtagtcattcttacaattgcactgctgttcctgctccatgactggctgtctgcctgtattttcgggattctttgacatttggtggtactttattcttgctgggcatactttctctctaggagggagccttgtgagatccttcacaggcagtgcatgtgaagcatgctttgctgctatgaaaatgagcatcagagagtgtacatcatgttattttattattattatttgcttttcatgtagaactcagcagttgacatccaaatctagccagagcccttcactgccatgatagctggggcttcaccagtctgtctactgtggtgatctgtagacttctggttgtatttctatatttattttcagtatactgtgtgggatacttagtggtatgtctctttaagttttgattaatgtttcttaaatggaattattttgaatgtcacaaattgatcaagatattaaaatgtcggatttatctttccccatatccaagtaccaatgctgttgtaaacaacgtgtatagtgcctaaaattgtatgaaaatccttttaaccattttaacctagatgtttaacaaatctaatctcttattctaataaatatactatgaaataaaaaaaaaaggatgaaagcta

SEQ ID NO: 131659 - DNA, 1182 bp, Artificial Sequence
  derived and/or modified sequence
atgccgaaaaagaagcccaccccaattcagcttaacccagcccctgatggctcagccgtgaatgggactagcagcgctgaaaccaacctggaagccctgcagaagaagctggaggaactggaattggatgaacagcagcgaaaacgtctggaggccttcctgacccagaaacaaaaggttggggaactcaaagacgacgacttcgagaagatttctgaactcggtgccggaaatggcggagtagttttcaaggtttcacacaagccttccggtctggtgatggccaggaagctgatccaccttgagatcaagccggctattaggaaccagatcataagagagctgcaagttctccatgaatgcaatagcccttacatcgtcggtttctacggagctttttactctgacggggagattagtatctgcatggagcacatggacggtggcagcttggaccaggtgctgaagaaggccggacgaataccagagcagatcctggggaaggtctccatagccgtcattaagggcctgacttacttgcgcgaaaagcacaaaatcatgcaccgggacgtcaaaccctcaaacatattggtcaattctagaggggagatcaagctctgtgactttggcgtgtcgggacagcttatagactccatggccaactcttttgtgggaacgaggtcgtacatgtctcctgaaaggcttcagggcacacactatagcgtccagagtgatatctggtcaatgggtctaagcctagtcgaaatggccgtgggccgatatccaattccaccaccagacgctaaggagttggagctgatgttcggttgccaggtggagggtgatgctgccgaaacacctcctcgccctcgcaccccaggcaggcctctttcctcctacggcatggactctcgaccacccatggctatcttcgagctcctggactacatcgtgaatgagcctcctcctaagctgccctctggagtattctccctcgagtttcaggacttcgttaacaaatgtctaatcaagaaccccgcagagcgcgcagatctgaagcagctgatggttcatgccttcattaaaaggagcgatgccgaagaagttgactttgcaggatggctgtgtagcaccattggcctcaatcaaccgtctacgcctacgcacgcggcaggagtctag

SEQ ID NO: 131660 - DNA, 957 bp, Artificial Sequence
  derived and/or modified sequence
atgagcaagccccccgcccccaaccccaccccccccagaaacctggacagcagaaccttcatcaccatcggcgacagaaacttcgaggtggaggccgacgacctggtgaccatcagcgagctgggcagaggcgcctacggcgtggtggagaaggtgagacacgcccagagcggcaccatcatggccgtgaagagaatcagagccaccgtgaacagccaggagcagaagagactgctgatggacctggacatcaacatgagaaccgtggactgcttctacaccgtgaccttctacggcgccctgttcagagagggcgacgtgtggatctgcatggagctgatggacaccagcctggacaagttctacagaaaggtgctggacaagaacatgaccatccccgaggacatcctgggcgagatcgccgtgagcatcgtgagagccctggagcacctgcacagcaagctgagcgtgatccacagagacgtgaagcccagcaacgtgctgatcaacaaggagggccacgtgaagatgtgcgacttcggcatcagcggctacctggtggacagcgtggccaagaccatggacgccggctgcaagccctacatggcccccgagagaatcaaccccgagctgaaccagaagggctacaacgtgaagagcgacgtgtggagcctgggcatcaccatgatcgagatggccatcctgagattcccctacgagagctggggcacccccttccagcagctgaagcaggtggtggaggagcccagcccccagctgcccgccgacagattcagccccgagttcgtggacttcaccgcccagtgcctgagaaagaaccccgccgagagaatgagctacctggagctgatggagcaccccttcttcaccctgcacaagaccaagaagaccgacatcgccgccttcgtgaaggagatcctgggcgaggacagctag

SEQ ID NO: 131661 - DNA, 957 bp, Artificial Sequence
  derived and/or modified sequence
atgtcaaagccacccgcccccaacccaaccccaccacgtaacctggactcacggacatttattaccataggagacaggaacttcgaggtggaggctgatgaccttgtcaccatctccgaacttggcagaggtgcttacggggtcgtggagaaggtgcgccacgctcagtctgggacgatcatggcagttaaaaggattcgggccactgtcaattcccaggagcagaaacgcctactgatggaccttgacattaacatgagaaccgttgactgcttttataccgtaacattttacggtgctcttttccgggagggcgatgtctggatttgtatggagctgatggatacctcactggataaattctacagaaaggtgcttgacaagaacatgacgatccccgaggacattctcggagagattgccgtgagcatcgtcagagcactcgagcatcttcactctaaactctccgtaattcatcgcgacgtgaagccctccaacgtgctgattaataaggagggacacgtgaaaatgtgtgacttcgggatttccggatacctggtggacagtgtcgctaagactatggacgctggctgcaagccctatatggccccagaacggatcaatcctgagctaaaccaaaaagggtataacgtgaagagcgatgtgtggtcattggggataacaatgattgaaatggccatcctgcgatttccctacgagtcatggggaacacctttccagcagctgaagcaggtggtggaggagcccagcccccagctccccgctgatcggttctcccctgagttcgtggacttcacagcccagtgcctacgtaaaaaccctgcagagaggatgtcttaccttgaattaatggagcatccctttttcactctacacaaaacaaagaagacagatatcgctgccttcgtgaaagagatacttggcgaggattcctag

SEQ ID NO: 131662 - DNA, 957 bp, Artificial Sequence
  derived and/or modified sequence
atgagcaagcccccagcccccaaccccaccccaccaagaaacctggacagcaggaccttcatcaccatcggggacaggaactttgaggtggaggctgatgacctggtgaccatcagcgagctgggccgcggggcctacggcgtggtggagaaggtgagacatgcccagagcggcaccatcatggctgtgaagaggatccgggccaccgtgaacagccaggagcagaagaggctgctgatggacctggacatcaacatgaggacagtggactgcttctacacagtgaccttctacggggccctcttccgggagggagatgtgtggatctgcatggagctgatggacaccagcctggacaagttctacaggaaggtgctggacaagaacatgaccatccctgaggacatcctgggggagattgctgtgtccatcgtgcgggccctggagcacctgcacagcaagctgagcgtcatccacagagatgtgaagcccagcaatgtgctgatcaacaaggagggccacgtgaagatgtgtgactttggcatcagcggctacctggtggacagcgtggccaagaccatggatgctggctgcaagccctacatggcccctgagcgcatcaaccctgagctgaaccagaagggctacaacgtgaagagtgatgtgtggagcctgggcatcaccatgattgagatggccatcctgcgcttcccctatgaatcctggggcacccccttccagcagctgaagcaggtggtggaggagcccagcccccagctgcctgctgaccgcttcagccctgagtttgtggacttcaccgcccagtgcctgaggaagaacccagctgagaggatgagctacctggagctgatggagcaccccttcttcaccctgcacaagaccaagaagacagacattgctgcctttgtgaaggagatcctgggggaggacagctag

SEQ ID NO: 131663 - DNA, 957 bp, Artificial Sequence
  derived and/or modified sequence
atgagcaagccccccgcccccaaccccacccccccccggaacctggacagccggactttcatcacaataggcgaccggaattttgaggtggaggccgatgacttggtgaccataagcgagctgggccgcggtgcttacggggtggtcgagaaagtgaggcatgctcagagtggtacaattatggcagtaaagaggatacgggccaccgtgaacagccaagaacagaagagactactcatggatctggatatcaacatgcgcaccgtggattgtttctatacagtaaccttctacggtgctctgttcagggagggggacgtttggatttgcatggaattgatggacactagcctggacaagttctaccgcaaggtgttggataaaaacatgaccatccctgaagatattttgggagagattgctgtaagtattgttagggccctggagcatttgcactccaagctgagcgtcattcaccgtgatgtaaagccaagcaatgtcctgattaataaggaaggacacgttaagatgtgcgacttcggaatttcaggctatctagtggacagcgtggccaaaaccatggacgccggatgcaagccttacatggccccagagaggataaatcccgaactcaatcaaaaggggtacaacgtaaagtccgacgtctggtctctggggatcacaatgatagagatggctatcctgcggtttccatacgaaagctggggaaccccctttcagcagctgaaacaggtggttgaggaaccatccccccagttgcccgcagacaggttttctcctgaattcgtggacttcacggcacagtgtctgagaaaaaatcccgccgaacgcatgagctacctggaactgatggagcatcccttctttactctgcataagaccaaaaagaccgacattgccgcgtttgtcaaggaaatccttggtgaggatagctag

SEQ ID NO: 131664 - DNA, 957 bp, Artificial Sequence
  derived and/or modified sequence
atgagcaaacccccagcgcctaatcccacgccccctcgtaacctggactcccggacttttatcaccatcggggatcggaattttgaagtggaggctgatgatctggtcacaatctccgagctgggaagaggggcttacggagtggttgaaaaagtgaggcatgctcagtcaggaacaatcatggccgtcaagcggatacgggcaaccgtgaattcacaagaacagaagaggctcctgatggacttggacataaacatgagaactgtcgattgtttctataccgtgacattttacggggcactattccgggagggcgacgtctggatctgtatggagttgatggacactagcttggacaaattctaccgcaaagtgctggataagaacatgacaatccctgaggatatccttggggagattgcggtttctatcgtgcgggctctggagcatcttcactcgaagctgtccgtcatccacagggacgtgaagcctagtaatgtgcttatcaacaaagagggccacgtgaaaatgtgtgatttcggtatttctggttatctcgttgactccgtggcgaaaactatggacgctggttgcaaaccttacatggccccagagaggattaatcctgaactgaaccaaaaggggtataacgttaagagcgatgtctggagcctgggtattacaatgattgaaatggcgattctacgtttcccctacgagtcctggggcactccattccaacagctcaagcaggtagtcgaagagcctagtcctcagctacctgccgatcggttttcccctgaatttgtagacttcaccgctcagtgcctgagaaaaaacccagcggaacgaatgtcgtacctagaactgatggagcatccctttttcactctacacaaaacaaaaaaaaccgacattgccgcttttgtgaaagaaatcctgggggaagacagctag

SEQ ID NO: 131665 - protein, 438 aa, Artificial Sequence
  derived and/or modified sequence
MLWLALGPFPAMENQVLVIRIKIPNSGAVDWTVHSGPQLLFRDVLDVIGQVLPEATTTAFEYEDEDGDRITVRSDEEMKAMLSYYYSTVMEQQVNGQLIEPLQIFPRACKPPGERNIHGLKVNTRAGPSQHSSPAVSDSLPSNSLKKSSAELKKILANGQMNEQDIRYRDTLGHGNGGTVYKAYHVPSGKILAVKVILLDITLELQKQIMSELEILYKCDSSYIIGFYGAFFVENRISICTEFMDGGSLDVYRKMPEHVLGRIAVAVVKGLTYLWSLKILHRDVKPSNMLVNTRGQVKLCDFGVSTQLVNSIAKTYVGTNAYMAPERISGEQYGIHSDVWSLGISFMEIQKNQGSLMPLQLLQCIVDEDSPVLPVGEFSEPFVHFITQCMRKQPKERPAPEELMGHPFIVQFNDGNAAVVSMWVCRALEERRSQQGPP

SEQ ID NO: 131666 - protein, 444 aa, Artificial Sequence
  derived and/or modified sequence
MLWLALGPFPAMENQVLVIRIKIPNSGAVDWTVHSGPQLLFRDVLDVIGQVLPEATTTAFEYEDEDGDRITVRSDEEMKAMLSYYYSTVMEQQVNGQLIEPLQIFPRACKPPGERNIHGLKVNTRAGPSQHSSPAVSDSLPSNSLKKSSAELKKILANGQMNEQDIRYRDTLGHGNGGTVYKAYHVPSGKILAVKVILLDITLELQKQIMSELEILYKCDSSYIIGFYGAFFVENRISICTEFMDGGSLDVYRKMPEHVLGRIAVAVVKGLTYLWSLKILHRDVKPSNMLVNTRGQVKLCDFGVSTQLVNSIAKTYVGTNAYMAPERISGEQYGIHSDVWSLGISFMEIQKNQGSLMPLQLLQCIVDEDSPVLPVGEFSEPFVHFITQCMRKQPKERPAPEELMGHPFIVQFNDGNAAVVSMWVCRALEERRSPASLPSPSSSI

SEQ ID NO: 131667 - DNA, 1317 bp, Artificial Sequence
  derived and/or modified sequence
atgttatggcttgcgctggggccgttcccggctatggaaaaccaggtgttggtgatccgcatcaaaatcccgaactccggagcagtcgattggactgttcatagcggtccccaacttctatttcgggacgtcctcgatgttatcgggcaggtcctgcctgaggctaccaccacggccttcgagtatgaggacgaagacggcgaccgaattacagtaaggtccgatgaagagatgaaggccatgctgagctactactacagcacggtgatggagcagcaggtgaacgggcagcttattgaaccccttcagatcttccctagagcgtgcaagcccccgggagaacgaaacatacacgggcttaaagtgaacaccagggcagggccatctcaacacagttctcctgctgtgtcggacagcctcccaagcaatagcctgaaaaaatcatccgctgagttgaagaagattctcgccaacggtcagatgaacgagcaggatatcagatatagggatacccttggacacggtaacggtggcactgtgtataaagcttaccatgtaccatccgggaagatcttagccgttaaagtgattcttctggacattaccctggagcttcagaaacaaataatgagcgaactggagatcctgtataaatgtgattccagctacattatcggtttctacggagctttcttcgttgagaacagaatcagcatatgtacagaattcatggacggcggcagcctcgatgtgtacagaaagatgcccgagcatgttctgggaagaattgccgtggcggtggttaagggactgacctacctgtggtccctgaaaattttacatcgtgacgtcaagccgtcgaatatgctggtgaacaccaggggacaggtgaagttgtgtgattttggggtgtcaacgcagttggtcaacagcattgccaagacttacgttgggaccaacgcatacatggccccggagcgcatcagcggagagcagtacggcatccattctgatgtgtggtccctgggcattagctttatggaaattcaaaaaaatcagggaagtttgatgcctcttcaactcctgcagtgtattgttgatgaagacagcccggtccttcccgtgggcgagttctccgagccctttgtgcatttcattacccagtgtatgcggaaacaacctaaggaaagaccggcccctgaagaactgatgggccaccccttcattgtccaattcaatgacggaaatgcggctgtcgtaagtatgtgggtctgcagggcgctggaggagcgcaggagtcagcagggaccaccttag

SEQ ID NO: 131668 - DNA, 1335 bp, Artificial Sequence
  derived and/or modified sequence
atgctctggttggcgctgggccccttccccgctatggaaaaccaggtacttgtgatcaggatcaaaatccccaactctggtgctgtggattggactgtgcattccggaccgcagctgttgttccgggatgtactcgacgtgatcgggcaagttctgcccgaagcaacaacgaccgcctttgaatatgaagacgaggacggcgacagaattaccgttcggtccgatgaagagatgaaggccatgctttcttactattactccacagtcatggaacagcaggtgaacgggcagcttatagagcccctgcagatcttccctagggcctgcaaaccacccggcgaaagaaatattcacgggctaaaagttaataccagagccggaccatctcagcactcttcgccggctgtctctgatagcttaccctccaacagtctgaagaaatctagtgcggaacttaagaagatcctagccaacggacagatgaatgagcaggatatcaggtacagggacacactgggccatggaaacggcggcactgtgtataaggcataccacgtgccatcaggaaaaatcctggccgtgaaagtgattctgttggacatcacgctcgagctccagaaacaaattatgtcagaactggagatcctctacaaatgcgatagtagctatatcatcggattctacggggctttctttgtggagaacagaatttcaatctgcacagagttcatggatggggggtcattagatgtctatagaaagatgcccgagcacgtactggggcgaatcgcggttgcagtcgtgaagggtttgacctatctgtggagtcttaagatactacatagagatgtcaagccatcaaatatgctggtgaatacaagaggccaagtgaaactgtgtgatttcggtgtgtctactcagctggtaaactctattgccaaaacatatgttgggacaaacgcttatatggctcctgagcgtatctcaggcgagcagtacgggatacactcagacgtgtggtccctcggaatttcctttatggagatacagaagaaccagggtagtctgatgcccctgcagctcctgcagtgtatagtggatgaggattccccggtgctgccggtgggggagttctctgagccattcgtgcacttcataacgcaatgcatgagaaagcagcctaaggagcggcccgctccagaagaactgatgggacatcccttcatcgtgcaatttaatgacggcaatgctgcagttgtgtcaatgtgggtttgtcgggccttggaggagcgtagatcaccggcctccttgccgtcgccctcatccagcatttag

SEQ ID NO: 131669 - DNA, 1317 bp, Artificial Sequence
  derived and/or modified sequence
atgctgtggctggccctgggccccttccctgccatggagaaccaggtgctggtgatccgcatcaagatccccaacagcggggctgtggactggacagtgcacagcggcccccagctgctcttcagagatgtgctggatgtgattggccaggtgctgcctgaggccaccaccacagcctttgaatatgaagatgaagatggagaccgcatcaccgtgcggagtgatgaggagatgaaggccatgctgagctactactacagcacagtgatggagcagcaggtgaatggccagctgattgagcccctgcagatcttcccccgggcctgcaagcccccaggagagaggaacatccacggcctgaaggtgaacacccgggccggccccagccagcacagcagccctgctgtgtctgacagcctgcccagcaacagcctgaagaagagcagcgctgagctgaagaagatcctggccaacggccagatgaatgagcaggacatccgctacagagacaccctgggccacggcaatggaggcaccgtgtacaaggcctaccacgtgcccagcggcaagatcctggccgtgaaggtgatcctgctggacatcaccctggagctgcagaagcagatcatgtctgagctggagatcctgtacaagtgtgacagcagctacatcatcggcttctacggggccttctttgtggagaaccgcatcagcatctgcacagagttcatggatggcggcagcctggatgtgtacaggaagatgcctgagcacgtgctgggcagaattgctgtggccgtggtgaagggcctgacctacctgtggagcctgaagatcctgcacagagatgtgaagcccagcaacatgctggtgaacacccggggccaggtgaagctgtgtgactttggagtgtccacccagctggtgaacagcatcgccaagacctacgtgggcaccaatgcctacatggcccctgagcgcatctctggagagcagtatggcatccacagtgatgtgtggagcctgggcatctccttcatggagatccagaagaaccagggcagcctgatgcccctgcagctgctgcagtgcatcgtggatgaggacagccctgtgctgcctgtgggggagttcagcgagccctttgtgcacttcatcacccagtgcatgaggaagcagcccaaggagaggcctgcccctgaggagctgatgggccaccccttcatcgtgcagttcaatgatggaaatgctgctgtggtgtccatgtgggtgtgccgggccctggaggagaggaggagccagcagggccccccatag

SEQ ID NO: 131670 - DNA, 1335 bp, Artificial Sequence
  derived and/or modified sequence
atgctgtggctggccctgggccccttccctgccatggagaaccaggtgctggtgatccgcatcaagatccccaacagcggggctgtggactggacagtgcacagcggcccccagctgctcttcagagatgtgctggatgtgattggccaggtgctgcctgaggccaccaccacagcctttgaatatgaagatgaagatggagaccgcatcaccgtgcggagtgatgaggagatgaaggccatgctgagctactactacagcacagtgatggagcagcaggtgaatggccagctgattgagcccctgcagatcttcccccgggcctgcaagcccccaggagagaggaacatccacggcctgaaggtgaacacccgggccggccccagccagcacagcagccctgctgtgtctgacagcctgcccagcaacagcctgaagaagagcagcgctgagctgaagaagatcctggccaacggccagatgaatgagcaggacatccgctacagagacaccctgggccacggcaatggaggcaccgtgtacaaggcctaccacgtgcccagcggcaagatcctggccgtgaaggtgatcctgctggacatcaccctggagctgcagaagcagatcatgtctgagctggagatcctgtacaagtgtgacagcagctacatcatcggcttctacggggccttctttgtggagaaccgcatcagcatctgcacagagttcatggatggcggcagcctggatgtgtacaggaagatgcctgagcacgtgctgggcagaattgctgtggccgtggtgaagggcctgacctacctgtggagcctgaagatcctgcacagagatgtgaagcccagcaacatgctggtgaacacccggggccaggtgaagctgtgtgactttggagtgtccacccagctggtgaacagcatcgccaagacctacgtgggcaccaatgcctacatggcccctgagcgcatctctggagagcagtatggcatccacagtgatgtgtggagcctgggcatctccttcatggagatccagaagaaccagggcagcctgatgcccctgcagctgctgcagtgcatcgtggatgaggacagccctgtgctgcctgtgggggagttcagcgagccctttgtgcacttcatcacccagtgcatgaggaagcagcccaaggagaggcctgcccctgaggagctgatgggccaccccttcatcgtgcagttcaatgatggaaatgctgctgtggtgtccatgtgggtgtgccgggccctggaggagaggaggagccctgccagcctgcccagccccagcagcagcatctag

SEQ ID NO: 131671 - DNA, 2334 bp, Artificial Sequence
  derived and/or modified sequence
ggagtaacagtgtcgccgccgccttcctcctcctcctctcgccgctaccgccgtcgccgccgccgcagccgccgccagtccgcgcggcctcgggtggccggagctcagcctgcgcgcgccgcgccctgtgtctccgggtggggcagaagactcgccccttgaacctcccgcggggactctccgtggtgtggcggccctggggctctttcttaatagccccggactgagtcccctccagtcgaggaccctctcctagtccactgacgagcggtggacacctgccgctgtatctcccccaaaccgagtccttgccctgctgcctcctcatacccacacggcggcagagaccttcaccatagcgttcgctcaactccagaaccttccgacctccgctagttcctgcgggcctttgcccgcttcccggtgcaccctccccgggagacacctcagacccccgacagcctgggcaggctcggtgcctgcgggtgcgttcctgatcacccctcccctcttccctccccctcatcctccattcccttgttttcaccctctgtcctctgcccgtcactccccttgtcacctcttggagccccctcctaaccagcggccagtgggtttcccataccccaggatgtgagcctctttaacctgtaatgctgtggctagcccttggcccctttcctgccatggagaaccaggtgctggtaattcgcatcaagatcccaaatagtggcgcggtggactggacagtgcactccgggccgcagttactcttcagggatgtgctggatgtgataggccaggttctgcctgaagcaacaactacagcatttgaatatgaagatgaagatggtgatcgaattacagtgagaagtgatgaggaaatgaaggcaatgctgtcatattattattccacagtaatggaacagcaagtaaatggacagttaatagagcctctgcagatatttccaagagcctgcaagcctcctggggaacggaacatacatggcctgaaggtgaatactcgggccggaccctctcaacacagcagcccagcagtctcagattcacttccaagcaatagcttaaagaagtcttctgctgaactgaaaaaaatactagccaatggccagatgaatgaacaagacatacgatatcgggacactcttggtcatggcaacggaggcacagtctacaaagcatatcatgtcccgagtgggaaaatattagctgtaaaggtcatactactagatattacactggaacttcagaagcaaattatgtctgaattggaaattctttataagtgcgattcatcatatatcattggattttatggagcattttttgtagaaaacaggatttcaatatgtacagaattcatggatgggggatctttggatgtatataggaaaatgccagaacatgtccttggaagaattgcagtagcagttgttaaaggccttacttatttgtggagtttaaagattttacatagagacgtgaagccctccaatatgctagtaaacacaagaggacaggttaagctgtgtgattttggagttagcactcagctggtgaattctatagccaagacgtatgttggaacaaatgcttatatggcgcctgaaaggatttcaggggagcagtatggaattcattctgatgtctggagcttaggaatctcttttatggagattcagaaaaaccagggatctttaatgcctctccagcttctgcagtgcattgttgatgaggattcgcccgtccttccagttggagagttctcggagccatttgtacatttcatcactcagtgtatgcgaaaacagccaaaagaaaggccagcacctgaagaattgatgggccacccgttcatcgtgcagttcaatgatggaaatgccgccgtggtgtccatgtgggtgtgccgggcgctggaggagaggcggagccagcaggggcccccgtgaggctgccgcagggcactgaaagcccaggaccagtaaccaaggagaacaacccacccgtcgcccttctccgtatgctgcctgcgccagaagagctttgctgggccctggcttccctgccctcgccttcacctctgtcagcaggtggccttgcctggggagccccatgtgtggcccaccccaccaggccatccccataccttctggtttgaaggcgctgacactggcagagaggtaaagggtggggcattgagaatggaggctcccagggtccctgcccacttctgttttcctaatgtttttctctataaagggtcaggcccgtcagcatcactgatgggaataaaagtattaatgctttgtgaca

SEQ ID NO: 131672 - DNA, 1988 bp, Artificial Sequence
  derived and/or modified sequence
ggagtaacagtgtcgccgccgccttcctcctcctcctctcgccgctaccgccgtcgccgccgccgcagccgccgccagtccgcgcggcctcgggtggccggagctcagcctgcgcgcgccgcgccctgtgtctccgggtggggcagaagactcgccccttgaacctcccgcggggactctccgtggtgtggcggccctggggctctttcttaatagccccggactgagtcccctccagtcgaggaccctctcctagtccactgacgagcggtggacacctgccgctgtatctcccccaaaccgagtccttgccctgctgcctcctcatacccacacggcggcagagaccttcaccatagcgttcgctcaactccagaaccttccgacctccgctagttcctgcgggcctttgcccgcttcccggtgcaccctccccgggagacacctcagacccccgacagcctgggcaggctcggtgcctgcgggtgcgttcctgatcacccctcccctcttccctccccctcatcctccattcccttgttttcaccctctgtcctctgcccgtcactccccttgtcacctcttggagccccctcctaaccagcggccagtgggtttcccataccccaggatgtgagcctctttaacctgtaatgctgtggctagcccttggcccctttcctgccatggagaaccaggtgctggtaattcgcatcaagatcccaaatagtggcgcggtggactggacagtgcactccgggccgcagttactcttcagggatgtgctggatgtgataggccaggttctgcctgaagcaacaactacagcatttgaatatgaagatgaagatggtgatcgaattacagtgagaagtgatgaggaaatgaaggcaatgctgtcatattattattccacagtaatggaacagcaagtaaatggacagttaatagagcctctgcagatatttccaagagcctgcaagcctcctggggaacggaacatacatggcctgaaggtgaatactcgggccggaccctctcaacacagcagcccagcagtctcagattcacttccaagcaatagcttaaagaagtcttctgctgaactgaaaaaaatactagccaatggccagatgaatgaacaagacatacgatatcgggacactcttggtcatggcaacggaggcacagtctacaaagcatatcatgtcccgagtgggaaaatattagctgtaaaggtcatactactagatattacactggaacttcagaagcaaattatgtctgaattggaaattctttataagtgcgattcatcatatatcattggattttatggagcattttttgtagaaaacaggatttcaatatgtacagaattcatggatgggggatctttggatgtatataggaaaatgccagaacatgtccttggaagaattgcagtagcagttgttaaaggccttacttatttgtggagtttaaagattttacatagagacgtgaagccctccaatatgctagtaaacacaagaggacaggttaagctgtgtgattttggagttagcactcagctggtgaattctatagccaagacgtatgttggaacaaatgcttatatggcgcctgaaaggatttcaggggagcagtatggaattcattctgatgtctggagcttaggaatctcttttatggagattcagaaaaaccagggatctttaatgcctctccagcttctgcagtgcattgttgatgaggattcgcccgtccttccagttggagagttctcggagccatttgtacatttcatcactcagtgtatgcgaaaacagccaaaagaaaggccagcacctgaagaattgatgggccacccgttcatcgtgcagttcaatgatggaaatgccgccgtggtgtccatgtgggtgtgccgggcgctggaggagaggcggtctcccgcttcgctgccctccccaagctcgtccatctag

SEQ ID NO: 131673 - DNA, 1317 bp, Artificial Sequence
  derived and/or modified sequence
atgctgtggctggccctgggccccttccccgccatggagaaccaggtcttagttatccgtatcaagatcccaaacagtggcgctgttgactggaccgtgcattccggcccacagctactcttccgcgatgtgctggacgtgatcgggcaggtactgcctgaggctaccacgactgcctttgaatacgaggatgaggatggtgataggatcaccgtgcggtcggatgaagaaatgaaggctatgctgtcatactactacagtacagtcatggaacaacaggtcaatggccaactcatcgaaccccttcagatctttccccgggcttgtaagccccccggagagcggaacatccacggccttaaagtcaataccagagccggaccgtcgcagcattcatcccccgccgtctccgacagtctccccagcaattccctgaagaaatcttctgctgagctgaagaaaatcctggccaacgggcagatgaatgaacaagacattcggtacagagacactctaggccacgggaatgggggcacagtgtataaagcttatcacgtcccaagcgggaagatcctggccgtgaaagttatcctgctcgacataaccttggagctgcaaaagcaaatcatgagtgaactggaaattctatataagtgtgattcttcttacatcattggattctatggagccttctttgtcgaaaataggatatctatttgtacggagttcatggacggaggcagtctcgacgtatatcgtaagatgcccgaacatgtgttgggaagaatcgccgtggccgtagtcaaaggcttgacctatttgtggagcctcaaaatcctgcatcgtgacgtgaagccatccaacatgctggtgaatacccgcgggcaggtgaaactctgtgatttcggggtctccacacaactcgtgaattctatcgctaagacttacgtgggcacaaatgcatacatggcccccgagcgcatctccggtgagcaatacggaatccacagtgatgtgtggagtctcggcatcagcttcatggagatccagaagaatcaaggcagtctcatgccgctgcaattgttgcagtgcattgttgacgaggattcacctgttctgccagtaggcgagttttctgaaccctttgtgcattttatcacccagtgtatgagaaagcagcccaaagagagaccagctcccgaagaactgatgggccatcccttcattgtgcagttcaacgatggcaatgctgccgtggttagcatgtgggtgtgccgcgcactggaagagcgaagatctcagcagggtccaccatag

SEQ ID NO: 131674 - DNA, 1335 bp, Artificial Sequence
  derived and/or modified sequence
atgctgtggctggccctgggccccttccccgccatggagaaccaggtcctggtcatccggatcaagataccaaattcaggtgctgtagattggacagtccacagcggaccccagctactcttccgcgacgtgcttgatgtgatcggccaggttcttccagaagctacgacaaccgcctttgagtatgaggatgaggatggtgacaggataaccgtgcggagcgacgaggaaatgaaggctatgctgtcctattattacagcactgtaatggagcagcaggtgaacggacagctcattgaacccctgcagatcttcccaagggcgtgcaagccccctggggagcgtaatatccacggacttaaggttaacaccagggctggcccctctcagcactcatctccagccgtctccgactctctgccctccaactccctcaagaaaagttccgccgaactgaagaaaatcctcgcgaatgggcaaatgaacgagcaggatatcaggtatcgggacacactgggccatggaaatggtggaactgtgtataaggcttatcatgtgccttccggtaagatcctggccgtcaaggtgattctgctggacattaccctcgaactccagaaacagatcatgagtgaactggaaatcctgtacaagtgcgacagttcctacataattggcttctatggcgcattttttgtagagaaccggatcagcatctgcaccgaattcatggatggcggcagtctcgacgtgtaccggaagatgccggaacacgtgttgggcaggatcgcagtggccgttgtgaagggcctgacatacctgtggagtctcaagatcctgcatcgcgatgtaaaaccgagtaatatgctggtaaataccagaggccaagtcaagctctgcgacttcggagtgagcacacaactggttaatagcatcgcaaagacgtacgtcggtacaaatgcgtacatggcgcctgagagaatctccggcgaacagtatggcatccacagcgatgtctggtcattgggcatctcctttatggagattcagaaaaaccaaggatccctgatgccgttgcaacttctgcagtgtattgtggatgaagactcgcctgtgctgcctgtcggagagtttagcgagcctttcgtccatttcatcacgcaatgtatgaggaagcagccaaaggaaaggcccgcccccgaggaattgatgggccatccttttattgtgcaatttaacgatggcaacgcagccgtggtcagcatgtgggtctgcagagcactggaagagaggaggtcccccgcctcactgccttcaccaagttcgagcatctag

SEQ ID NO: 131675 - DNA, 1317 bp, Artificial Sequence
  derived and/or modified sequence
atgctctggctcgcactgggtcctttccctgcaatggagaaccaggtgctggttatccggataaagattcctaatagcggagccgtagattggaccgtccactccgggcctcaactgctgttcagagatgtcctggatgtaattggacaggtgctgccggaagccaccactaccgcttttgaatacgaggacgaggacggagacaggataacagtgagatccgacgaggagatgaaagctatgctgtcttattattacagtactgtgatggagcagcaggtgaatggtcagctcatagagccactccaaatcttccctcgggcatgcaagccaccaggagagagaaatattcatggtctgaaagtgaataccagggctggtccgtcccagcactcttctcctgctgtttccgacagtctcccatcaaatagtcttaagaaatcaagcgccgagttaaaaaagattttggctaacggccagatgaacgagcaggatataaggtacagagacacgctcggccacggaaacggcggaactgtttataaagcctaccacgtaccgagcgggaaaatcctggcagttaaagtgatactcctggacataacgctggaacttcagaagcagataatgtcagagctggagatcctatacaaatgtgactcaagctatattattggattttacggagccttttttgtagaaaatcgtatctccatatgcacggagtttatggacggcggaagcctggacgtgtacaggaaaatgccggagcacgtgcttgggaggatcgctgtcgcggtggtgaagggcttgacatacctctggagtctgaagatcctgcatcgggacgtgaaaccttccaacatgctagttaatacccggggtcaggtaaagctgtgcgattttggagtgagcacccagctcgtcaactccatagccaagacctatgtcggtactaatgcttacatggccccagagaggatctccggcgaacagtacggaatccactccgacgtgtggagtctgggaatctccttcatggagattcagaaaaaccaggggtcattgatgccactacaactcttgcagtgcatcgtcgatgaagactcgccagtacttccagtgggagagtttagcgaaccattcgtgcattttatcacccagtgcatgcgcaagcagcctaaggagcgccctgcacccgaagaactcatgggacacccatttattgtccagttcaacgacggcaatgccgcagtggtttcaatgtgggtttgcagagccctggaagagcgaaggtcccagcaggggccaccatag

SEQ ID NO: 131676 - DNA, 1335 bp, Artificial Sequence
  derived and/or modified sequence
atgctgtggctggctctgggtcccttcccagccatggagaatcaggtgctggtgataagaataaagatcccaaattccggagctgtcgattggacggtgcactcgggacctcagctgctattcagggatgtgttggatgtcattggtcaggtgcttccggaagcgacaactacagccttcgagtatgaggacgaggatggagacaggattacagtgagatctgacgaggagatgaaagccatgctaagctactattattccacagttatggagcagcaggtcaacggccagctcattgagcccctccagatcttccctcgagcctgcaaaccaccgggtgaacgtaatatccacggcctgaaagtgaacacacgcgctggaccctcccaacattcatctcccgcagtgtctgattctctaccaagtaactctctcaagaagagctcggctgagttaaagaaaatcctggccaatggacaaatgaacgaacaagacattcgatacagggacaccttaggtcatggcaatgggggaaccgtgtacaaggcataccacgtgccctccgggaagatccttgccgtgaaggtcatacttttagatatcaccctcgagctgcagaagcagattatgtccgagctggaaatcctctacaagtgtgactcgtcatacatcatcggcttttatggggcatttttcgttgaaaataggataagtatatgcaccgagttcatggatggaggttcgcttgatgtgtatcgtaagatgcccgagcacgtgttagggagaatcgctgtggcggtggtgaagggtctgacgtatctttggagcctcaagatcctgcaccgggacgtgaaaccttccaatatgctcgtcaacactcgcggtcaggtcaagttatgcgattttggagtttcaacccagctagttaactccatcgccaagacctacgtggggacaaatgcctatatggcacccgagcggatctccggcgaacaatatggcatccacagtgatgtgtggagcctcggcatttcctttatggaaatccagaaaaatcagggctccctgatgcctctgcagctcctccagtgcattgtggacgaagactcccctgtgctgcctgtaggggagttctctgagcccttcgtccattttataacccagtgcatgcggaagcaacctaaggaacggcctgctcctgaggagctgatgggtcatccgtttatcgtccagttcaacgacgggaacgccgctgttgtaagcatgtgggtctgccgagccttagaagagcggaggtcgcccgcaagtttaccctccccaagctcttccatttag

SEQ ID NO: 131677 - DNA, 1317 bp, Artificial Sequence
  derived and/or modified sequence
atgctgtggctggccctgggccccttccccgccatggagaaccaggtgctggtgatcagaatcaagatccccaacagcggcgccgtggactggaccgtgcacagcggcccccagctgctgttcagagacgtgctggacgtgatcggccaggtgctgcccgaggccaccaccaccgccttcgagtacgaggacgaggacggcgacagaatcaccgtgagaagcgacgaggagatgaaggccatgctgagctactactacagcaccgtgatggagcagcaggtgaacggccagctgatcgagcccctgcagatcttccccagagcctgcaagccccccggcgagagaaacatccacggcctgaaggtgaacaccagagccggccccagccagcacagcagccccgccgtgagcgacagcctgcccagcaacagcctgaagaagagcagcgccgagctgaagaagatcctggccaacggccagatgaacgagcaggacatcagatacagagacaccctgggccacggcaacggcggcaccgtgtacaaggcctaccacgtgcccagcggcaagatcctggccgtgaaggtgatcctgctggacatcaccctggagctgcagaagcagatcatgagcgagctggagatcctgtacaagtgcgacagcagctacatcatcggcttctacggcgccttcttcgtggagaacagaatcagcatctgcaccgagttcatggacggcggcagcctggacgtgtacagaaagatgcccgagcacgtgctgggcagaatcgccgtggccgtggtgaagggcctgacctacctgtggagcctgaagatcctgcacagagacgtgaagcccagcaacatgctggtgaacaccagaggccaggtgaagctgtgcgacttcggcgtgagcacccagctggtgaacagcatcgccaagacctacgtgggcaccaacgcctacatggcccccgagagaatcagcggcgagcagtacggcatccacagcgacgtgtggagcctgggcatcagcttcatggagatccagaagaaccagggcagcctgatgcccctgcagctgctgcagtgcatcgtggacgaggacagccccgtgctgcccgtgggcgagttcagcgagcccttcgtgcacttcatcacccagtgcatgagaaagcagcccaaggagagacccgcccccgaggagctgatgggccaccccttcatcgtgcagttcaacgacggcaacgccgccgtggtgagcatgtgggtgtgcagagccctggaggagagaagaagccagcagggccccccctag

SEQ ID NO: 131678 - DNA, 1335 bp, Artificial Sequence
  derived and/or modified sequence
atgctgtggctggccctgggccccttccccgccatggagaaccaggtgctggtgatcagaatcaagatccccaacagcggcgccgtggactggaccgtgcacagcggcccccagctgctgttcagagacgtgctggacgtgatcggccaggtgctgcccgaggccaccaccaccgccttcgagtacgaggacgaggacggcgacagaatcaccgtgagaagcgacgaggagatgaaggccatgctgagctactactacagcaccgtgatggagcagcaggtgaacggccagctgatcgagcccctgcagatcttccccagagcctgcaagccccccggcgagagaaacatccacggcctgaaggtgaacaccagagccggccccagccagcacagcagccccgccgtgagcgacagcctgcccagcaacagcctgaagaagagcagcgccgagctgaagaagatcctggccaacggccagatgaacgagcaggacatcagatacagagacaccctgggccacggcaacggcggcaccgtgtacaaggcctaccacgtgcccagcggcaagatcctggccgtgaaggtgatcctgctggacatcaccctggagctgcagaagcagatcatgagcgagctggagatcctgtacaagtgcgacagcagctacatcatcggcttctacggcgccttcttcgtggagaacagaatcagcatctgcaccgagttcatggacggcggcagcctggacgtgtacagaaagatgcccgagcacgtgctgggcagaatcgccgtggccgtggtgaagggcctgacctacctgtggagcctgaagatcctgcacagagacgtgaagcccagcaacatgctggtgaacaccagaggccaggtgaagctgtgcgacttcggcgtgagcacccagctggtgaacagcatcgccaagacctacgtgggcaccaacgcctacatggcccccgagagaatcagcggcgagcagtacggcatccacagcgacgtgtggagcctgggcatcagcttcatggagatccagaagaaccagggcagcctgatgcccctgcagctgctgcagtgcatcgtggacgaggacagccccgtgctgcccgtgggcgagttcagcgagcccttcgtgcacttcatcacccagtgcatgagaaagcagcccaaggagagacccgcccccgaggagctgatgggccaccccttcatcgtgcagttcaacgacggcaacgccgccgtggtgagcatgtgggtgtgcagagccctggaggagagaagaagccccgccagcctgcccagccccagcagcagcatctag

SEQ ID NO: 131679 - protein, 334 aa, Artificial Sequence
  derived and/or modified sequence
MSQSKGKKRNPGLKIPKEAFEQPQTSSTPPRDLDSKACISIGNQNFEVKADDLEPIMELGRGAYGVVEKMRHVPSGQIMAVKRIRATVNSQEQKRLLMDLDISMRTVDCPFTVTFYGALFREGDVWICMELMDTSLDKFYKQVIDKGQTIPEDILGKIAVSIVKALEHLHSKLSVIHRDVKPSNVLINALGQVKMCDFGISGYLVDSVAKTIDAGCKPYMAPERINPELNQKGYSVKSDIWSLGITMIELAILRFPYDSWGTPFQQLKQVVEEPSPQLPADKFSAEFVDFTSQCLKKNSKERPTYPELMQHPFFTLHESKGTDVASFVKLILGD

SEQ ID NO: 131680 - DNA, 1005 bp, Artificial Sequence
  derived and/or modified sequence
atgagccagagcaagggcaaaaaaaggaatcccggcctcaagattccaaaggaggctttcgagcagccacagacgtctagcacccccccccgggatcttgattcgaaggcttgtattagcatcggcaaccagaattttgaagtgaaagccgacgacctggagccaatcatggagttgggacggggtgcatatggcgtggtggaaaagatgcgccacgtcccctctggccaaatcatggctgtgaaaagaattcgagcaactgtgaatagtcaggaacagaagagactgctgatggacttagatatctctatgcggaccgtcgattgccccttcactgtaactttctacggtgcactttttagggagggggacgtgtggatttgtatggagctgatggatacctctttagacaaattttacaaacaggtgatcgataagggtcagaccattccagaggacatcctgggtaagattgccgtgtccattgtgaaagcactcgaacacctccactccaagttatccgtgattcaccgggatgtgaaaccgtccaacgtcctcatcaatgcactgggccaggtcaagatgtgtgattttggcatctctggctaccttgtggacagtgttgccaagactatcgatgcaggctgtaagccttatatggcacctgagcgcatcaacccagagctcaaccagaaaggctattccgtaaagtcagatatatggagcctcggcataacaatgatcgaactggcaatcctacggttcccctatgatagctgggggaccccttttcagcagcttaagcaggtggtagaagagccgtctccacagctgcccgctgacaagttttccgcagaatttgtggattttactagccagtgcctaaagaaaaactcaaaagaaaggccaacttaccccgagttgatgcaacacccattctttaccctgcatgaatcaaaaggcaccgatgtggcctcttttgtcaagttgattctcggagactag

SEQ ID NO: 131681 - DNA, 1005 bp, Artificial Sequence
  derived and/or modified sequence
atgtctcagagtaaaggaaaaaaacggaatcccggcctgaaaatccctaaagaagcgtttgagcagccacagacgagttccactcctcccagggacctagatagcaaggcgtgcatcagtatcggaaaccagaatttcgaagtgaaagccgacgacttagaacccattatggagctaggaaggggagcatatggcgtggtggagaagatgaggcacgtccccagcggtcagattatggcagtcaaacgcattagggccaccgtcaactcccaggaacagaagagactgctgatggacctagacattagcatgagaactgttgactgtcctttcacagttaccttctatggcgcgctgttccgagaaggggacgtctggatatgcatggagctgatggacacaagcctggataagttttataagcaggtcattgataaagggcagacaatccccgaggacatccttggcaaaatcgccgtatctatcgtcaaggcgctggaacatctacattccaaactgagcgtgatccaccgcgatgtcaaaccgtctaatgtgctcattaacgcactggggcaggtcaagatgtgcgattttgggatctcaggatatctcgttgatagtgtcgcaaaaactatagatgccggatgtaagccttacatggctccggaaagaattaacccagagttgaatcagaagggctactccgtcaaatctgacatctggagtttggggatcacaatgatcgagctggcgatcctgagatttccgtatgactcctggggtaccccattccagcagttaaagcaggtagtggaggagccatctccccagcttcccgccgacaagttctccgcagagtttgtggactttactagccagtgcctgaaaaagaactcgaaagagcgacctacttaccctgagctaatgcagcaccctttttttacccttcatgaaagtaaagggactgatgtggcttcctttgtgaagctcatcttgggagattag

SEQ ID NO: 131682 - DNA, 1005 bp, Artificial Sequence
  derived and/or modified sequence
atgagccagagcaagggcaagaagagaaatcctggcctgaagatccccaaggaggcctttgagcagccccagaccagcagcaccccaccccgggacctggacagcaaggcctgcatcagcatcggcaaccagaactttgaggtgaaggcagatgacctggagcccatcatggagctgggccgcggggcctacggcgtggtggagaagatgagacatgtgcccagcggccagatcatggctgtgaagaggatccgggccaccgtgaacagccaggagcagaagaggctgctgatggacctggacatctccatgaggacagtggactgccccttcaccgtgaccttctacggggccctcttccgggagggagatgtgtggatctgcatggagctgatggacaccagcctggacaagttctacaagcaggtgattgacaagggccagaccatccctgaggacatcctgggcaagattgctgtgtccatcgtgaaggccctggagcacctgcacagcaagctgagcgtcatccacagagatgtgaagcccagcaatgtgctgatcaatgccctgggccaggtgaagatgtgtgactttggcatcagcggctacctggtggacagcgtggccaagaccattgatgctggctgcaagccctacatggcccctgagcgcatcaaccctgagctgaaccagaagggctacagcgtgaagagtgacatctggagcctgggcatcaccatgattgagctggccatcctgcgcttcccctatgacagctggggcacccccttccagcagctgaagcaggtggtggaggagcccagcccccagctgcctgctgacaagttctctgctgagtttgtggacttcaccagccagtgcctgaagaagaacagcaaggagcggcccacctacccagagctgatgcagcaccccttcttcaccctgcacgagagcaagggcacagatgtggccagctttgtgaagctgatcctgggggactag

SEQ ID NO: 131683 - DNA, 1850 bp, Artificial Sequence
  derived and/or modified sequence
agttccaagtttggagcttttagctgccagccctggcccatcatgtagctgcagcacagccttccctaacgttgcaactgggggaaaaatcactttccagtctgttttgcaaggtgtgcatttccatcttgattccctgaaagtccatctgctgcatcggtcaagagaaactccacttgcatgaagattgcacgcctgcagcttgcatctttgttgcaaaactagctacagaagagaagcaaggcaaagtcttttgtgctcccctcccccatcaaaggaaaggggaaaatgtctcagtcgaaaggcaagaagcgaaaccctggccttaaaattccaaaagaagcatttgaacaacctcagaccagttccacaccacctcgagatttagactccaaggcttgcatttctattggaaatcagaactttgaggtgaaggcagatgacctggagcctataatggaactgggacgaggtgcgtacggggtggtggagaagatgcggcacgtgcccagcgggcagatcatggcagtgaagcggatccgagccacagtaaatagccaggaacagaaacggctactgatggatttggatatttccatgaggacggtggactgtccattcactgtcaccttttatggcgcactgtttcgggagggtgatgtgtggatctgcatggagctcatggatacatcactagataaattctacaaacaagttattgataaaggccagacaattccagaggacatcttagggaaaatagcagtttctattgtaaaagcattagaacatttacatagtaagctgtctgtcattcacagagacgtcaagccttctaatgtactcatcaatgctctcggtcaagtgaagatgtgcgattttggaatcagtggctacttggtggactctgttgctaaaacaattgatgcaggttgcaaaccatacatggcccctgaaagaataaacccagagctcaaccagaagggatacagtgtgaagtctgacatttggagtctgggcatcacgatgattgagttggccatccttcgatttccctatgattcatggggaactccatttcagcagctcaaacaggtggtagaggagccatcgccacaactcccagcagacaagttctctgcagagtttgttgactttacctcacagtgcttaaagaagaattccaaagaacggcctacatacccagagctaatgcaacatccatttttcaccctacatgaatccaaaggaacagatgtggcatcttttgtaaaactgattcttggagactaaaaagcagtggacttaatcggttgaccctactgtggattggtgggtttcggggtgaagcaagttcactacagcatcaatagaaagtcatctttgagataatttaaccctgcctctcagagggttttctctcccaattttctttttactccccctcttaagggggccttggaatctatagtatagaatgaactgtctagatggatgaattatgataaaggcttaggacttcaaaaggtgattaaatatttaatgatgtgtcatatgagtcctcaagcttctcagacttctcttattctttacaaaatgaatgcattggccctgacaaaaaggtgctacggtagtgatgaaattataagtagatttgtagtttgtcccatttattattttaatatttatgtttaagtgcttggttgaaaagattccattttatacaagaagggagattcaaaaaaaaaatataaggttgggttagcaatatttatagggcttttattttttaagttcaattgtgtctgtggtccagaagaaattatttaatatgcatctttgagaatatt

SEQ ID NO: 131684 - DNA, 2870 bp, Artificial Sequence
  derived and/or modified sequence
gttccaagtttggagcttttagctgccagccctggcccatcatgtagctgcagcacagccttccctaacgttgcaactgggggaaaaatcactttccagtctgttttgcaaggtgtgcatttccatcttgattccctgaaagtccatctgctgcatcggtcaagagaaactccacttgcatgaagattgcacgcctgcagcttgcatctttgttgcaaaactagctacagaagagaagcaaggcaaagtcttttgtgctcccctcccccatcaaaggaaaggggaaaatgtctcagtcgaaaggcaagaagcgaaaccctggccttaaaattccaaaagaagcatttgaacaacctcagaccagttccacaccacctcgagatttagactccaaggcttgcatttctattggaaatcagaactttgaggtgaaggcagatgacctggagcctataatggaactgggacgaggtgcgtacggggtggtggagaagatgcggcacgtgcccagcgggcagatcatggcagtgaagcggatccgagccacagtaaatagccaggaacagaaacggctactgatggatttggatatttccatgaggacggtggactgtccattcactgtcaccttttatggcgcactgtttcgggagggtgatgtgtggatctgcatggagctcatggatacatcactagataaattctacaaacaagttattgataaaggccagacaattccagaggacatcttagggaaaatagcagtttctattgtaaaagcattagaacatttacatagtaagctgtctgtcattcacagagacgtcaagccttctaatgtactcatcaatgctctcggtcaagtgaagatgtgcgattttggaatcagtggctacttggtggactctgttgctaaaacaattgatgcaggttgcaaaccatacatggcccctgaaagaataaacccagagctcaaccagaagggatacagtgtgaagtctgacatttggagtctgggcatcacgatgattgagttggccatccttcgatttccctatgattcatggggaactccatttcagcagctcaaacaggtggtagaggagccatcgccacaactcccagcagacaagttctctgcagagtttgttgactttacctcacagtgcttaaagaagaattccaaagaacggcctacatacccagagctaatgcaacatccatttttcaccctacatgaatccaaaggaacagatgtggcatcttttgtaaaactgattcttggagactaaaaagcagtggacttaatcggttgaccctactgtggattggtgggtttcggggtgaagcaagttcactacagcatcaatagaaagtcatctttgagataatttaaccctgcctctcagagggttttctctcccaattttctttttactccccctcttaagggggccttggaatctatagtatagaatgaactgtctagatggatgaattatgataaaggcttaggacttcaaaaggtgattaaatatttaatgatgtgtcatatgagtcctcaagcttctcagacttctcttattctttacaaaatgaatgcattggccctgacaaaaaggtgctacggtagtgatgaaattataagtagatttgtagtttgtcccatttattattttaatatttatgtttaagtgcttggttgaaaagattccattttatacaagaagggagattcaaaaaaaaaatataaggttgggttagcaatatttatagggcttttattttttaagttcaattgtgtctgtggtccagaagaaattatttaatatgcatctttgagaatattataaaaatatcaaaaaggagctcttcttgtgaaatgtctgttccagctgttgtgactgctgccatttttgcaaacatctgcccaatcctgggtgatcaccacatcttttaggggaagtgacaagatgctctggtcatactctttttcccaactttggaaaacataaaaatcactcatataacagctcaaagagtaaaacatttggttcttctgacacttgtggtatagtattagtggaaagtgatttgtaatatgattttatatccacctacctattcatctacctgtgtgtatgtgtgtgtttgtgtgtctatttggcaattcacaagtcctgccaagtggtttctatgagcatctctgtttggtaaggaggacaattgtcagttttgagggggacatgtgttaaatcacagaaaaaaatggtgccttcttctgcgtttgtccctcctgccatgtgtaagttgtaaggattgcctttgtagttaatgtactctttggctttgtttgtttgttttcttcttcagtgaagcagccttactattcatagaagggctagaataggagaaaatgaaaggtagtgagtaattctttgataagatgaggaaataatgggaaaggttgaattaattcctgggcatggactaccagatgaccacaagttgcgttgaggccgcatctttcttcagcagcgtgcaatagctggctcctctataggagatgagcttcattgggagttcctagcaagttgactaaacagcaaaagttctttctcgtgggtaaatatacccacaggttctatgatttgtagctctaggtttcttgatgatcaaggagtgaagtaattgacagggaaaatatagacctatgataaataaccaggaagcattgcttttggacaaggaaggacagagggttttgattttaaaaagaagaaaaaaaaaccttattttttctttcttggcctcaagttcaatatggagaggattgcttccctgaatcctctcttccttccccttttaga

SEQ ID NO: 131685 - DNA, 1005 bp, Artificial Sequence
  derived and/or modified sequence
atgagccagagcaagggcaagaagcggaaccccggcctgaagatccccaaagaggccttcgaacagcctcagacttcaagcaccccgccacgagatctcgacagcaaggcctgtatctcaattggtaatcagaatttcgaggtaaaagccgacgatctggagccgattatggaactggggcgaggtgcctacggcgtggttgagaaaatgagacacgttcctagcggacagatcatggctgttaagcgtattcgagccaccgttaatagccaagaacaaaaacgcttgctgatggacctggatattagcatgcgcacagtggactgcccctttacagtaactttttatggcgcgctattcagagagggggacgtctggatttgtatggagttaatggacacatcccttgacaaattttacaagcaggtgatcgacaaaggccagactattcctgaagacattctcgggaaaattgctgtgtccattgtgaaggccctggagcatctgcattcaaagctttctgtgatccatagagacgtgaagccctctaacgttcttatcaacgccctcggacaggtgaagatgtgtgattttggcataagcggctacctggtggactctgtggccaagactattgacgcgggatgcaaaccgtacatggctcccgaaagaatcaacccagagcttaaccagaagggatacagcgtcaaatcagatatatggtcactagggattacaatgatcgagctcgccatattgcgatttccatacgattcttgggggacgccttttcagcagctgaagcaggtggttgaggagccatcgccccaacttcccgccgacaagttttcagctgagtttgtggatttcacatctcagtgtttgaaaaagaacagtaaggagcggcctacatacccggagctaatgcagcacccattttttaccctccacgaaagcaaaggtaccgacgtcgcctcctttgtaaagctgattttgggagattag

SEQ ID NO: 131686 - DNA, 1005 bp, Artificial Sequence
  derived and/or modified sequence
atgagccagagcaagggcaagaagcggaaccccggcctgaagatccctaaagaggcctttgaacagccgcagacttcttcaacacctccgagagacttggactcaaaagcctgtatctcaattggcaatcaaaattttgaagttaaggctgacgacttagagcccatcatggagctgggacgaggcgcctacggagtagtggagaaaatgaggcatgtaccgtccggtcagattatggccgtaaaaagaattcgggcaaccgtaaactcccaggagcagaagcggcttctcatggacctggatatttccatgcgcactgtggactgtccgttcacagtgacgttctacggtgccctgtttagggaaggcgatgtttggatctgtatggagttgatggacacatcactggacaagttttacaaacaggtgattgacaaggggcaaactattccggaggatatcctgggcaagattgccgtttccatcgtgaaggctctggaacaccttcactccaaactctccgtgatccatagggacgtaaagccttccaacgttctgatcaacgccctcgggcaagtgaaaatgtgtgactttgggatttctggataccttgttgattcagttgccaaaacgatcgacgccgggtgcaagccctatatggctcccgagcggatcaatcccgaactcaaccagaagggatactcggtaaagagcgacatctggagcctgggaatcacaatgattgagcttgccatcctccgattcccctatgatagctggggaactccattccaacaactaaagcaggtagttgaggagccctcccctcaactccccgctgataagtttagcgccgagttcgtggacttcacatcccagtgcttgaagaagaactctaaagagagaccaacttaccccgagttgatgcagcatcccttctttacccttcatgaatctaagggaacagacgtcgcctcctttgttaaactgatcttaggcgactag

SEQ ID NO: 131687 - DNA, 1005 bp, Artificial Sequence
  derived and/or modified sequence
atgagccagtctaaaggaaagaaaagaaatcccggtcttaagattcccaaggaggccttcgagcagccacaaacctcctctaccccgcctcgcgatttggacagtaaggcctgtatctccataggcaatcaaaacttcgaggtgaaggccgatgatcttgaaccaattatggaactggggcgaggggcttacggggtagtggaaaaaatgcggcacgtgccttctggtcaaatcatggccgttaagcgcattcgcgcaactgttaactcccaggagcagaagcgtctcctcatggatctcgatatttcgatgcggacagtggattgcccattcacggtgacgttttacggtgccctgtttcgcgagggtgacgtctggatttgcatggagcttatggatactagcctagacaaattttacaaacaggtgattgacaaaggacagacgatacctgaggatatcctaggaaagattgcagtgtccatagtcaaagcacttgaacatctgcactccaaactgagcgtgatacatcgagacgtgaaaccatctaatgtgctgattaatgccctgggccaggtgaagatgtgcgattttggaatatctggataccttgtcgattcggtagccaagaccatcgacgccggatgcaagccctatatggcccctgagaggatcaacccagagttgaatcagaagggttactctgttaaatctgacatatggtccctcgggatcacaatgatcgagctggctatcctacgtttcccctacgactcttggggcacaccgtttcaacagcttaagcaggtggtggaagagccaagccctcagctcccagcagataaattctctgcagagtttgtcgatttcactagtcagtgcctcaagaagaatagtaaggagaggcccacgtaccctgagctgatgcaacaccccttcttcactcttcatgaaagtaaaggcaccgacgtggcaagcttcgtgaaactgatactgggcgattag

SEQ ID NO: 131688 - DNA, 1005 bp, Artificial Sequence
  derived and/or modified sequence
atgagccagagtaagggcaaaaaacggaaccccggattgaaaattcctaaagaagcttttgaacagccccagacaagttcgacgccaccaagggatctggactcaaaggcttgcatctctataggcaaccagaactttgaggtgaaagcagatgacctggagccaatcatggagctggggaggggggcatacggcgtggtggagaaaatgcgccatgtgcctagtggtcaaattatggccgtgaagagaattagagcgacagtgaattctcaagagcaaaagcggctgctcatggacctcgatatctccatgcgcaccgtggactgtccatttactgtgactttttacggagcgctgtttcgcgaaggagatgtctggatctgcatggagctgatggacacttcccttgacaagttttataagcaggtaatcgataaagggcagaccataccggaggatatcttggggaaaatagcagtctctatcgtgaaagctctagagcatctgcactcaaaattgtctgtgatccaccgggatgttaaacctagtaacgtcctaattaacgctctgggccaggtaaagatgtgtgactttggtatctccggctacctagtcgattctgtggcgaagacaatagatgctggctgtaagccatatatggcccctgagagaattaatcccgagttaaaccagaagggctatagcgttaagtccgatatatggtctttaggtatcaccatgatagaactggcaatcctgcgatttccttacgattcttggggaacgccctttcagcaattaaagcaggtggtggaagagccgtcgccgcagctgccagccgacaagttctccgccgagtttgtggactttacctcacagtgtctgaaaaagaacagtaaggagaggcccacttaccctgagctcatgcaacatcctttcttcaccctgcacgaaagcaaggggactgacgtggcatcttttgtaaagctgatcctgggggattag

SEQ ID NO: 131689 - DNA, 1005 bp, Artificial Sequence
  derived and/or modified sequence
atgagccagagcaagggcaagaagagaaaccccggcctgaagatccccaaggaggccttcgagcagccccagaccagcagcaccccccccagagacctggacagcaaggcctgcatcagcatcggcaaccagaacttcgaggtgaaggccgacgacctggagcccatcatggagctgggcagaggcgcctacggcgtggtggagaagatgagacacgtgcccagcggccagatcatggccgtgaagagaatcagagccaccgtgaacagccaggagcagaagagactgctgatggacctggacatcagcatgagaaccgtggactgccccttcaccgtgaccttctacggcgccctgttcagagagggcgacgtgtggatctgcatggagctgatggacaccagcctggacaagttctacaagcaggtgatcgacaagggccagaccatccccgaggacatcctgggcaagatcgccgtgagcatcgtgaaggccctggagcacctgcacagcaagctgagcgtgatccacagagacgtgaagcccagcaacgtgctgatcaacgccctgggccaggtgaagatgtgcgacttcggcatcagcggctacctggtggacagcgtggccaagaccatcgacgccggctgcaagccctacatggcccccgagagaatcaaccccgagctgaaccagaagggctacagcgtgaagagcgacatctggagcctgggcatcaccatgatcgagctggccatcctgagattcccctacgacagctggggcacccccttccagcagctgaagcaggtggtggaggagcccagcccccagctgcccgccgacaagttcagcgccgagttcgtggacttcaccagccagtgcctgaagaagaacagcaaggagagacccacctaccccgagctgatgcagcaccccttcttcaccctgcacgagagcaagggcaccgacgtggccagcttcgtgaagctgatcctgggcgactag

SEQ ID NO: 131690 - protein, 551 aa, Artificial Sequence
  derived and/or modified sequence
MAGDLSAGFFMEELNTYRQKQGVVLKYQELPNSGPPHDRRFTFQVIIDGREFPEGEGRSKKEAKNAAAKLAVEILNKEKKAVSPLLLTTTNSSEGLSMGNYIGLINRIAQKKRLTVNYEQCASGVHGPEGFHYKCKMGQKEYSIGTGSTKQEAKQLAAKLAYLQILSEETSVKSDYLSSGSFATTCESQSNSLVTSTLASESSSEGDFSADTSEINSNSDSLNSSSLLMNGLRNNQRKAKRSLAPRFDLPDMKETKYTVDKRFGMDFKEIELIGSGGFGQVFKAKHRIDGKTYVIKRVKYNNEKAEREVKALAKLDHVNIVHYNGCWDGFDYDPETSDDSLESSDYDPENSKNSSRSKTKCLFIQMEFCDKGTLEQWIEKRRGEKLDKVLALELFEQITKGVDYIHSKKLIHRDLKPSNIFLVDTKQVKIGDFGLVTSLKNDGKRTRSKGTLRYMSPEQISSQDYGKEVDLYALGLILAELLHVCDTAFETSKFFTDLRDGIISDIFDKKEKTLLQKLLSKKPEDRPNTSEILRTLTVWKKSPEKNERHTC

SEQ ID NO: 131691 - protein, 363 aa, Artificial Sequence
  derived and/or modified sequence
MAGDLSAGFFMEELNTYRQKQGVVLKYQELPNSGPPHDRRFTFQVIIDGREFPEGEGRSKKEAKNAAAKLAVEILNKEKKAVSPLLLTTTNSSEGLSMGNYIGLINRIAQKKRLTVNYEQCASGVHGPEGFHYKCKMGQKEYSIGTGSTKQEAKQLAAKLAYLQILSEETSVKSDYLSSGSFATTCESQSNSLVTSTLASESSSEGDFSADTSEINSNSDSLNSSSLLMNGLRNNQRKAKRSLAPRFDLPDMKETKYTVDKRFGMDFKEIELIGSGGFGQVFKAKHRIDGKTYVIKRVKYNNESKTKCLFIQMEFCDKGTLEQWIEKRRGEKLDKVLALELFEQITKGVDYIHSKKKKKKKKK

SEQ ID NO: 131692 - DNA, 1092 bp, Artificial Sequence
  derived and/or modified sequence
atggccggcgacctgagcgccggcttcttcatggaggagctgaacacctacagacagaagcagggcgtggtgctgaagtaccaggagctgcccaacagcggccccccccacgacagaagattcaccttccaggtgatcatcgacggcagagagttccccgagggcgagggcagaagcaagaaggaggccaagaacgccgccgccaagctggccgtggagatcctgaacaaggagaagaaggccgtgagccccctgctgctgaccaccaccaacagcagcgagggcctgagcatgggcaactacatcggcctgatcaacagaatcgcccagaagaagagactgaccgtgaactacgagcagtgcgccagcggcgtgcacggccccgagggcttccactacaagtgcaagatgggccagaaggagtacagcatcggcaccggcagcaccaagcaggaggccaagcagctggccgccaagctggcctacctgcagatcctgagcgaggagaccagcgtgaagagcgactacctgagcagcggcagcttcgccaccacctgcgagagccagagcaacagcctggtgaccagcaccctggccagcgagagcagcagcgagggcgacttcagcgccgacaccagcgagatcaacagcaacagcgacagcctgaacagcagcagcctgctgatgaacggcctgagaaacaaccagagaaaggccaagagaagcctggcccccagattcgacctgcccgacatgaaggagaccaagtacaccgtggacaagagattcggcatggacttcaaggagatcgagctgatcggcagcggcggcttcggccaggtgttcaaggccaagcacagaatcgacggcaagacctacgtgatcaagagagtgaagtacaacaacgagagcaagaccaagtgcctgttcatccagatggagttctgcgacaagggcaccctggagcagtggatcgagaagagaagaggcgagaagctggacaaggtgctggccctggagctgttcgagcagatcaccaagggcgtggactacatccacagcaagaagaagaagaagaagaagaagaagtag

SEQ ID NO: 131693 - DNA, 1656 bp, Artificial Sequence
  derived and/or modified sequence
atggccggcgacctgagcgccggcttcttcatggaggagctgaacacctacagacagaagcagggcgtggtgctgaagtaccaggagctgcccaacagcggccccccccacgacagaagattcaccttccaggtgatcatcgacggcagagagttccccgagggcgagggcagaagcaagaaggaggccaagaacgccgccgccaagctggccgtggagatcctgaacaaggagaagaaggccgtgagccccctgctgctgaccaccaccaacagcagcgagggcctgagcatgggcaactacatcggcctgatcaacagaatcgcccagaagaagagactgaccgtgaactacgagcagtgcgccagcggcgtgcacggccccgagggcttccactacaagtgcaagatgggccagaaggagtacagcatcggcaccggcagcaccaagcaggaggccaagcagctggccgccaagctggcctacctgcagatcctgagcgaggagaccagcgtgaagagcgactacctgagcagcggcagcttcgccaccacctgcgagagccagagcaacagcctggtgaccagcaccctggccagcgagagcagcagcgagggcgacttcagcgccgacaccagcgagatcaacagcaacagcgacagcctgaacagcagcagcctgctgatgaacggcctgagaaacaaccagagaaaggccaagagaagcctggcccccagattcgacctgcccgacatgaaggagaccaagtacaccgtggacaagagattcggcatggacttcaaggagatcgagctgatcggcagcggcggcttcggccaggtgttcaaggccaagcacagaatcgacggcaagacctacgtgatcaagagagtgaagtacaacaacgagaaggccgagagagaggtgaaggccctggccaagctggaccacgtgaacatcgtgcactacaacggctgctgggacggcttcgactacgaccccgagaccagcgacgacagcctggagagcagcgactacgaccccgagaacagcaagaacagcagcagaagcaagaccaagtgcctgttcatccagatggagttctgcgacaagggcaccctggagcagtggatcgagaagagaagaggcgagaagctggacaaggtgctggccctggagctgttcgagcagatcaccaagggcgtggactacatccacagcaagaagctgatccacagagacctgaagcccagcaacatcttcctggtggacaccaagcaggtgaagatcggcgacttcggcctggtgaccagcctgaagaacgacggcaagagaaccagaagcaagggcaccctgagatacatgagccccgagcagatcagcagccaggactacggcaaggaggtggacctgtacgccctgggcctgatcctggccgagctgctgcacgtgtgcgacaccgccttcgagaccagcaagttcttcaccgacctgagagacggcatcatcagcgacatcttcgacaagaaggagaagaccctgctgcagaagctgctgagcaagaagcccgaggacagacccaacaccagcgagatcctgagaaccctgaccgtgtggaagaagagccccgagaagaacgagagacacacctgctag

SEQ ID NO: 131694 - DNA, 1092 bp, Artificial Sequence
  derived and/or modified sequence
atggctggcgacttgtccgccggtttctttatggaggagctcaacacctaccgccagaagcagggcgtcgtattaaagtaccaggaactcccgaatagcgggccacctcacgatcgcaggtttaccttccaagtcataatcgatggacgcgagtttccagagggcgaagggcggagcaaaaaagaagctaaaaacgccgccgcaaaattagccgtcgaaatcctgaacaaagagaagaaggctgtttcccccctgctactcacaactaccaacagttcggagggtcttagtatgggaaactacattggcttgatcaaccggattgcccagaaaaaaaggctgactgtgaattatgagcagtgcgccagtggcgtgcacggaccggaaggatttcattacaaatgcaagatggggcagaaggagtactccatcgggacaggctcaactaagcaggaagcaaagcagctggccgcaaagttagcttatcttcagatcctgagcgaggagacgtctgttaagagcgactatctgagctctgggtctttcgctaccacatgtgagtcgcagtccaactctttagttacctcaacgttagccagtgagtcatcctcagagggggattttagtgccgacactagcgagattaacagtaacagtgacagcctgaactctagctcactgctcatgaatggtttacgaaataatcagcgtaaggctaaacgctcgctagctcccaggttcgacttaccggatatgaaagagactaagtacaccgtggacaaacgctttggtatggattttaaagagatagagttgattgggtccgggggatttgggcaggtgttcaaagccaagcatcggatcgacggaaagacttatgtgattaagcgggtgaagtacaacaatgagagtaagactaaatgtctgtttatccagatggagttttgtgacaaggggacactcgagcagtggattgagaagaggcgcggtgagaagctcgacaaggtgctggctctggaactgtttgagcagatcactaagggagtcgattacatccacagcaagaagaaaaaaaagaaaaaaaaaaaatag

SEQ ID NO: 131695 - DNA, 1656 bp, Artificial Sequence
  derived and/or modified sequence
atggccggagacctgtccgccgggtttttcatggaggaactgaatacttaccggcagaaacagggagtggtcttaaaatatcaggagctacctaactccggccccccacatgacagacgctttacctttcaagttattattgatgggcgagagttccctgaaggagaaggaaggtctaaaaaagaagccaagaacgctgctgcaaaattagccgtagaaattctcaacaaggaaaaaaaagcagtgtcccctcttctgctgaccaccactaattcctctgaaggactatccatggggaactatattggccttattaacagaattgcccaaaagaaacgcctgacggtgaactatgaacagtgcgcatcaggtgtgcacgggcccgagggattccactacaaatgcaagatgggtcagaaggaatacagtataggcaccgggtctaccaagcaggaagccaagcaactcgctgcgaaactggcatacctgcagatactcagcgaggagacatcagtgaagagcgattacctgtctagtggaagttttgcgactacctgcgagtctcaaagcaactcacttgttacttcgacactggctagtgagtcctccagtgagggggacttctcagcggacacgtcagaaattaactccaactcagacagcctgaacagcagctctcttttgatgaacggcctgcgcaataaccagcgaaaagccaagcgaagtttggcaccccgctttgacctcccggacatgaaggaaacaaagtacactgtggacaagcgatttgggatggacttcaaggagatagagctcattggctcaggcggcttcggacaggtgtttaaagccaagcacagaatcgacggaaaaacatacgtgatcaagcgcgtgaagtataataacgagaaagctgagcgcgaggtgaaggcactcgccaagctcgatcacgtcaacattgtccattacaatggttgctgggacggatttgactacgacccagagacatccgatgattccctcgaaagttccgactacgaccccgaaaactccaaaaattcaagtcgcagcaagaccaagtgtctgtttatccagatggaattttgtgacaaaggcacacttgaacagtggatagagaagaggcgcggggaaaagctcgacaaagttctcgctctcgagctcttcgagcagattacaaagggcgtcgactatatacactccaagaagcttatccacagggatttaaaacctagtaatatcttcctggtcgacacgaagcaagtgaagataggagactttggactggtgacctcactgaaaaatgatggcaagcgaacccgaagcaagggaacactgcgctatatgagccctgagcagattagctcccaagattatggcaaagaggtagatctgtacgccctgggcctcatactcgcagagctgctgcatgtctgcgataccgctttcgagaccagtaagttttttacagaccttagagacggaatcattagtgacatctttgacaaaaaagagaagactctgctccagaagctcctatcaaagaaaccagaagaccggcctaacactagcgagattctgagaactctcaccgtgtggaaaaagtctccagagaagaacgagcggcacacatgctag

SEQ ID NO: 131696 - DNA, 10042 bp, Artificial Sequence
  derived and/or modified sequence
agcagacgagggcttgtgcgagagggggccgggcggctgcagggaaggcggagtccaaggggaaaacgaaactgagaaccagctctcccgaagccgcgggtctccggccggcggcggcggcggcggcggcggcggcgcagtttctggagcaaattcagtttgccttcctggatttgtaaattgtaatgacctcaaaactttagcagttcttccatctgactcaggtttgcttctctggcggtcttcagaatcaacatccacacttccgtgattatctgcgtgcattttggacaaagcttccaaccaggatacgggaagaagaaatggctggtgatctttcagcaggtttcttcatggaggaacttaatacataccgtcagaagcagggagtagtacttaaatatcaagaactgcctaattcaggacctccacatgataggaggtttacatttcaagttataatagatggaagagaatttccagaaggtgaaggtagatcaaagaaggaagcaaaaaatgccgcagccaaattagctgttgagatacttaataaggaaaagaaggcagttagtcctttattattgacaacaacgaattcttcagaaggattatccatggggaattacataggccttatcaatagaattgcccagaagaaaagactaactgtaaattatgaacagtgtgcatcgggggtgcatgggccagaaggatttcattataaatgcaaaatgggacagaaagaatatagtattggtacaggttctactaaacaggaagcaaaacaattggccgctaaacttgcatatcttcagatattatcagaagaaacctcagtgaaatctgactacctgtcctctggttcttttgctactacgtgtgagtcccaaagcaactctttagtgaccagcacactcgcttctgaatcatcatctgaaggtgacttctcagcagatacatcagagataaattctaacagtgacagtttaaacagttcttcgttgcttatgaatggtctcagaaataatcaaaggaaggcaaaaagatctttggcacccagatttgaccttcctgacatgaaagaaacaaagtatactgtggacaagaggtttggcatggattttaaagaaatagaattaattggctcaggtggatttggccaagttttcaaagcaaaacacagaattgacggaaagacttacgttattaaacgtgttaaatataataacgagaaggcggagcgtgaagtaaaagcattggcaaaacttgatcatgtaaatattgttcactacaatggctgttgggatggatttgattatgatcctgagaccagtgatgattctcttgagagcagtgattatgatcctgagaacagcaaaaatagttcaaggtcaaagactaagtgccttttcatccaaatggaattctgtgataaagggaccttggaacaatggattgaaaaaagaagaggcgagaaactagacaaagttttggctttggaactctttgaacaaataacaaaaggggtggattatatacattcaaaaaaattaattcatagagatcttaagccaagtaatatattcttagtagatacaaaacaagtaaagattggagactttggacttgtaacatctctgaaaaatgatggaaagcgaacaaggagtaagggaactttgcgatacatgagcccagaacagatttcttcgcaagactatggaaaggaagtggacctctacgctttggggctaattcttgctgaacttcttcatgtatgtgacactgcttttgaaacatcaaagtttttcacagacctacgggatggcatcatctcagatatatttgataaaaaagaaaaaactcttctacagaaattactctcaaagaaacctgaggatcgacctaacacatctgaaatactaaggaccttgactgtgtggaagaaaagcccagagaaaaatgaacgacacacatgttagagcccttctgaaaaagtatcctgcttctgatatgcagttttccttaaattatctaaaatctgctagggaatatcaatagatatttaccttttattttaatgtttcctttaattttttactatttttactaatctttctgcagaaacagaaaggttttcttctttttgcttcaaaaacattcttacattttactttttcctggctcatctctttattctttttttttttttaaagacagagtctcgctctgttgcccaggctggagtgcaatgacacagtcttggctcactgcaacttctgcctcttgggttcaagtgattctcctgcctcagcctcctgagtagctggattacaggcatgtgccacccacccaactaatttttgtgtttttaataaagacagggtttcaccatgttggccaggctggtctcaaactcctgacctcaagtaatccacctgcctcggcctcccaaagtgctgggattacagggatgagccaccgcgcccagcctcatctctttgttctaaagatggaaaaaccacccccaaattttctttttatactattaatgaatcaatcaattcatatctatttattaaatttctaccgcttttaggccaaaaaaatgtaagatcgttctctgcctcacatagcttacaagccagctggagaaatatggtactcattaaaaaaaaaaaaaaaagtgatgtacaaccacttcggaaaacaatttggcattatctagtaaagttgaatccatgtatacccacatagctatcaattctattcctacatacgtgcttacaagaatgtccataaaaccctgtttataatagccaaaagaacagggaacaaccataatgcacatcaaaagaagaatggattaaaaaaattatattcacacacaggagtactatatagtattgaaaacaattgaagtacagctaaatgtaataacgtaacacaatacaactctcagaaacataatgttaagcgaacaaagcaggttttcagaaaatatatgcagaataattccatttatataaagttccagagcatgcaaaactaaatcattttgtataaaaaacccaacaaatgtgatgagacaataatgggaaggaagggaatgagaaatattaaattctggatggtggttatctttgagggaggggaatgatgtgattggggaaatggactttcaaaggtaatggtaacttccttaagctggatggtaggtccactagtgtttgctgcatagttataccttttatcttaaatacattttgtatctattgtaacaaccactttaaagacaaccgtgctgtaaggcagtagctaaaaacagaaaatagtccatcgggaagggtaagatggctttctgctgagcacagggctagaagtgacagcccagtgggccttccaactatatgccagggtgttagatgagtagagaggagaccacccaggaagtctggacaaggggtctggcatgagctctggagaagatatatttgaggaacatggggtatgctagtttgttgtcctgaattgctgtagagaagataatttaaattgcatcttagaagacgaccctgagggtgaatttcaacttagggcaattgttttagtttgtttcttattggtttaaatggatacttgaagctggataatttataaggaaaagagatttatatgacttacagttctgcaggctgtacaagaaacatggcaccagcatctgcttcttccccggctgcttccactcatggtggaaggtgaaggggagccggatgtgcagagatcatatggcaagagaggaagcaagagagcgagggagaaggtgccaggctctttttaaataaccggctcttgagggaactaatagattgagaactccttgcttctcctccccagcacaccccacccccagggacggcattaatgtattcatgaggggtcttcccccatgacccaaacacctcccatcaggccccacctccaacactgggatcaaatttcaacatgagattttgggggacaaacatgcaaactatagcagcaaccagctaccattctaaaactgccatatgattttaggatttttaaaaagggccaaatttaggttaagcaaaaagtgaaaatacagtaagagaaaatagttttataaaggctttaaaaagtgttcataaagagcagttcatagatttttcacgtaacgttcatcaatagatgctaaaactattggatgaaaagctattgtggaataggatcttctacaaggatttaaatataatcctacagaagaggtatcaattatacaggggaaaatgtacctttacaatggtcaccacaataaccaagtgattcaatttagcatcacccaaggtggaacaccctaacattatgcccctcctgatgtgacttaagaattttacctatttagttttcttgcacaaagtgttaaactggaatttaatcatgaggaaattattagacaaatcctgaatgtagtcattctataagatgattgacttgggcttctcaaaaagtcagtgtcatgaaaaaaaaaaaaaggggagagacttgtaagatacaatgaccaaatgcaatgtttgaatctttattgtattctggatatttaaaaagacaaaagctggacgcagtagctaatgcctgttatcccagcatttttgggaggtcaaaaggggaggatggcttgagcataggattttgagactagcctgggcaacacagtgagttctcatctctacaaaaaatcagaaaattagctgggcatggtagtgtgcatctgtggtcccagctacttgggggggtgaggtgggaggatcacttgagcctaggaggtcaaggccgcagtgagccatgatcatgttactgcattccagcctgggtgacagagtgagatcatatctaaataataataataataaaagaaagcaacaacccagcaaacagctataaagatatcttcgggacaattgagaacatttgaatatagactgcatattagataacaatgccaaataactgttttctcaggtgtgataatagtatatgtagaaaatgtctttttgttttgttttattttgtttttgtttgtttgtttgttttgagacagagtctcactgtgtcgcccaggctggagtgcagtggcacgatctcggctcactgcaacctctgcctcccaggttcaagtgattctcctgcctctgcttcctgagtagctgggattacaggtatctgccaccactccaggttaattttttctatttttagtagagacggaatttcaccatgttgacccagctggttttgaactcctgacctcaggtgattcacttgccttggcctcccaaagtgttgagattacaggcatgagtcactgcacccagccaaaaatgtttttttaggcaatgcatgcacaaacatttagaggccaagtgtgtcatgatgtctgcaactttcaatgttcagcaaaaatcaacatggagagagaaagagggcacacatgtggcaaaatattagccattgtacaattggtaaatctagatgacagtacacaggtgtttgttgtattattctttgaacttttctgtagatttggaaatgttctgcgtagagagaaatctttttttaaaaaaacaatatctggttttgattaatgaggctatattcaaaagaaacactaaatgatgtggccagttagtgagaatgtagccttatctttactgacctcattttaatattcctactctggctgggcatggtggctcacgcctataatcccagcactctgggaggccgagacgggtggatcacctgaggtcaggggttcgagaccagcctggccaacatggtgaaaccccatctctactaaaaatacaaaaattagctgggtgtggtggtaggcgcctgtaatcccagctactcgggagtccgtggcaggagaatcgcttgaacccaggaggtggaggttgcagtgagctgagatcacgccattgcactccagcctgggtgacaagagcaaaactcagtctcaaaaaaaaaaaagaaaaaaaaagatatatatattcctactcttattaaatgaatatagcatttcttagcaacttcttttgatttgtgagtatatattttcttggcctcaaaattaaagtaaaaagtatcctcttactcagaggaggacaggggcaagagcctgggaccttatttgctaattaaaatgcacacacacacacacacacacagaaattttgagagccattttaatataattgcctccctagaaacataccttttagggaatttttatcactaaaccacatgttatttaaatacgtacatgtttaacataaatacatacataaaattcacatgcatacttaacacttatgttaaatatattcaatgtatatacatatgtacacaatatatgcatatatacatgtgggtatgtggtatgtgtgcatgtgtgtgtatggccagctacataatttgtgggactaagggcaaaatgaaactgtacggccctcgttcaaaaattaggtgtggggtgcttctaagcacagtcttgtgcaactgcacaggttgcatgtccatgaagccatcctgtgtgtgtgcacatatgtgtatgaatatgtattttatataatacatatatatgcatgtatgtatctgagaagaaatgtttaaaaggctacatacaagcttttccaggtctctactatctgttaactaactagagacataactcacaatatgcagtccccactgagtgttcaccataatttgagattcttggcatgttaacttttcattatggaatattgaataatttcaatattattcatacatttctttatgttcaaacatacacaaaaatagaataatgaaactctacccatcacccagctgcaacaaatatcaatactttaccgttcttaatacatctaaccccttactttttgtttgtttcttttggtgaagtatttaattgtaattttttttttaagagacaggatctcactctgtcacccaggccagagtacagtggtacgatcacagctccttgtaacctcgaactcctaggctcaagtgatcctcctgcctcagccgcttgaatagctgggactacatgcatacaccaacacacccaactaatttttaaattttttgtagaaatatggtcttgctgtgtttcccaggctggtctcaaactcctggccttgagagattctcctgccttggtcttccaaactgctgggattacaatatccggccctactggaatattttaaagtaaatctcaggtgttacatcattgcacttgtaagtactttaaaatgtatctctagcagataaatctttttaacaaaaccacagcatcattgtcacactcaaaaaattgacaagatttccttaattatcatataatagtctgtattgtttctatctcaaaaatacagttttcttggttgttgaaatctagatccaacattgcatttggttgatgtgtctcctttactctgtaaaatttacccctgcgttttagttcttttcggcttttatttgtcctgtggaatttcctccactcaggatttgactgagagtatccccagagtgtccagttagacctagaagctggatttgatcctggttcatttattttcccccaagaatactccataggtgatgctatacactttctcttacatcatttcaggaggaacatgatgtctgattgttccactttcagtgattttaatattgatcaatgagttctggtggtaccaactactacaaagtttctcatcaatctttcacctgatggttttagcagctattgataattgttgcctggatccattatttcatttcaggggttgtaaaatagtgattttctggttctatcaaacctcttgcatttatcatctatgattcttctttaaggaactttctctaaatctgaatgggaaagatgcgataaatatttatcaaattttagagtgagttagtgccctagcaacctccacagttgacaaatgagtatttctttaaagcaaggtatggcccaaccaatactttgaaactagcatgtttagaatagagcaggaggaaactatatttgaaaggtcagaagtggaaagactaagagggcctgaacaataagaggacagaaccaagaggagttggcaactaattggatgtggggattaaggaaaggtaagcatcaaagattacctccaagtttgttagaaggttagtagcaggattctgatgccattcaagtaaatacaagtctcagtcagatgaaccccaagagccacatgtatttgaggggtactttgtctcacacttttacctgttacatggttttcagtaatttagaatttaagccagtagtggggcgactgtacatctatcgacatggtgaggtagagcatgtttgggaggaaagacgttgaatcccatttggtgacagtgagcttgaggtgctgccagaacactgcactgaagataggaggagactgtaggaaatacaagataggaaaggtctccactgaaatgttaactctttctctctaaacggccatccaggcctcaatgtctgcagtttctgatctgtgattatgacttatccaaatcttacatttcttaaaaatagtcatagatgaagggaatcacagttgatagttatatggtgacattattggcttaaattctaaataactagaaactgtataataggcaaaactgtgaggcaaataaaatgcttctcaaatctgtgtggctcttatggggttaatttgatttggacctgtattaatttcttatggctgctataactaacaaattaccacaaacttggtggtttaaaacaacacacatttattctctttctgttctggaggccagaagtctaaaatgagattcactgggctgcagttcactgggcaaggccatgctcctctggaggcttccatgatgcatcccatattcagtgtttcccgagtaagccccacccatgcaggtctgcagttttacctcaacaggcttttgcactcagtggctctctcctgtggtttctatctgaaattctcttcattttttttttaataactgctttattgagatataattcacatgccatacaattcacctatacagtatacaattcagtagtgtttactatattcagagttgtgcaactatcatttttctcacccccaaaagaaaccctatgcccgttagtattcactctgttttctcacaactctaggtaaccactaatctactctccatctctatagatttgcccatgctagacatttcatataaatggaatcatacatgtggtctttttcactgagtatattttcaaggtgcatcccagctgtggcatgaatcagcatctcattcctttttattgccaaataatattctatcatatggatatgtcgcattttatgtatccattcatcagctgatggacatttgggttgtttgtactttttggctaccatgaataatgctactatgaacttttgtgtacaaatcttatgtggacttgttttcatttctcttggatgtatattcctaggagaatggctggattatacagtaactctttcctcataactttgcatatcaaaattatatccatctttcagaacccaaattcagtgttatttccaaagtgttccaacatctcccactcaaaatgaatcttctccctagtactcccattgtttagtacctaattgttcttaccagtttgtcttagagctcagtcattcctacacagcacttttcttcattatactgctaatttcattacactgtaagagtggggacaagctgttcttcttgtataccagaaagtagtgagtgcactgctgtgaagaaagcaggaactcaaaagttaagaattttgaatgagcctataaaatgtgtctaataaataataatgttcattttcaaatctcaacaattaaatgtttaacaaataacacttgaaataaatgtttattagaaaaaccaa

SEQ ID NO: 131697 - DNA, 1412 bp, Artificial Sequence
  derived and/or modified sequence
agcagacgagggcttgtgcgagagggggccgggcggctgcagggaaggcggagtccaaggggaaaacgaaactgagaaccagctctcccgaagccgcgggtctccggccggcggcggcggcggcggcggcggcggcgcagtttctggagcaaattcagtttgccttcctggatttgtaaattgtaatgacctcaaaactttagcagttcttccatctgactcaggtttgcttctctggcggtcttcagaatcaacatccacacttccgtgattatctgcgtgcattttggacaaagcttccaaccaggatacgggaagaagaaatggctggtgatctttcagcaggtttcttcatggaggaacttaatacataccgtcagaagcagggagtagtacttaaatatcaagaactgcctaattcaggacctccacatgataggaggtttacatttcaagttataatagatggaagagaatttccagaaggtgaaggtagatcaaagaaggaagcaaaaaatgccgcagccaaattagctgttgagatacttaataaggaaaagaaggcagttagtcctttattattgacaacaacgaattcttcagaaggattatccatggggaattacataggccttatcaatagaattgcccagaagaaaagactaactgtaaattatgaacagtgtgcatcgggggtgcatgggccagaaggatttcattataaatgcaaaatgggacagaaagaatatagtattggtacaggttctactaaacaggaagcaaaacaattggccgctaaacttgcatatcttcagatattatcagaagaaacctcagtgaaatctgactacctgtcctctggttcttttgctactacgtgtgagtcccaaagcaactctttagtgaccagcacactcgcttctgaatcatcatctgaaggtgacttctcagcagatacatcagagataaattctaacagtgacagtttaaacagttcttcgttgcttatgaatggtctcagaaataatcaaaggaaggcaaaaagatctttggcacccagatttgaccttcctgacatgaaagaaacaaagtatactgtggacaagaggtttggcatggattttaaagaaatagaattaattggctcaggtggatttggccaagttttcaaagcaaaacacagaattgacggaaagacttacgttattaaacgtgttaaatataataacgagtcaaagactaagtgccttttcatccaaatggaattctgtgataaagggaccttggaacaatggattgaaaaaagaagaggcgagaaactagacaaagttttggctttggaactctttgaacaaataacaaaaggggtggattatatacattcaaaaaaaaaaaaaaaaaaaaaaaaaaaa

SEQ ID NO: 131698 - DNA, 2930 bp, Artificial Sequence
  derived and/or modified sequence
agcagacgagggcttgtgcgagagggggccgggcggctgcagggaaggcggagtccaaggggaaaacgaaactgagaaccagctctcccgaagccgcgggtctccggccggcggcggcggcggcggcggcggcggcgcagtttgctcatactttgtgacttgcggtcacagtggcattcagctccacacttggtagaaccacaggcacgacaagcatagaaacatcctaaacaatcttcatcgaggcatcgaggtccatcccaataaaaatcaggagaccctggctatcatagaccttagtcttcgctggtatcactcgtctgtctgaaccagcggttgcatttttttaagccttcttttttctcttttaccagtttctggagcaaattcagtttgccttcctggatttgtaaattgtaatgacctcaaaactttagcagttcttccatctgactcaggtttgcttctctggcggtcttcagaatcaacatccacacttccgtgattatctgcgtgcattttggacaaagcttccaaccaggatacgggaagaagaaatggctggtgatctttcagcaggtttcttcatggaggaacttaatacataccgtcagaagcagggagtagtacttaaatatcaagaactgcctaattcaggacctccacatgataggaggtttacatttcaagttataatagatggaagagaatttccagaaggtgaaggtagatcaaagaaggaagcaaaaaatgccgcagccaaattagctgttgagatacttaataaggaaaagaaggcagttagtcctttattattgacaacaacgaattcttcagaaggattatccatggggaattacataggccttatcaatagaattgcccagaagaaaagactaactgtaaattatgaacagtgtgcatcgggggtgcatgggccagaaggatttcattataaatgcaaaatgggacagaaagaatatagtattggtacaggttctactaaacaggaagcaaaacaattggccgctaaacttgcatatcttcagatattatcagaagaaacctcagtgaaatctgactacctgtcctctggttcttttgctactacgtgtgagtcccaaagcaactctttagtgaccagcacactcgcttctgaatcatcatctgaaggtgacttctcagcagatacatcagagataaattctaacagtgacagtttaaacagttcttcgttgcttatgaatggtctcagaaataatcaaaggaaggcaaaaagatctttggcacccagatttgaccttcctgacatgaaagaaacaaagtatactgtggacaagaggtttggcatggattttaaagaaatagaattaattggctcaggtggatttggccaagttttcaaagcaaaacacagaattgacggaaagacttacgttattaaacgtgttaaatataataacgagaaggcggagcgtgaagtaaaagcattggcaaaacttgatcatgtaaatattgttcactacaatggctgttgggatggatttgattatgatcctgagaccagtgatgattctcttgagagcagtgattatgatcctgagaacagcaaaaatagttcaaggtcaaagactaagtgccttttcatccaaatggaattctgtgataaagggaccttggaacaatggattgaaaaaagaagaggcgagaaactagacaaagttttggctttggaactctttgaacaaataacaaaaggggtggattatatacattcaaaaaaattaattcatagagatcttaagccaagtaatatattcttagtagatacaaaacaagtaaagattggagactttggacttgtaacatctctgaaaaatgatggaaagcgaacaaggagtaagggaactttgcgatacatgagcccagaacagatttcttcgcaagactatggaaaggaagtggacctctacgctttggggctaattcttgctgaacttcttcatgtatgtgacactgcttttgaaacatcaaagtttttcacagacctacgggatggcatcatctcagatatatttgataaaaaagaaaaaactcttctacagaaattactctcaaagaaacctgaggatcgacctaacacatctgaaatactaaggaccttgactgtgtggaagaaaagcccagagaaaaatgaacgacacacatgttagagcccttctgaaaaagtatcctgcttctgatatgcagttttccttaaattatctaaaatctgctagggaatatcaatagatatttaccttttattttaatgtttcctttaattttttactatttttactaatctttctgcagaaacagaaaggttttcttctttttgcttcaaaaacattcttacattttactttttcctggctcatctctttattctttttttttttttaaagacagagtctcgctctgttgcccaggctggagtgcaatgacacagtcttggctcactgcaacttctgcctcttgggttcaagtgattctcctgcctcagcctcctgagtagctggattacaggcatgtgccacccacccaactaatttttgtgtttttaataaagacagggtttcaccatgttggccaggctggtctcaaactcctgacctcaagtaatccacctgcctcggcctcccaaagtgctgggattacagggatgagccaccgcgcccagcctcatctctttgttctaaagatggaaaaaccacccccaaattttctttttatactattaatgaatcaatcaattcatatctatttattaaatttctaccgcttttaggccaaaaaaatgtaagatcgttctctgcctcacatagcttacaagccagctggagaaatatggtactcattaaaaaaaaaaaaaaaagtgatgtacaacc

SEQ ID NO: 131699 - DNA, 1092 bp, Artificial Sequence
  derived and/or modified sequence
atggccggggacctgtctgctggcttcttcatggaggagctgaacacctaccggcagaagcagggcgtggtgctgaagtaccaggagctgcccaacagcggcccccctcatgaccggcgcttcaccttccaggtgatcattgatggccgggagttccctgagggggagggccgcagcaagaaggaggccaagaatgctgctgccaagctggccgtggagatcctgaacaaggagaagaaggctgtgagccccctgctgctgaccaccaccaacagcagcgagggcctgtccatgggcaactacatcggcctcatcaaccgcatcgcccagaagaagaggctgactgtgaactatgagcagtgtgccagcggcgtgcacggccctgagggcttccactacaagtgcaagatgggccagaaggagtacagcatcggcaccggcagcaccaagcaggaggccaagcagctggccgccaagctggcctacctgcagatcctgtctgaggagacctctgtgaagagtgactacctgagcagcggcagctttgccaccacctgtgagagccagagcaacagcctggtgaccagcaccctggccagcgagagcagcagcgagggggacttctctgctgacaccagcgagatcaacagcaacagcgacagcctgaacagcagcagcctgctgatgaatggcctgaggaacaaccagaggaaggccaagaggagcctggcccccaggtttgacctgcctgacatgaaggagaccaagtacacagtggacaagagatttggcatggacttcaaggagattgagctgattggcagcggcggcttcggccaggtgttcaaggccaagcacagaattgatggcaagacctacgtgatcaagagggtgaagtacaacaatgaaagcaagaccaagtgcctcttcatccagatggagttctgtgacaagggcaccctggagcagtggattgagaagagaagaggagagaagctggacaaggtgctggccctggagctgtttgagcagatcaccaagggcgtggactacatccacagcaagaagaagaagaagaagaagaagaagtag

SEQ ID NO: 131700 - DNA, 1656 bp, Artificial Sequence
  derived and/or modified sequence
atggccggggacctgtctgctggcttcttcatggaggagctgaacacctaccggcagaagcagggcgtggtgctgaagtaccaggagctgcccaacagcggcccccctcatgaccggcgcttcaccttccaggtgatcattgatggccgggagttccctgagggggagggccgcagcaagaaggaggccaagaatgctgctgccaagctggccgtggagatcctgaacaaggagaagaaggctgtgagccccctgctgctgaccaccaccaacagcagcgagggcctgtccatgggcaactacatcggcctcatcaaccgcatcgcccagaagaagaggctgactgtgaactatgagcagtgtgccagcggcgtgcacggccctgagggcttccactacaagtgcaagatgggccagaaggagtacagcatcggcaccggcagcaccaagcaggaggccaagcagctggccgccaagctggcctacctgcagatcctgtctgaggagacctctgtgaagagtgactacctgagcagcggcagctttgccaccacctgtgagagccagagcaacagcctggtgaccagcaccctggccagcgagagcagcagcgagggggacttctctgctgacaccagcgagatcaacagcaacagcgacagcctgaacagcagcagcctgctgatgaatggcctgaggaacaaccagaggaaggccaagaggagcctggcccccaggtttgacctgcctgacatgaaggagaccaagtacacagtggacaagagatttggcatggacttcaaggagattgagctgattggcagcggcggcttcggccaggtgttcaaggccaagcacagaattgatggcaagacctacgtgatcaagagggtgaagtacaacaatgagaaggccgagcgggaggtgaaggccctggccaagctggaccacgtgaacatcgtgcactacaacggctgctgggatggctttgattatgaccctgagaccagtgatgacagcctggagagcagtgactatgaccctgagaacagcaagaacagcagccgcagcaagaccaagtgcctcttcatccagatggagttctgtgacaagggcaccctggagcagtggattgagaagagaagaggagagaagctggacaaggtgctggccctggagctgtttgagcagatcaccaagggcgtggactacatccacagcaagaagctgatccaccgggacctgaagcccagcaacatcttcctggtggacaccaagcaggtgaagatcggggactttggcctggtgaccagcctgaagaatgatggcaagaggaccaggagcaagggcaccctgcgctacatgagccctgagcagatcagcagccaggactatggcaaggaggtggacctgtatgccctgggcctcatcctggccgagctgctgcacgtgtgtgacacagcctttgagaccagcaagttcttcacagacctgagagatggcatcatcagtgacatctttgacaagaaggagaagaccctgctgcagaagctgctgagcaagaagccagaggaccggcccaacaccagcgagatcctgcggaccctgactgtgtggaagaagagccctgagaagaatgaaagacacacctgctag

SEQ ID NO: 131701 - DNA, 1092 bp, Artificial Sequence
  derived and/or modified sequence
atggccggcgacctgagcgccggcttcttcatggaggagctgaacacttaccgccagaagcaaggcgtggtgctgaaataccaggagctgcctaactcagggcctcctcacgataggcgctttacctttcaggtcatcatcgatgggagggagtttcccgagggagagggccggtcaaaaaaagaagccaaaaatgcagcggccaaactagctgtggagattctgaacaaggagaagaaagcagtgtctcccctgttactgaccacaacaaacagctccgagggtctgtctatgggaaactatatcggcctaatcaatcgtattgcgcaaaagaagaggctcactgtcaattacgagcagtgcgcttccggggttcatggccccgaaggtttccactacaaatgcaaaatgggacagaaggaatacagcattgggactggatctacaaaacaggaagccaagcagctcgcggccaaactcgcctacctacagatcctgagcgaggaaactagtgttaagtctgactacttaagctcaggctcatttgcaactacctgcgaatcgcagagtaacagcttagtgacatccactctcgcctctgagagctcttcggagggcgactttagcgctgacacctcagaaatcaactcaaattcagacagcttaaatagctcttcgcttctgatgaatggactgaggaacaatcagcggaaagcgaagagatccttagcaccccgtttcgatctgcccgatatgaaagagaccaagtataccgtcgataaaaggtttggtatggacttcaaggagatcgagttaataggctcaggtggcttcggccaggtgttcaaggccaagcaccggattgatggaaagacatatgttatcaagcgggtgaagtacaacaacgagagcaaaacgaaatgtctcttcatccaaatggaattttgcgataaggggaccctggagcagtggatagagaagcgccgtggagagaagctggataaagtactggctctggagctgttcgaacagatcaccaaaggagtggattacatccattctaaaaagaagaaaaaaaaaaagaaaaaatag

SEQ ID NO: 131702 - DNA, 1656 bp, Artificial Sequence
  derived and/or modified sequence
atggccggcgacctgagcgccggcttcttcatggaggagctgaacacctaccgtcagaagcagggcgtggtgcttaaatatcaggaactaccaaactccggacccccccacgaccgcaggtttacattccaagtcatcatagatgggcgcgagtttcccgagggggagggaaggtcaaagaaggaagccaagaacgctgccgcaaagctggcagtcgaaattctaaataaggagaagaaagcggtatcgcctctgctgttgaccaccaccaattcttcggaagggctctcaatggggaactacattggcctgatcaaccggatcgcccaaaagaaacggctgaccgtgaactatgaacaatgtgctagcggcgtgcacggcccagaaggtttccattacaagtgcaagatgggacagaaggagtattccatcggcaccggctcaactaaacaggaagccaaacagttagccgccaaattggcctacctgcagatccttagtgaagaaacttctgtaaaatcagactatttgtcctccgggtcatttgccacaacgtgtgagagtcagagtaactccctcgtgacatcgaccctggcctccgagagtagcagcgagggagatttctccgcagacacttcagagatcaattccaacagcgatagcctcaatagttcaagcctgctcatgaatggtctgcggaacaatcagcgaaaggccaagaggagcctggccccccgatttgatctacccgacatgaaagaaaccaagtacaccgtggacaagagattcgggatggacttcaaggagatcgagctgattggaagcggcggcttcgggcaggtttttaaagccaagcaccgtatcgacggcaaaacgtacgtcataaagcgagtcaagtacaacaatgagaaggccgagagagaggtgaaggcgctggctaagcttgatcacgttaatatagtccattataatggatgctgggatggtttcgattacgaccctgagacatcagatgactctttggaaagtagcgactacgaccctgagaatagtaaaaattcctctaggtccaaaactaagtgcctgtttattcagatggaattttgcgacaaggggaccctcgagcagtggatcgaaaaaagacggggagaaaagctcgacaaggtactggccctcgagttgttcgagcagattactaagggcgtggactacattcacagtaaaaaattgattcatagggatctgaaaccttctaatatttttctcgtggacactaaacaggttaagattggcgattttggcctggtgacaagtttgaagaacgatggcaagaggacccggtccaagggcacgctacgctacatgagtcccgaacaaattagtagccaagactacgggaaggaggtggacctgtacgctcttgggttgatccttgccgaattgttacacgtgtgcgatacagcttttgagacgtcaaaatttttcaccgatttgcgagatggcattatttctgacatctttgacaagaaagaaaagactctgttacaaaagctcttgtcaaagaagcctgaagacaggcctaacactagcgagattctcagaaccttgaccgtgtggaaaaagtctcccgagaagaatgagcgccacacgtgctag

SEQ ID NO: 131703 - DNA, 1092 bp, Artificial Sequence
  derived and/or modified sequence
atggcaggggacctgtccgccggtttttttatggaggagttgaatacgtatcgccaaaaacagggagtagtattgaagtaccaagagctgccaaactccgggccacctcatgaccgaagattcacctttcaggtgattatcgacggtcgcgaatttcccgagggggaaggtaggtctaagaaagaagcaaaaaatgcagccgcaaagctggccgtcgagattcttaacaaggaaaagaaagccgtctcaccactactcttgacaacgacgaattctagtgaaggactctctatgggcaactatatcgggctcattaaccgtattgcccagaagaaacgtttgaccgtaaattacgaacagtgcgctagcggcgtgcacggacccgaagggtttcattataaatgcaagatgggacaaaaggaatacagcattgggacaggaagtaccaagcaggaggccaaacagctggccgcaaagttagcatatctccagatactgtccgaagagactagtgttaagtccgactatctgtcgtctggatccttcgccaccacctgtgagtcccagtccaattccctggtgacatcgaccctggcttccgaatcttcttccgagggtgatttcagcgcagacacgtctgagatcaacagcaattctgattccctgaattccagtagtctgctcatgaacggcctgcggaacaaccaacggaaggccaagcgctcgctagcacctcgctttgacctccctgatatgaaggagacaaagtacaccgtggacaaaaggttcggtatggactttaaggagattgagctgatcggatctggaggatttggacaggtatttaaagccaagcataggatcgacggcaagacatacgtgattaagcgtgttaagtacaataacgagagcaagactaagtgcctgtttatacagatggaattctgcgacaaagggacactggagcaatggattgaaaaaaggcgaggtgagaagttggacaaagtcctggcactcgagctgttcgaacagattaccaaaggtgtggactacatacacagtaagaaaaaaaagaaaaaaaaaaagaagtag

SEQ ID NO: 131704 - DNA, 1656 bp, Artificial Sequence
  derived and/or modified sequence
atggcgggagacctctctgctgggttcttcatggaggagctgaacacctaccgccagaagcaaggtgttgttctgaagtaccaagagctgccaaacagtggacctcctcatgatcggaggttcacctttcaggtgattatcgacgggagggagttcccagagggcgaggggcgtagcaaaaaggaggcaaaaaatgccgctgctaagttggccgtggaaatccttaataaagaaaaaaaagcagtgtcccccctgctgctgaccaccacaaacagcagcgaaggcctgagtatgggcaattacataggtcttatcaataggattgcccaaaagaaaagacttactgtgaactacgagcagtgcgcatccggcgtgcatgggccagaaggcttccattataagtgcaaaatgggccagaaggagtattcaatcggtaccgggagtaccaagcaggaggccaagcagttggctgctaagctggcctatctccagatcctcagcgaggagacaagtgtcaagagcgattacctgtcaagcgggtccttcgctacaacttgtgagagccaatccaactcattggtcacatccacactggcctccgagagctcatcagagggagacttttccgctgatacaagcgaaatcaactcaaacagtgactcgctgaactcctccagtttgttgatgaacgggctgcggaataaccagagaaaagccaagcgctctctggctcccaggttcgatctcccggatatgaaggagactaagtataccgtggacaagagattcgggatggactttaaggagattgaactgattggatcaggcggattcggtcaagtttttaaggcaaagcacaggattgacgggaagacctatgtgatcaagagagtgaaatacaacaacgaaaaagctgagcgcgaagtgaaggccctggctaagctggaccatgtcaatatagtgcactataacgggtgctgggatggcttcgattatgatcctgagaccagtgatgattcactggaatcgagcgattacgaccctgagaactcaaagaactcatcacgcagcaaaactaaatgcctgtttattcagatggaattttgcgacaagggcacgctcgaacagtggattgaaaaacgacgcggagagaaactggacaaggtcctggctttggagctctttgagcagatcaccaaaggagtagattacatccactcaaagaagctaatccaccgggaccttaaaccctccaacatctttctggtggacacgaaacaggtgaagatcggggatttcggcttggtgaccagcctcaagaatgacgggaaacggacccggtcaaagggcacactgagatacatgagccctgagcagatttcctcccaggactacggcaaggaagtagacctgtacgcactcggtctgattctggcagaattattgcatgtgtgtgataccgcctttgagacaagtaagttcttcactgacctgagggatggcatcatttccgatattttcgacaagaaggagaaaaccctcttacagaaacttctgtcaaaaaaacccgaggaccgcccaaacacaagcgagattcttaggactctgactgtgtggaagaagtcgcctgaaaaaaacgaacgtcacacttgttag

SEQ ID NO: 131705 - DNA, 1656 bp, Artificial Sequence
  derived and/or modified sequence
atggcaggtgacctgagtgctgggttcttcatggaagagctgaacacctataggcagaaacaaggggtggtgctcaaatatcaagagctgccaaatagcggacctccacacgatcggcgttttacgttccaagtgatcatcgacggccgcgaatttccagaaggggagggacggtccaaaaaggaggccaagaatgccgccgcgaagctagctgtcgaaattttaaacaaagaaaagaaggcggtgtcgccacttctgctgacaacgaccaacagcagtgaaggactgagcatggggaattacatcgggctgataaatcggatcgcccaaaagaaaagactcacagtgaactacgagcagtgtgcttctggcgtacatggccctgaagggttccactacaagtgcaagatgggccagaaagaatacagcatcggcacaggctcaactaagcaggaagctaagcagttggctgcaaagctagcttatttgcagatcctctctgaagagacttccgtgaaatcagactaccttagttcaggctctttcgccaccacctgtgagtctcagagcaactctctcgtgacatccacacttgcaagcgaaagttcctccgagggagattttagcgccgatacaagcgagattaatagcaatagcgattctctgaacagcagcagcttactgatgaacgggctccgcaacaatcagcggaaggccaagaggagccttgcaccacgctttgacctaccggacatgaaggaaactaaatataccgtggacaaacgtttcggaatggatttcaaagagattgaactcatcgggagtggcgggttcggccaggtgtttaaggcaaagcaccggatagatggaaaaacatacgtcattaaacgtgtgaagtacaacaatgaaaaagctgaacgggaggtaaaggctctcgccaagctagaccacgttaatatcgttcactataacggctgctgggatggcttcgattatgatccagagacttcagatgactctctggaatctagtgattacgatccagaaaatagcaaaaatagcagccgcagcaaaaccaaatgccttttcatccagatggaattttgcgacaagggcaccctagagcagtggattgagaaacgacgaggcgagaagctggacaaggtgcttgcattggagctatttgaacaaattacgaaaggagtggattatatccactccaagaagctcatccacagggatcttaaaccctcaaatatcttcctcgtggacaccaagcaggtgaaaatcggcgattttggcttagtgacctctctcaagaacgatggcaagcgcacacggtcaaaaggcaccctgcgctacatgagccccgagcagatctcttctcaggactacggaaaggaagtggacctctatgcgctgggcctgatccttgccgagctgcttcacgtgtgcgatacagccttcgaaaccagtaagttttttactgacctgcgggacggcattatatctgatatcttcgataagaaggaaaaaactctactgcagaaattgctcagcaagaagccagaggacagacccaacacatctgagatcctaagaactttaactgtgtggaaaaagtctcccgagaagaacgagcggcatacatgttag

SEQ ID NO: 131706 - DNA, 1656 bp, Artificial Sequence
  derived and/or modified sequence
atggccggcgacctgagcgccggcttcttcatggaggagctgaacacataccggcaaaaacaaggggtcgtcttgaaataccaggaactgcccaacagtggtccaccccacgatcggcgctttacattccaggtcattatcgacgggcgagagttccctgagggagagggacggagtaaaaaggaggccaaaaacgccgccgccaagctggccgttgagatccttaataaggagaaaaaagccgtgtccccattactcctgaccactacaaatagtagtgaaggtctgtccatgggtaattatataggcctgatcaataggatcgcacagaaaaagcggttgacagtgaactacgaacaatgtgctagcggggtgcacggacccgaaggttttcactacaaatgtaaaatgggccagaaagagtacagtatcggtaccgggtcaaccaaacaggaggctaaacagttagccgcaaagctggcctacctacagatccttagcgaggaaacttccgttaaatctgactatctgtcctctgggtcatttgcgaccacctgtgaatcgcagtcgaactcgctggtgacctcaacactcgccagtgagagttcttccgaaggtgacttctctgccgacacgtctgagatcaactccaattccgactcattgaatagctcctctctgttaatgaacggcctgcggaacaaccagagaaaagctaagcgctcccttgcaccccgtttcgatctgccagatatgaaggagacaaaatacacggtcgacaagcgcttcgggatggactttaaggagattgaactgatcggcagcggtgggtttggccaggtttttaaagcaaagcaccgaattgacggaaaaacatacgtgattaaacgcgtaaagtataataacgagaaggctgagagggaagtcaaagccctggcaaagctggatcacgtgaacattgtccactacaatggctgctgggatggattcgactacgacccagagacgtctgatgatagcctggaaagcagcgactatgatccagagaattccaagaatagttcaaggtcaaagactaaatgcttattcatccagatggagttctgtgataaagggacgttggaacaatggatagagaaaagaagaggcgaaaagctcgataaggtccttgcattggagctgttcgagcagatcaccaagggagtcgactatatacattcgaaaaaactaatccaccgggaccttaagccttctaacattttcctcgtcgacacgaagcaggtaaaaataggcgattttggtctggtcacctccctcaaaaacgatggtaagcgtactcggtctaaaggaactttgcgctacatgagccctgaacagatcagctcccaggactatggaaaggaagtggacctttacgctctcggattgatccttgccgagttactgcatgtttgcgatactgcctttgaaaccagcaagttttttactgacttgcgggatggaataatttcagatattttcgacaagaaggaaaaaacgctgctgcagaagcttctttccaaaaagccagaagacagacccaatacctccgagatcctgagaactttaacagtgtggaagaagagccctgagaaaaacgaaaggcacacttgctag

SEQ ID NO: 131707 - DNA, 1656 bp, Artificial Sequence
  derived and/or modified sequence
atggcaggcgacctgagtgccggttttttcatggaagagctgaatacataccgacagaagcagggagttgtgcttaaataccaggaactcccaaattccgggccaccccacgataggaggttcacattccaagtaatcattgacggccgagaattccctgaaggggaggggagatctaagaaagaggctaagaacgccgcagccaagctggctgtggagatcttgaataaggagaaaaaagctgtgtctcccctgctcctgactacaactaattcatcagagggcctcagtatgggtaactacatcggactcataaatcgcattgcacaaaaaaagcgcttgacggtgaattatgaacagtgtgcctctggcgttcacggacccgaggggttccactataagtgtaagatgggtcagaaagagtatagcatcggaaccggaagcacaaagcaggaggccaaacaactggcagctaagcttgcttatctgcagattctatctgaggagacctccgtcaaatctgactacctgtcatccggatcctttgccaccacctgtgagtctcagagcaactccttagtgacgagcacattagcaagcgagtcgagttctgagggggacttttctgccgatacatccgaaataaactcgaattcagacagcctcaatagttcttccctcctgatgaatgggctaaggaacaaccaacggaaggcaaagaggtccctggctcctagatttgacctgcctgacatgaaagagactaagtacaccgtggataagcgctttggcatggacttcaaagagattgagctgatcggctctggtggcttcggtcaggtgttcaaagccaagcaccggatcgacggtaaaacctacgttatcaaaagagttaaatataacaacgagaaggcggaacgcgaggtaaaagccctcgccaaactggaccacgtgaacatcgttcactacaacggctgttgggatggatttgactacgatcccgagactagcgacgactccctagaaagttccgactatgacccagagaattccaaaaattctagcagatccaaaactaaatgtctattcatccagatggaattttgtgataagggtaccctagagcagtggatcgagaaaagaagaggagaaaagctcgacaaagttctggctcttgaattgtttgaacagattacaaagggagttgactacatccacagcaaaaagttgatccatcgggatctaaaacccagcaacattttcctagtggatacaaagcaggtaaaaattggcgatttcggcctggtgactagcctgaagaatgatggaaagagaactagaagtaagggcaccctgcgttacatgtcaccggagcaaatttcttcccaggactacggaaaggaggtggacttgtacgcattgggacttattctggcagagctacttcacgtgtgtgacactgcttttgagacaagcaaattcttcaccgacttacgggatggaataattagtgatatattcgataaaaaagagaagacgctgttgcagaagctccttagcaagaagcctgaggataggcctaacacttctgaaatactgagaacactgaccgtgtggaagaagagcccagaaaagaacgaaagacatacttgctag

SEQ ID NO: 131708 - protein, 51 aa, Artificial Sequence
  derived and/or modified sequence
MARYRCCRSQSRSRYYRQRQRSRRRRRRSCQTRRRAMRCCRPRYRPRCRRH

SEQ ID NO: 131709 - protein, 102 aa, Artificial Sequence
  derived and/or modified sequence
MVRYRVRSLSERSHEVYRQQLHGQEQGHHGQEEQGLSPEHVEVYERTHGQSHYRRRHCSRRRLHRIHRRQHRSCRRRKRRSCRHRRRHRRGCRTRKRTCRRH

SEQ ID NO: 131710 - protein, 218 aa, Artificial Sequence
  derived and/or modified sequence
MELLIMINACKIASASRVTAVIPCFPYARQDKKDKGFFDIPVDNLYAEPAVLKWIRENISEWRNCTIVSPDAGGAKRVTSIADRLNVDFALIHKERKKANEVDRMVLVGDVKDRVAILVDDMADTCGTICHAADKLLSAGATRVYAILTHGIFSGPAISRINNACFEAVVVTNTIPQEDKMKHCSKIQVIDISMILAEAIRRTHNGESVSYLFSHVPL

SEQ ID NO: 131711 - protein, 168 aa, Artificial Sequence
  derived and/or modified sequence
MPNIKIFSGSSHQDLSQKIADRLGLELGKVVTKKFSNQETCVEIGESVRGEDVYIVQSGCGEINDNLMELLIMINACKIASASRVTAVIPCFPYARQDKKDKSRAPISAKLVANMLSVAGADHIITMDLHASQIQVSVEAKYWCLKGGRKGLMMLKTAEKPKIMPKYI

SEQ ID NO: 131712 - protein, 251 aa, Artificial Sequence
  derived and/or modified sequence
MELLIMINACKIASASRVTAVIPCFPYARQDKKDKSRAPISAKLVANMLSVAGADHIITMDLHASQIQGFFDIPVDNLYAEPAVLKWIRENISEWRNCTIVSPDAGGAKRVTSIADRLNVDFALIHKERKKANEVDRMVLVGDVKDRVAILVDDMADTCGTICHAADKLLSAGATRVYAILTHGIFSGPAISRINNACFEAVVVTNTIPQEDKMKHCSKIQVIDISMILAEAIRRTHNGESVSYLFSHVPL

SEQ ID NO: 131713 - protein, 318 aa, Artificial Sequence
  derived and/or modified sequence
MPNIKIFSGSSHQDLSQKIADRLGLELGKVVTKKFSNQETCVEIGESVRGEDVYIVQSGCGEINDNLMELLIMINACKIASASRVTAVIPCFPYARQDKKDKSRAPISAKLVANMLSVAGADHIITMDLHASQIQGFFDIPVDNLYAEPAVLKWIRENISEWRNCTIVSPDAGGAKRVTSIADRLNVDFALIHKERKKANEVDRMVLVGDVKDRVAILVDDMADTCGTICHAADKLLSAGATRVYAILTHGIFSGPAISRINNACFEAVVVTNTIPQEDKMKHCSKIQVIDISMILAEAIRRTHNGESVSYLFSHVPL

SEQ ID NO: 131714 - DNA, 657 bp, Artificial Sequence
  derived and/or modified sequence
atggaactgctgatcatgatcaatgcctgcaaaattgcctctgcatctagagtaaccgcagtgattccttgcttcccgtacgctcgacaggacaagaaagataaggggtttttcgatatacctgtggacaatctgtatgcggagcccgccgtcctcaagtggatccgcgagaatatttcagaatggcgcaattgcacaattgtgagccccgatgcgggcggagcaaaacgtgtcacttccatagctgaccgtctgaatgtcgatttcgcgttgatacataaagaacggaaaaaggctaacgaggtggataggatggtgctagtaggagatgtcaaggatagggtcgcgattctggttgatgacatggccgatacttgcggcaccatctgccatgcggccgacaaactactgagcgccggcgcaacacgagtttacgcaattttaacccacggcatatttagcggacccgccataagccgcattaacaacgcttgctttgaggcagtggtggtgacgaatacgatccctcaggaggacaaaatgaagcattgcagcaagatccaggtcattgatatctcaatgatattggccgaagccatccgcagaacacacaacggtgaaagcgtctcgtaccttttttctcacgtaccactttag

SEQ ID NO: 131715 - DNA, 507 bp, Artificial Sequence
  derived and/or modified sequence
atgccaaacattaagattttttctggttcctcacatcaggacctgtctcaaaagatcgccgaccgcctgggccttgaactgggaaaggtggtgactaaaaagttcagcaaccaggaaacatgtgttgagatcggcgaaagcgtacggggtgaggacgtgtacattgtacaatccggatgtggtgaaataaacgacaatctgatggagctcttgattatgatcaacgcttgcaagattgcgtctgcgtctcgcgtgaccgccgtgatcccttgttttccttacgccaggcaggacaaaaaggacaagagccgcgccccgatcagcgccaaactggtggcgaacatgttatccgtggctggcgctgaccacatcattacaatggacttgcacgcctcacagattcaggtgtctgtcgaggccaaatactggtgcttgaaagggggacgcaaggggctaatgatgctcaaaaccgccgagaagcccaaaattatgcccaagtacatctag

SEQ ID NO: 131716 - DNA, 756 bp, Artificial Sequence
  derived and/or modified sequence
atggagctactaatcatgataaatgcctgcaagattgcttccgccagcagggtgaccgccgtcatcccatgtttcccttatgctcggcaggacaagaaggataagagccgcgccccaatcagtgccaagcttgtggcaaatatgttatctgtggcaggtgcagatcacatcatcactatggatctgcacgcctctcaaattcagggattttttgacatccctgtggacaatctctacgccgagccagccgttttgaagtggatacgtgagaatatcagcgagtggcggaactgcacaattgtctcacccgacgccggaggcgcaaagagagtgacgtctatcgctgacaggctgaacgttgactttgccttaatccacaaagagaggaagaaggccaatgaagtagatcgtatggtactggtcggtgacgtgaaggatcgggttgctatcctcgtggacgacatggccgacacctgtgggaccatatgccatgctgccgataagttactttccgcaggagcaacccgggtgtatgccattctgacacacgggatcttttcagggcctgctatcagccggattaacaatgcatgtttcgaggctgtcgtggtcaccaacactatacctcaggaggacaagatgaagcattgttcgaaaattcaggtgatcgatatatccatgatcctggcagaggcaatacggaggacacacaatggggagtcagtgagttatttgttctctcatgtgccgctgtag

SEQ ID NO: 131717 - DNA, 957 bp, Artificial Sequence
  derived and/or modified sequence
atgcctaacatcaaaatctttagcggttcgtcccaccaggacctgtcccagaagattgcagatcgattaggcctcgagctcgggaaggttgtcacgaagaagttttcaaaccaagagacctgtgtcgagattggggagtccgtgcgcggagaagacgtctacattgttcagtcgggctgtggggagattaatgacaaccttatggagctgctgatcatgataaacgcctgcaagattgcaagtgcttcgagggtgacagctgtgattccctgtttcccatacgctcggcaagataagaaggataaatcaagagctcccatctctgccaagctggttgcaaatatgcttagcgtggccggcgccgatcacattattacgatggatctccatgcctctcagatccaggggttttttgacatccctgtggacaatctgtacgctgaaccagctgtcttgaaatggatccgagagaacatctcggagtggcggaattgtacgatcgtttcaccggatgccggcggagccaaaagggtgacttccattgccgacaggctgaatgtcgactttgctttgattcacaaagaacgcaaaaaagcaaatgaggtcgacaggatggtgctcgttggcgacgtgaaggaccgggtggcgatactcgttgacgatatggcagacacgtgtggcactatatgccatgctgcagacaaactactgagtgcgggggccacgagggtgtatgccatccttacgcatgggattttttcgggaccagctatttcccgcatcaacaacgcgtgtttcgaggccgtggtcgtgaccaatacaatcccccaggaggacaaaatgaaacattgcagtaagatacaggtcattgacatttccatgatattagctgaagccatccgacgaactcacaacggcgagagcgtgagctatctgtttagtcacgtacccctttag

SEQ ID NO: 131718 - DNA, 957 bp, Artificial Sequence
  derived and/or modified sequence
atgcccaatatcaagatattctcaggatccagtcaccaggacctgtcccaaaagattgcagaccggctgggtcttgaactgggcaaggtggtgacaaagaagtttagcaatcaagagacatgcgtggagatcggcgaaagcgtgagaggtgaggacgtctatatagtccagagtggctgcggtgagatcaacgataacttgatggaattactgattatgataaatgcgtgcaaaatcgcaagtgcctcaagggtgactgccgttatcccttgcttcccttatgctaggcaggataagaaggataagtctagagcgcccatcagcgctaagcttgttgccaatatgttaagtgttgcgggcgctgatcacatcattacaatggacttacatgcaagtcagatccaaggatttttcgatatccctgtcgataatctctacgcagagcccgccgtgcttaagtggattagagagaacatttcagaatggaggaattgcaccatcgtgtctcctgacgctggtggagccaaacgtgtgacgtcaatcgcggaccggcttaatgtagatttcgccttaatccacaaggaacggaaaaaggccaacgaagtggaccgaatggtgcttgtaggagacgttaaggaccgcgtcgccatccttgtagacgacatggccgacacttgtggtacgatatgccacgccgcagacaagttgcttagtgccggggctactagagtgtacgccatcctgacacacggtatcttctcaggcccagcgatctctcggattaacaatgcttgttttgaggctgtggtggtcaccaacacaatacctcaggaggataaaatgaagcactgtagtaaaatccaagtgattgacattagcatgatattagcagaagcaattcgaagaactcacaacggtgaatctgtgtcttacctcttttcgcacgtgcccctgtag

SEQ ID NO: 131719 - DNA, 657 bp, Artificial Sequence
  derived and/or modified sequence
atggagctgctgatcatgatcaatgcctgcaagatcgccagcgccagccgggtgacagctgtgatcccctgcttcccctatgcccggcaggacaagaaggacaagggcttctttgacatccctgtggacaacctgtatgcagagcctgctgtgctgaagtggatccgggagaacatcagcgagtggaggaactgcaccatcgtgtccccagatgctgggggcgccaagagggtgaccagcattgctgaccggctgaatgtggactttgccctgatccacaaggagaggaagaaggccaatgaggtggacaggatggtgctggtgggagatgtgaaggacagagtggccatcctggtggatgacatggctgacacctgtggcaccatctgccacgccgctgacaagctgctgtctgctggggccaccagggtgtatgccatcctgacccacggcatcttcagcggccctgccatcagccgcatcaacaatgcctgctttgaggccgtggtggtgaccaacaccatcccccaggaggacaagatgaagcactgcagcaagatccaggtgattgacatctccatgatcctggccgaggccatccggaggacccacaatggagagagcgtgtcctacctgttcagccacgtgcccctgtag

SEQ ID NO: 131720 - DNA, 507 bp, Artificial Sequence
  derived and/or modified sequence
atgcccaacatcaagatcttcagcggcagcagccaccaggacctgagccagaagattgctgaccggctgggcctggagctgggcaaggtggtgaccaagaagttcagcaaccaggagacctgtgtggagatcggggagagcgtgagaggagaagatgtgtacatcgtgcagagcggctgtggggagatcaatgacaacctgatggagctgctgatcatgatcaatgcctgcaagatcgccagcgccagccgggtgacagctgtgatcccctgcttcccctatgcccggcaggacaagaaggacaagagccgggcccccatcagcgccaagctggtggccaacatgctgtctgtggccggggctgaccacatcatcaccatggacctgcacgccagccagatccaggtgtctgtggaggccaagtactggtgcctgaagggcggcaggaagggcctgatgatgctgaagacagctgagaagcccaagatcatgcccaagtacatctag

SEQ ID NO: 131721 - DNA, 756 bp, Artificial Sequence
  derived and/or modified sequence
atggagctgctgatcatgatcaatgcctgcaagatcgccagcgccagccgggtgacagctgtgatcccctgcttcccctatgcccggcaggacaagaaggacaagagccgggcccccatcagcgccaagctggtggccaacatgctgtctgtggccggggctgaccacatcatcaccatggacctgcacgccagccagatccagggcttctttgacatccctgtggacaacctgtatgcagagcctgctgtgctgaagtggatccgggagaacatcagcgagtggaggaactgcaccatcgtgtccccagatgctggaggagccaagagggtgaccagcattgctgaccggctgaatgtggactttgccctgatccacaaggagaggaagaaggccaatgaggtggacaggatggtgctggtgggagatgtgaaggacagagtggccatcctggtggatgacatggctgacacctgtggcaccatctgccacgccgctgacaagctgctgtctgctggggccaccagggtgtatgccatcctgacccacggcatcttcagcggccctgccatcagccgcatcaacaatgcctgctttgaagctgtggtggtgaccaacaccatcccccaggaggacaagatgaagcactgcagcaagatccaggtgattgacatctccatgatcctggccgaggccatccggaggacccacaacggggagagcgtgtcctacctgttcagccacgtgcccctgtag

SEQ ID NO: 131722 - DNA, 957 bp, Artificial Sequence
  derived and/or modified sequence
atgcccaacatcaagatcttcagcggcagcagccaccaggacctgagccagaagattgctgaccggctgggcctggagctgggcaaggtggtgaccaagaagttcagcaaccaggagacctgtgtggagatcggggagagcgtgagaggagaagatgtgtacatcgtgcagagcggctgtggggagatcaatgacaacctgatggagctgctgatcatgatcaatgcctgcaagatcgccagcgccagccgggtgacagctgtgatcccctgcttcccctatgcccggcaggacaagaaggacaagagccgggcccccatcagcgccaagctggtggccaacatgctgtctgtggccggggctgaccacatcatcaccatggacctgcacgccagccagatccagggcttctttgacatccctgtggacaacctgtatgcagagcctgctgtgctgaagtggatccgggagaacatcagcgagtggaggaactgcaccatcgtgtccccagatgctgggggcgccaagagggtgaccagcattgctgaccggctgaatgtggactttgccctgatccacaaggagaggaagaaggccaatgaggtggacaggatggtgctggtgggagatgtgaaggacagagtggccatcctggtggatgacatggctgacacctgtggcaccatctgccacgccgctgacaagctgctgtctgctggggccaccagggtgtatgccatcctgacccacggcatcttcagcggccctgccatcagccgcatcaacaatgcctgctttgaggccgtggtggtgaccaacaccatcccccaggaggacaagatgaagcactgcagcaagatccaggtgattgacatctccatgatcctggccgaggccatccggaggacccacaatggagagagcgtgtcctacctgttcagccacgtgcccctgtag

SEQ ID NO: 131723 - DNA, 657 bp, Artificial Sequence
  derived and/or modified sequence
atggagctgctgatcatgatcaacgcctgcaagatcgccagcgccagccgggtgacagccgtcataccttgcttcccatacgcccgccaggacaagaaggacaaaggctttttcgatatcccagttgacaacctgtacgctgaacccgcagttctgaagtggatccgtgaaaacatttctgaatggcgcaactgcacgatagtgtctcccgatgcaggaggcgccaaacgggtgacatccattgccgataggctgaacgtggactttgccctgatccataaggagcgaaagaaagcgaatgaggtggatagaatggtcctcgtcggcgatgtgaaggatagggtagctatcctggttgacgacatggctgacacctgcggaaccatttgccacgccgcagataagctgctgagcgcaggcgcaaccagagtctacgccattctgactcatggtatattttcaggccctgcgattagccgcataaataatgcatgcttcgaggcagtcgtggtcacaaatactatccctcaggaagataagatgaaacattgttctaaaattcaggtgattgatattagtatgatactggccgaagcaataaggcgcacccacaatggggaatccgtcagttacctttttagtcatgttccgttgtag

SEQ ID NO: 131724 - DNA, 507 bp, Artificial Sequence
  derived and/or modified sequence
atgcccaacatcaagatcttcagcggcagcagccaccaggacctgtcgcagaagatagctgaccgcttaggactcgaattgggaaaggtggtaacaaagaaattctcgaaccaagaaacctgcgtcgaaattggtgagtctgtgcggggggaggacgtctatatcgtgcaaagcgggtgtggggaaatcaatgacaacctaatggagctgctgatcatgattaatgcatgtaaaattgcatcagcctctagggtcaccgcggtgattccatgcttcccttacgccagacaggacaaaaaggataagagccgcgcccctataagcgccaagctggtcgccaacatgctctctgtggccggcgccgaccatatcatcaccatggacttgcacgcctcgcaaattcaggtgtctgtagaagccaagtactggtgtctgaaaggggggcgcaagggcttaatgatgcttaagactgctgagaaacctaagatcatgccaaaatacatttag

SEQ ID NO: 131725 - DNA, 756 bp, Artificial Sequence
  derived and/or modified sequence
atggagctgctgatcatgatcaacgcctgcaagatcgccagcgcctcacgggtcaccgcagtcatcccatgcttcccgtatgctaggcaagataaaaaggacaaatccagggctcccatttcagccaaactcgtggctaatatgctgtccgtggcgggagccgaccacatcattaccatggatctgcatgcttcgcagattcagggattcttcgatatccccgtcgataatctctatgctgaaccagctgttctaaagtggattagagagaatataagtgagtggagaaattgtactattgtgagtcccgatgcaggaggggccaagagggttacttctattgcagacagactcaacgtggattttgccctgattcacaaagaaaggaagaaagcaaacgaagtagatcgcatggtgctggtgggggatgtcaaagaccgtgtggctatactcgtagacgacatggccgatacttgcgggacaatttgccatgcagccgacaagctgctgtccgcaggcgctacaagagtgtacgctatcctaacacatggaatcttcagcggcccagccatctcccgcattaacaatgcttgttttgaagccgtcgtcgtgactaataccattccacaagaggacaagatgaagcattgctctaaaattcaggtgatagatatctctatgatcctggccgaggctatacggaggactcataacggggaatccgtgtcttacctgttttcacatgtaccgctttag

SEQ ID NO: 131726 - DNA, 957 bp, Artificial Sequence
  derived and/or modified sequence
atgcccaacatcaagatcttcagcggcagcagccaccaggacctgtcacagaaaatcgccgataggttaggcctggaactgggcaaggtcgttaccaaaaagttttcaaaccaagagacatgtgttgagattggggagtcagttcgcggagaagatgtgtatatagttcagtccgggtgcggggagattaatgacaacctgatggagctgttgattatgatcaacgcttgtaaaattgcttctgcaagcagagttactgctgtcatcccatgctttccttatgcacgccaggacaagaaggataagagcagggcacctatctccgcgaagctggttgcaaatatgctgagtgtggccggggccgaccatattattaccatggacctgcatgcatcccagatccaggggttcttcgacatccccgttgacaatctgtacgccgaacccgccgtgctgaaatggatccgcgagaacatctcagagtggagaaattgtacgatcgtgagcccagacgctggcggggctaaaagggttacgtcaatcgccgaccggcttaatgttgatttcgcacttatccataaggagcgaaaaaaagccaatgaggtagaccgcatggtactcgtgggtgatgtaaaagatcgagtggccattcttgtggacgacatggctgatacgtgcgggaccatatgccacgccgcagataagctcctgagcgcaggtgccacaagggtctatgcaattctcacccacggcatcttctctggcccggctatctcacgcattaacaacgcttgctttgaggccgtcgtggtgacaaacacgatccctcaagaggataaaatgaaacattgttccaagatccaggtaatagacatcagtatgatccttgcagaggccatcagaagaacccacaatggcgagtctgtgagctacctgttttctcacgtccctttatag

SEQ ID NO: 131727 - DNA, 957 bp, Artificial Sequence
  derived and/or modified sequence
atgcccaacatcaagatcttcagcggcagcagccaccaggacctgtcccagaagattgccgacaggctcggtttggagctgggtaaagtcgttaccaagaaattttcaaaccaggagacatgcgtcgaaattggagaaagcgtgcggggagaggatgtatatatagtgcaatcaggatgcggggaaattaatgacaacctgatggaactgttaatcatgatcaatgcgtgcaagatcgcttccgctagccgagtgacggcagtgataccatgtttcccatacgcccgacaagacaagaaagataagagccgcgctccaatttccgcaaaactggtcgcaaatatgctgtcagtcgccggagcagaccatataattactatggatttacacgcgagccagatccaaggtttcttcgacattccagtcgataacctgtacgccgaacccgccgttctgaaatggatccgggagaacatctcagaatggagaaactgcaccatagtgtccccggatgctggcggggcgaaaagggtgacaagtatcgcagatcggctgaacgttgacttcgcactgattcacaaagagcgcaagaaggcaaacgaggtcgaccgcatggtgttggtcggagatgttaaagacagggttgccatccttgtggacgacatggctgacacgtgtgggacgatctgtcacgccgctgacaaactgctgagtgcaggggccacccgcgtgtatgcaatacttactcacggaatcttttcaggtcctgccattagtagaataaacaacgcctgctttgaagcagtggtggtgaccaatacaattccacaggaagataaaatgaaacattgtagcaagatacaggttattgacatttcgatgattctggctgaggctatccgcaggacacataatggtgagagcgtctcatacctgtttagccacgtaccgctgtag

SEQ ID NO: 131728 - DNA, 942 bp, Artificial Sequence
  derived and/or modified sequence
aatcaatgacaatttaatggagcttttgatcatgattaatgcctgcaagattgcttcagccagccgggttactgcagtcatcccatgcttcccttatgcccggcaggataagaaagataagggcttttttgatatcccagtagacaatttgtatgcagagccggctgtcctaaagtggataagggagaatatctctgagtggaggaactgcactattgtctcacctgatgctggtggagctaagagagtgacctccattgcagacaggctgaatgtggactttgccttgattcacaaagaacggaagaaggccaatgaagtggaccgcatggtgcttgtgggagatgtgaaggatcgggtggccatccttgtggatgacatggctgacacttgtggcacaatctgccatgcagctgacaaacttctctcagctggcgccaccagagtttatgccatcttgactcatggaatcttctccggtcctgctatttctcgcatcaacaacgcatgctttgaggcagtagtagtcaccaataccatacctcaggaggacaagatgaagcattgctccaaaatacaggtgattgacatctctatgatccttgcagaagccatcaggagaactcacaatggagaatccgtttcttacctattcagccatgtccctttataatagagtaacttctgaggctttttgagaataaaatccaccccacccttgtttccccttggtatttgatgacaaattcagcagaagacccggcttgctccagtgtagctttctacatcccacatcaggtatattagagcttatccgaactggggaaagacggattgagattaactgctgggacctcctacctgcattatctcattctggcttccttgataattctgtgggccttgcagctttaactatagctcagctgctgcaagatttca

SEQ ID NO: 131729 - DNA, 628 bp, Artificial Sequence
  derived and/or modified sequence
caacgcaaagcgcttggtattgagtctgtggccgacttcggttccggtctctgcagcagccgtgatcgcttagtggagtgcttagggtagttggccaggatgccgaatatcaaaatcttcagcggcagctcccaccaggacttatctcagaaaattgctgaccgcctgggcctggagctaggcaaggtggtgactaagaaattcagcaaccaggagacctgtgtggaaattggtgaaagtgtacgtggagaggatgtctacattgttcagagtggttgtggcgaaatcaatgacaatttaatggagcttttgatcatgattaatgcctgcaagattgcttcagccagccgggttactgcagtcatcccatgcttcccttatgcccggcaggataagaaagataagagccgggcgccaatctcagccaagcttgttgcaaatatgctatctgtagcaggtgcagatcatattatcaccatggacctacatgcttctcaaattcaggtatcagtggaagctaaatattggtgtttgaaaggtgggaggaaaggactgatgatgctgaagactgcagagaagccaaaaattatgcccaagtacatctgaaataaactagatatcaacaaca

SEQ ID NO: 131730 - DNA, 1218 bp, Artificial Sequence
  derived and/or modified sequence
aagatggcggagtagcaacgcaaagcgcttggtattgagtctgatgccgaatatcaaaatcttcagcggcagctcccaccaggacttatctcagaaaattgctgaccgcctgggcctggagctaggcaaggtggtgactaagaaattcagcaaccaggagacctgtgtggaaattggtgaaagtgtacgtggagaggatgtctacattgttcagagtggttgtggcgaaatcaatgacaatttaatggagcttttgatcatgattaatgcctgcaagattgcttcagccagccgggttactgcagtcatcccatgcttcccttatgcccggcaggataagaaagataagagccgggcgccaatctcagccaagcttgttgcaaatatgctatctgtagcaggtgcagatcatattatcaccatggacctacatgcttctcaaattcagggcttttttgatatcccagtagacaatttgtatgcagagccggctgtcctaaagtggataagggagaatatctctgagtggaggaactgcactattgtctcacctgatgctggtggagctaagagagtgacctccattgcagacaggctgaatgtggactttgccttgattcacaaagaacggaagaaggccaatgaagtggaccgcatggtgcttgtgggagatgtgaaggatcgggtggccatccttgtggatgacatggctgacacttgtggcacaatctgccatgcagctgacaaacttctctcagctggcgccaccagagtttatgccatcttgactcatggaatcttctccggtcctgctatttctcgcatcaacaacgcatgctttgaggcagtagtagtcaccaataccatacctcaggaggacaagatgaagcattgctccaaaatacaggtgattgacatctctatgatccttgcagaagccatcaggagaactcacaatggagaatccgtttcttacctattcagccatgtccctttataatagagtaacttctgaggctttttgagaataaaatccaccccacccttgtttccccttggtatttgatgacaaattcagcagaagacccggcttgctccagtgtagctttctacatcccacatcaggtatattagagcttatccgaactggggaaagacggattgagattaactgctgggacctcctacctgcattatctcattctggcttccttgata

SEQ ID NO: 131731 - DNA, 2073 bp, Artificial Sequence
  derived and/or modified sequence
gggaatgtaagatggcggagtagcaacgcaaagcgcttggtattgagtctgtggccgacttcggttccggtctctgcagcagccgtgatcgcttagtggagtgcttagggtagttggccaggatgccgaatatcaaaatcttcagcggcagctcccaccaggacttatctcagaaaattgctgaccgcctgggcctggagctaggcaaggtggtgactaagaaattcagcaaccaggagacctgtgtggaaattggtgaaagtgtacgtggagaggatgtctacattgttcagagtggttgtggcgaaatcaatgacaatttaatggagcttttgatcatgattaatgcctgcaagattgcttcagccagccgggttactgcagtcatcccatgcttcccttatgcccggcaggataagaaagataagagccgggcgccaatctcagccaagcttgttgcaaatatgctatctgtagcaggtgcagatcatattatcaccatggacctacatgcttctcaaattcagggcttttttgatatcccagtagacaatttgtatgcagagccggctgtcctaaagtggataagggagaatatctctgagtggaggaactgcactattgtctcacctgatgctggtggagctaagagagtgacctccattgcagacaggctgaatgtggactttgccttgattcacaaagaacggaagaaggccaatgaagtggaccgcatggtgcttgtgggagatgtgaaggatcgggtggccatccttgtggatgacatggctgacacttgtggcacaatctgccatgcagctgacaaacttctctcagctggcgccaccagagtttatgccatcttgactcatggaatcttctccggtcctgctatttctcgcatcaacaacgcatgctttgaggcagtagtagtcaccaataccatacctcaggaggacaagatgaagcattgctccaaaatacaggtgattgacatctctatgatccttgcagaagccatcaggagaactcacaatggagaatccgtttcttacctattcagccatgtccctttataatagagtaacttctgaggctttttgagaataaaatccaccccacccttgtttccccttggtatttgatgacaaattcagcagaagacccggcttgctccagtgtagctttctacatcccacatcaggtatattagagcttatccgaactggggaaagacggattgagattaactgctgggacctcctacctgcattatctcattctggcttccttgataattctgtgggccttgcagctttaactatagctcagctgctgcaagatttcagacttttgaggatgttgtgtgagggtgtttgactgtgactggggaagctcagactactttgtatgtgaatgcttcagggttttctttgttgagaacaactagcaacaaaggcaacccatgtgtgaccagttctccccaaggtctatgctaaattatagcaagagccctgggcaaccccaaacctagtcctggtagctgagcaccctgtaaggcaggagcaggcagctcagcttgagcagacattgggtggggggtggggggtggttgaggggggaggcagcacagtgcagcaaatgtttcttgggaggaagaagcctgatccatcaccatctgcttgactatgtagcttggattctcctttgtacctatccctttcgatttggctttaccttcatctatcttgatcctttcctggccaaatatcctcttgggcccaaatgaacattgtaccatagtcttctggaaagcaaacatgcttcctgctatgtaattgctaacattcatattagatgatgtgctgtagcttgatcttccttagcctactgccactgaggcagtaggttttaggtggtatcgtagtgccttttgattaatttaagtatttaattttcatcttccttctttggatctatttggcctctcaaatgaactgagattcctgttaaaaaagattgatgttattgtctcttgtagaggaaactaataaagtgtgtgtacctgtgtga

SEQ ID NO: 131732 - DNA, 1199 bp, Artificial Sequence
  derived and/or modified sequence
gacttcggttccggtctctgcagcagccgtgatcgcttagtggagtgcttagggtagttggccaggatgccgaatatcaaaatcttcagcggcagctcccaccaggacttatctcagaaaattgctgaccgcctgggcctggagctaggcaaggtggtgactaagaaattcagcaaccaggagacctgtgtggaaattggtgaaagtgtacgtggagaggatgtctacattgttcagagtggttgtggcgaaatcaatgacaatttaatggagcttttgatcatgattaatgcctgcaagattgcttcagccagccgggttactgcagtcatcccatgcttcccttatgcccggcaggataagaaagataagagccgggcgccaatctcagccaagcttgttgcaaatatgctatctgtagcaggtgcagatcatattatcaccatggacctacatgcttctcaaattcagggcttttttgatatcccagtagacaatttgtatgcagagccggctgtcctaaagtggataagggagaatatctctgagtggaggaactgcactattgtctcacctgatgctggtggagctaagagagtgacctccattgcagacaggctgaatgtggactttgccttgattcacaaagaacggaagaaggccaatgaagtggaccgcatggtgcttgtgggagatgtgaaggatcgggtggccatccttgtggatgacatggctgacacttgtggcacaatctgccatgcagctgacaaacttctctcagctggcgccaccagagtttatgccatcttgactcatggaatcttctccggtcctgctatttctcgcatcaacaacgcatgctttgaggcagtagtagtcaccaataccatacctcaggaggacaagatgaagcattgctccaaaatacaggtgattgacatctctatgatccttgcagaagccatcaggagaactcacaatggagaatccgtttcttacctattcagccatgtccctttataatagagtaaggtatttgatgacaaattcagcagaagacccggcttgctccagtgtagctttctacatcccacatcaggtatattagagcttatccgaactggggaaagacggattgagattaactgctgggacctcctacctgcattatctcattctggcttccttgataattctgt

SEQ ID NO: 131733 - DNA, 657 bp, Artificial Sequence
  derived and/or modified sequence
atggaattattaattatgataaatgcctgcaaaatcgcatccgcaagccgcgtgacagctgtaatcccttgctttccatacgctaggcaagacaaaaaggataagggattcttcgatattccagtggataacctctacgcagaacccgcagtgctgaagtggatcagagaaaacatttctgaatggcgcaattgcaccatcgtgtcccctgatgctggtggagccaagcgcgtgactagcatcgcagataggcttaatgttgatttcgccttgatacataaggaaaggaaaaaagctaacgaggtggatcgcatggtcctcgttggggatgtcaaagatagggttgcgatcctggtcgacgacatggctgatacctgcgggaccatctgtcatgcagcggataagctgttgagcgccggagccacacgagtttacgccatccttacccacgggatattttctggaccagcgatcagtaggataaacaacgcatgtttcgaagctgtggtagtgaccaataccatcccccaggaggataaaatgaaacactgttccaagattcaggtgatcgacatctcgatgatactggctgaagcaataaggcggacacacaatggtgagtctgtcagctacctgttctcccacgtgccactctag

SEQ ID NO: 131734 - DNA, 507 bp, Artificial Sequence
  derived and/or modified sequence
atgcccaacattaagatttttagtggcagctcccatcaagacctatcccagaaaatagctgataggttagggcttgagctgggaaaagtggtgacaaagaagtttagtaaccaggaaacatgcgtggagatcggcgagtcggtacgtggcgaggacgtctatattgtccaatcaggctgtggggaaatcaacgataacctgatggagctcttgataatgattaatgcctgtaagattgctagtgcaagccgagtgacggcagtgatcccttgttttccctatgccaggcaggacaaaaaagataagagtagagccccaataagtgccaaacttgttgcaaacatgctgagtgtagcgggagccgaccatatcatcactatggaccttcacgcgtcacaaatacaggtgtcagttgaggccaagtactggtgtctgaagggcggtcgcaaaggtctcatgatgctgaaaactgctgagaagcctaaaattatgcccaagtatatttag

SEQ ID NO: 131735 - DNA, 756 bp, Artificial Sequence
  derived and/or modified sequence
atggagctgctaattatgatcaacgcatgtaagatagcttccgctagtagagttacagcggtgataccatgtttcccctatgctcggcaagacaagaaagataaatcgagggcaccgattagtgccaagctggtagccaatatgttgtctgtcgccggagctgatcatattattaccatggatctgcacgccagtcagatccaggggttttttgacattcctgtggataatttatacgcagagccggcagtgctgaagtggattcgggagaacatctccgaatggcgtaactgcacaatcgtgtctcccgatgcaggcggtgctaagcgagtcacatccatagctgataggctgaatgttgattttgcgctgatccacaaagaaaggaaaaaagccaatgaggttgatagaatggtgctcgtgggggacgtgaaggatagggtggccatcctcgtggatgatatggccgacacctgtgggacgatttgccacgccgctgataaattactcagcgcgggtgctactagggtgtatgccattctcacccatggtatcttttcaggtcccgctatctccagaatcaacaatgcttgcttcgaggcagtggtcgtgacaaacacaatcccccaggaggataaaatgaagcactgtagcaagattcaagtgatcgatatctctatgatccttgcagaggcgattagacgtactcataatggagaaagcgtttcttacctattttcacatgtgccgctgtag

SEQ ID NO: 131736 - DNA, 957 bp, Artificial Sequence
  derived and/or modified sequence
atgccaaacatcaaaatattttctgggtcgagtcatcaggacttgagtcaaaagatagctgacaggctcggcctcgagctaggaaaagtggtgactaaaaaattttccaaccaggagacatgcgtggaaattggcgagagtgtacgtggagaagacgtgtatatagtgcagagcggttgcggtgagatcaatgataatctgatggagctgctcataatgatcaatgcttgtaagatcgccagtgctagtcgggtcactgccgtgatcccctgctttccctatgccagacaggataaaaaagacaagtcacgcgctcctatcagtgccaagctagttgcaaacatgctgagcgtcgccggagccgatcatatcattacaatggatctccatgcctctcagatccagggctttttcgacataccagtggacaacctctacgccgaacctgctgtactcaaatggattcgcgagaacatctctgagtggcggaattgtaccatcgtgtcgccagatgccggaggcgcaaagagagtaacctctatagctgaccgcctgaacgtcgactttgccttaatccacaaggagaggaaaaaagcgaatgaagtcgacaggatggtgttggtcggagatgtgaaagatagggttgcgatcctcgtagatgatatggctgatacctgtggtacaatctgtcatgcagccgacaaacttttgtccgcaggggctaccagggtttatgccattttgactcatgggatctttagcggacctgcaatcagcaggattaacaacgcctgctttgaagctgtggtagttaccaacaccattccacaggaggataagatgaagcattgtagtaaaattcaagtgattgacatctctatgatccttgccgaagctattaggaggactcataatggggagtccgtctcctatctgttttcccacgtgccattgtag

SEQ ID NO: 131737 - DNA, 957 bp, Artificial Sequence
  derived and/or modified sequence
atgccgaatatcaaaattttctcaggctcatcgcaccaagacctgtcacagaagatcgcagacagacttggactggagctcggcaaagtggtgacaaaaaagttctcaaaccaggagacctgcgtcgagatcggagaaagcgttcgcggtgaggacgtctacattgtgcagagcgggtgcggagaaatcaacgacaacctgatggagctcctgataatgattaatgcttgtaagattgcctccgcctcaagggtgacagcggtaattccttgctttccttatgctcgccaggataagaaagataaatccagagctccaataagcgcaaaactcgtggctaatatgctctcagtcgctggcgctgaccatatcataacaatggacctacacgcctcccagatacaaggcttctttgatatacctgtggataacctgtatgcagagccagcagtgctaaagtggatcagggagaacatcagcgaatggcggaattgcactatagtttctcccgacgccggtggcgcaaaacgggtgacttctatagcggatcggttaaacgttgacttcgcgcttattcacaaggagagaaaaaaggccaatgaggttgataggatggtcctcgtcggagatgtcaaagacagggtcgccattcttgtggacgacatggcggatacttgcggcaccatctgtcacgccgctgacaagctgctctcagcaggggcaacacgcgtgtatgccattttgacccacggcattttttctggtccagccatcagtcgcatcaacaatgcctgctttgaagccgtggtcgtgactaataccatcccgcaggaagataagatgaagcattgcagcaagatccaggtgattgacatttctatgattctggcagaagctattcggagaacacacaacggcgagtcagtgagttacctgtttagtcatgtgccactctag

SEQ ID NO: 131738 - DNA, 657 bp, Artificial Sequence
  derived and/or modified sequence
atggagctgctgatcatgatcaacgcctgcaagatcgccagcgccagcagagtgaccgccgtgatcccctgcttcccctacgccagacaggacaagaaggacaagggcttcttcgacatccccgtggacaacctgtacgccgagcccgccgtgctgaagtggatcagagagaacatcagcgagtggagaaactgcaccatcgtgagccccgacgccggcggcgccaagagagtgaccagcatcgccgacagactgaacgtggacttcgccctgatccacaaggagagaaagaaggccaacgaggtggacagaatggtgctggtgggcgacgtgaaggacagagtggccatcctggtggacgacatggccgacacctgcggcaccatctgccacgccgccgacaagctgctgagcgccggcgccaccagagtgtacgccatcctgacccacggcatcttcagcggccccgccatcagcagaatcaacaacgcctgcttcgaggccgtggtggtgaccaacaccatcccccaggaggacaagatgaagcactgcagcaagatccaggtgatcgacatcagcatgatcctggccgaggccatcagaagaacccacaacggcgagagcgtgagctacctgttcagccacgtgcccctgtag

SEQ ID NO: 131739 - DNA, 507 bp, Artificial Sequence
  derived and/or modified sequence
atgcccaacatcaagatcttcagcggcagcagccaccaggacctgagccagaagatcgccgacagactgggcctggagctgggcaaggtggtgaccaagaagttcagcaaccaggagacctgcgtggagatcggcgagagcgtgagaggcgaggacgtgtacatcgtgcagagcggctgcggcgagatcaacgacaacctgatggagctgctgatcatgatcaacgcctgcaagatcgccagcgccagcagagtgaccgccgtgatcccctgcttcccctacgccagacaggacaagaaggacaagagcagagcccccatcagcgccaagctggtggccaacatgctgagcgtggccggcgccgaccacatcatcaccatggacctgcacgccagccagatccaggtgagcgtggaggccaagtactggtgcctgaagggcggcagaaagggcctgatgatgctgaagaccgccgagaagcccaagatcatgcccaagtacatctag

SEQ ID NO: 131740 - DNA, 756 bp, Artificial Sequence
  derived and/or modified sequence
atggagctgctgatcatgatcaacgcctgcaagatcgccagcgccagcagagtgaccgccgtgatcccctgcttcccctacgccagacaggacaagaaggacaagagcagagcccccatcagcgccaagctggtggccaacatgctgagcgtggccggcgccgaccacatcatcaccatggacctgcacgccagccagatccagggcttcttcgacatccccgtggacaacctgtacgccgagcccgccgtgctgaagtggatcagagagaacatcagcgagtggagaaactgcaccatcgtgagccccgacgccggcggcgccaagagagtgaccagcatcgccgacagactgaacgtggacttcgccctgatccacaaggagagaaagaaggccaacgaggtggacagaatggtgctggtgggcgacgtgaaggacagagtggccatcctggtggacgacatggccgacacctgcggcaccatctgccacgccgccgacaagctgctgagcgccggcgccaccagagtgtacgccatcctgacccacggcatcttcagcggccccgccatcagcagaatcaacaacgcctgcttcgaggccgtggtggtgaccaacaccatcccccaggaggacaagatgaagcactgcagcaagatccaggtgatcgacatcagcatgatcctggccgaggccatcagaagaacccacaacggcgagagcgtgagctacctgttcagccacgtgcccctgtag

SEQ ID NO: 131741 - DNA, 957 bp, Artificial Sequence
  derived and/or modified sequence
atgcccaacatcaagatcttcagcggcagcagccaccaggacctgagccagaagatcgccgacagactgggcctggagctgggcaaggtggtgaccaagaagttcagcaaccaggagacctgcgtggagatcggcgagagcgtgagaggcgaggacgtgtacatcgtgcagagcggctgcggcgagatcaacgacaacctgatggagctgctgatcatgatcaacgcctgcaagatcgccagcgccagcagagtgaccgccgtgatcccctgcttcccctacgccagacaggacaagaaggacaagagcagagcccccatcagcgccaagctggtggccaacatgctgagcgtggccggcgccgaccacatcatcaccatggacctgcacgccagccagatccagggcttcttcgacatccccgtggacaacctgtacgccgagcccgccgtgctgaagtggatcagagagaacatcagcgagtggagaaactgcaccatcgtgagccccgacgccggcggcgccaagagagtgaccagcatcgccgacagactgaacgtggacttcgccctgatccacaaggagagaaagaaggccaacgaggtggacagaatggtgctggtgggcgacgtgaaggacagagtggccatcctggtggacgacatggccgacacctgcggcaccatctgccacgccgccgacaagctgctgagcgccggcgccaccagagtgtacgccatcctgacccacggcatcttcagcggccccgccatcagcagaatcaacaacgcctgcttcgaggccgtggtggtgaccaacaccatcccccaggaggacaagatgaagcactgcagcaagatccaggtgatcgacatcagcatgatcctggccgaggccatcagaagaacccacaacggcgagagcgtgagctacctgttcagccacgtgcccctgtag

SEQ ID NO: 131742 - protein, 318 aa, Artificial Sequence
  derived and/or modified sequence
MPNIVLFSGSSHQDLSQRVADRLGLELGKVVTKKFSNQETSVEIGESVRGEDVYIIQSGCGEINDNLMELLIMINACKIASSSRVTAVIPCFPYARQDKKDKSRAPISAKLVANMLSVAGADHIITMDLHASQIQGFFDIPVDNLYAEPAVLQWIRENIAEWKNCIIVSPDAGGAKRVTSIADRLNVEFALIHKERKKANEVDRMVLVGDVKDRVAILVDDMADTCGTICHAADKLLSAGATKVYAILTHGIFSGPAISRINNAAFEAVVVTNTIPQEDKMKHCTKIQVIDISMILAEAIRRTHNGESVSYLFSHVPL

SEQ ID NO: 131743 - DNA, 957 bp, Artificial Sequence
  derived and/or modified sequence
atgcccaatatagttctgttctccgggtcctcgcaccaggatttgtcccaacgggtggctgacaggctgggtttagaactcgggaaggttgtcacaaagaagttttccaaccaagagacctcagtggaaatcggcgagtcagtccgcggcgaggacgtgtacatcattcagagtggctgtggcgagattaatgataacctgatggaactgctcatcatgattaatgcttgcaagatcgcgtcatcttctcgcgtgaccgctgtaattccatgcttcccctatgcaagacaggataaaaaggataagtcccgagcccctattagcgcaaagcttgtcgctaacatgctgtcagttgccggtgccgatcacattattacgatggatcttcatgcttcccagatccaggggttcttcgacatcccggtggataacctgtacgcggagcctgccgtcctgcaatggatccgcgagaacatagctgaatggaaaaactgtattatcgtcagtccagacgccgggggtgcaaagcgcgtcactagcattgctgacaggttaaacgtagaatttgccctgatccacaaagagaggaagaaagccaacgaagtcgatcgcatggtgctggtgggcgatgtcaaggacagggtagcaattctggtagacgatatggccgacacctgtggcacgatttgccacgccgcggataagctcttatcggctggggcaaccaaagtgtacgctatactgacgcacggcatcttcagtggtcctgctatatctaggatcaataacgcagcttttgaggccgtggtagtgacaaacactatcccacaggaagacaaaatgaagcactgtaccaagatccaggttatcgacatcagcatgatcctggcagaggccatccggagaacacataacggggaatcggtgtcgtatctgttctctcacgtgccgctgtag

SEQ ID NO: 131744 - DNA, 957 bp, Artificial Sequence
  derived and/or modified sequence
atgcccaacatcgtgctcttcagcggcagcagccaccaggacctgagccagagggtggccgaccggctgggcctggagctgggcaaggtggtgaccaagaagttcagcaaccaggagacctctgtggagatcggggagagcgtgagaggagaagatgtgtacatcatccagagcggctgtggggagatcaatgacaacctgatggagctgctgatcatgatcaatgcctgcaagatcgccagcagcagccgggtgacagctgtgatcccctgcttcccctatgcccggcaggacaagaaggacaagagccgggcccccatcagcgccaagctggtggccaacatgctgtctgtggccggggctgaccacatcatcaccatggacctgcacgccagccagatccagggcttctttgacatccctgtggacaacctgtatgcagagcctgctgtgctgcagtggatcagagaaaatattgctgagtggaagaactgcatcatcgtgtccccagatgctgggggcgccaagagggtgaccagcattgctgaccggctgaatgtggagtttgccctgatccacaaggagaggaagaaggccaatgaggtggacaggatggtgctggtgggagatgtgaaggacagagtggccatcctggtggatgacatggctgacacctgtggcaccatctgccacgccgctgacaagctgctgtctgctggggccaccaaggtgtatgccatcctgacccacggcatcttcagcggccctgccatcagccgcatcaacaatgctgcctttgaggccgtggtggtgaccaacaccatcccccaggaggacaagatgaagcactgcaccaagatccaggtgattgacatctccatgatcctggccgaggccatccggaggacccacaatggagagagcgtgtcctacctgttcagccacgtgcccctgtag

SEQ ID NO: 131745 - DNA, 957 bp, Artificial Sequence
  derived and/or modified sequence
atgcccaacatcgtgctgttcagcggcagcagccaccaggacctgagtcaacgcgttgcggaccgtctgggtctggagctaggcaaggtggtgactaaaaagttctccaaccaggagacctctgtagaaattggggaatccgttagaggagaggacgtttacatcatccagtccggatgcggagagataaacgacaatttgatggaattgcttattatgattaacgcctgcaaaatcgctagtagcagccgcgtgacggcagtgatcccgtgttttccttatgcacggcaagataagaaagataaatcacgagccccaatctccgccaaattggtagccaacatgctatcggtggccggtgcggaccatattatcaccatggacttacacgcgtcacaaattcagggctttttcgatattccggtcgataatttgtacgccgaacccgcagtgctacagtggatccgggagaatattgccgaatggaaaaactgtatcatcgtgtcacctgacgcaggaggagctaagagggtcacttcaattgcggaccgcttgaatgtagagttcgccctgatccacaaggaacgcaaaaaagcaaacgaggtagataggatggtactggttggcgacgtaaaagaccgtgtggccatcctcgtcgacgacatggccgacacttgcggcaccatctgccacgccgcggataaactccttagcgctggtgcaacaaaggtgtacgccatcctgacgcatggaatcttttctggacctgcgatttcccgtatcaacaatgctgccttcgaagctgtcgtggtcacgaacactatccctcaggaagataagatgaagcactgtacgaaaatacaagttatcgacatctctatgatcttagccgaggctattcgtcgcacacataacggggagtccgtgtcgtatctgtttagtcatgtgcctttatag

SEQ ID NO: 131746 - DNA, 2511 bp, Artificial Sequence
  derived and/or modified sequence
cctccccttccctacatctagccgccgcgctttcccgctcccgcagcagcagcctcccgcgtcgctgtcgctgttgcctccgccacctcctccgccgccgcgcgcccctcggagttccgcgccccaccatgcccaacatcgtgctgttcagcggcagctcgcatcaggacctgtcccagcgcgtggccgaccgcctgggcctggagctgggcaaggtggtcacgaagaagttcagcaaccaggagaccagcgtggagattggtgaaagcgtgagaggggaagatgtctacatcatccagagcggctgcggggaaattaacgacaacctgatggaactcctcatcatgatcaatgcctgcaagattgcgtcatcatccagagtaactgccgtgatcccgtgtttcccatacgcccgacaagataaaaaggacaagagtcgtgccccaatttctgcaaaacttgtggccaatatgctgtcggtggctggggcggatcacatcatcaccatggacctgcatgcttctcagatacagggattctttgatattcctgtggataatttgtatgcggagcccgcagtcctgcagtggattcgggaaaacattgccgagtggaagaactgtatcattgtttcacctgacgcagggggagccaaaagggttacatcaattgcagacaggttgaatgtggaatttgctttgatccacaaagagaggaagaaggcgaatgaagtggaccggatggtcctggtgggcgacgtgaaggaccgtgtggccatcctcgtggatgacatggctgacacttgcggcaccatctgccatgctgcggacaagctgctgtcagctggagccaccaaagtgtatgctatccttacccatgggatcttctctggaccagctatttccagaataaataatgccgcctttgaggctgttgtcgtcacaaacacaattccgcaagaggacaaaatgaaacactgcaccaagattcaggtcattgacatttccatgatcttggccgaagcaatccgaaggacacacaatggggaatccgtgtcctacctgttcagccatgtcccgctataaatccagaatgggaagtgtccagcaagcctactctgacttctgacttgtttttgttttctggatttttagctgtaggtattcagcaatgataggttaatcactggcaaaagcatcagatctttgtatatgctaagatttattgtttccccttctaaagctcaagatcatttctttccagtttttggggaaatggtggtggttatttggtctttaagtgaactgtcttaaatgagaaacgtttttgtcattttgacttttaacaggtacaggtgatctcttcctttgttctttcagtactttgaggcgacaactttcaagtatataatttcattgtggaagtcatagtttatatatttcgaggttgccaaaggtgacttcagattaaagccttctgtgtaaatatatactgataatgcctatggacatttgggtaaaaccctgtatagaattaattatccttttactttggagtgaaccttggaaaatttataattataataccatggattttgaattttccttttttttttttttttggataactcagtttcagataaaccatcttggttactgtgcttaatttggaccaaattttatttagcttaatatggacactgacacattttggggggtatacattagacatatcagagcagtgtatttctggatcattttttaaatgacctcttctaaaacataactgtcacttacctgaaatgctgcatcctaaaattccaaaattatattgagcaatcgccaaggcctaaagccaactgacttaaaggtaatcatttcagctaagattaaatttaaagcctaagaatgtatagagctagttttaaaataatgatctcagatttttaaaaaggatataggaacctgcattgtcattctctgaattaagaactgatggtttctatcattatttagccccacctttgtattttaaaatccttcagaatacatttatgaaccaatgcgactggacttagccacacacaatggaaattcagaccttgactatttggtgtttccagttcacaaaggtgatgaagactgtcttgggagcagcttaatcccaaaatttgtacatttcttgctgctcctggcgtggaaacttaagtgagaccaccaaatacattggtcctgtccaattctactgaatgggggtggacctggcatttatctggccaaaaacaggagccagagaaatatgaatataccaaagttgtttgtttagcctccaacttaaattacattagtcaacttatagatactcatatgatcacttttctttttagatactacatcaactagattcaggagtatatcatttgcagtgcttgtattggtttaaaatgtaagattttaagatcctctaacactgtactaaaacatttcaataaaatcattctgactgcgttca

SEQ ID NO: 131747 - DNA, 957 bp, Artificial Sequence
  derived and/or modified sequence
atgcccaatatagtgctgttttcaggctcctcacatcaggatctgtcccagcgggtcgcagaccggctcggcctggaattggggaaggtagtgaccaagaagttcagtaaccaggagactagtgtcgagataggcgaaagtgtgagaggcgaagacgtctatataatccagagcggatgtggcgaaatcaatgacaacctcatggagttactcatcatgattaacgcttgtaagatcgcctcttcttctcgcgtgactgcggtgatcccatgttttccttatgcaagacaggacaaaaaagacaaaagcagggcacctatttcagcaaaactggttgctaatatgctgagcgtcgctggggctgaccacatcatcactatggatctgcacgcctcccagattcaaggtttttttgatatcccagtcgacaacctgtatgctgagccagccgtgctgcaatggatccgggagaatatcgcggagtggaaaaattgtattattgtgagccctgatgcagggggtgccaaacgcgtaacttccatcgccgacaggttgaatgtggagtttgcgcttatacataaagaaagaaaaaaggcaaacgaggtggaccgtatggtcttggtgggcgacgttaaagatagggtcgctatattagttgatgacatggccgatacctgtggtacaatctgtcatgcagctgacaagttgttatctgctggcgctactaaggtgtacgcaatcctcacacacggcatcttttctggacctgctatctcaagaattaacaatgctgccttcgaggcggttgtagtgacaaataccatcccacaggaagacaaaatgaagcactgcacgaaaattcaggtgatcgatatttcaatgatcctcgccgaagccattcggcgaactcacaacggcgagtctgtgtcctacctgttcagtcatgttccgctgtag

SEQ ID NO: 131748 - DNA, 957 bp, Artificial Sequence
  derived and/or modified sequence
atgcccaacatcgtgctgttcagcggcagcagccaccaggacctgagccagagagtggccgacagactgggcctggagctgggcaaggtggtgaccaagaagttcagcaaccaggagaccagcgtggagatcggcgagagcgtgagaggcgaggacgtgtacatcatccagagcggctgcggcgagatcaacgacaacctgatggagctgctgatcatgatcaacgcctgcaagatcgccagcagcagcagagtgaccgccgtgatcccctgcttcccctacgccagacaggacaagaaggacaagagcagagcccccatcagcgccaagctggtggccaacatgctgagcgtggccggcgccgaccacatcatcaccatggacctgcacgccagccagatccagggcttcttcgacatccccgtggacaacctgtacgccgagcccgccgtgctgcagtggatcagagagaacatcgccgagtggaagaactgcatcatcgtgagccccgacgccggcggcgccaagagagtgaccagcatcgccgacagactgaacgtggagttcgccctgatccacaaggagagaaagaaggccaacgaggtggacagaatggtgctggtgggcgacgtgaaggacagagtggccatcctggtggacgacatggccgacacctgcggcaccatctgccacgccgccgacaagctgctgagcgccggcgccaccaaggtgtacgccatcctgacccacggcatcttcagcggccccgccatcagcagaatcaacaacgccgccttcgaggccgtggtggtgaccaacaccatcccccaggaggacaagatgaagcactgcaccaagatccaggtgatcgacatcagcatgatcctggccgaggccatcagaagaacccacaacggcgagagcgtgagctacctgttcagccacgtgcccctgtag

SEQ ID NO: 131749 - protein, 282 aa, Artificial Sequence
  derived and/or modified sequence
MELLIMAYALKTACARNIIGVIPYFPYSKQSKMRKRGSIVCKLLASMLAKAGLTHIITMDLHQKEIQGFFSFPVDNLRASPFLLQYIQEEIPNYRNAVIVAKSPDAAKRAQSYAERLRLGLAVIHGEAQCTELDMDDGRHSPPMVKNATVHPGLELPLMMAKEKPPITVVGDVGGRIAIIVDDIIDDVESFVAAAEILKERGAYKIYVMATHGILSAEAPRLIEESSVDEVVVTNTVPHEVQKLQCPKIKTVDISLILSEAIRRIHNGESMAYLFRNITVDD

SEQ ID NO: 131750 - protein, 385 aa, Artificial Sequence
  derived and/or modified sequence
MPKKLLLLPPPSASSAFRVPRARPVPPPAMNAARTGYRVFSANSTAACTELAKRITERLGAELGKSVVYQETNGETRVEIKESVRGQDIFIIQTIPRDVNTAVMELLIMAYALKTACARNIIGVIPYFPYSKQSKMRKRGSIVCKLLASMLAKAGLTHIITMDLHQKEIQGFFSFPVDNLRASPFLLQYIQEEIPNYRNAVIVAKSPDAAKRAQSYAERLRLGLAVIHGEAQCTELDMDDGRHSPPMVKNATVHPGLELPLMMAKEKPPITVVGDVGGRIAIIVDDIIDDVESFVAAAEILKERGAYKIYVMATHGILSAEAPRLIEESSVDEVVVTNTVPHEVQKLQCPKIKTVDISLILSEAIRRIHNGESMAYLFRNITVDD

SEQ ID NO: 131751 - DNA, 1158 bp, Artificial Sequence
  derived and/or modified sequence
atgccaaaaaagctgctgctactgcctccaccgtcagcttcaagcgctttccgggtgccccgggctcggcccgtgcccccgccggctatgaatgctgcccggaccgggtatagagttttcagcgcaaacagcactgcagcttgcacagaactcgcaaagcgcatcactgagcggctgggcgccgagctgggcaagtccgtggtctatcaggaaactaatggcgagactagggtggaaattaaggaatctgtgaggggacaggacattttcatcattcaaaccatcccccgagacgtcaatacagcagtgatggaactcctcatcatggcttatgcccttaaaacagcttgcgcaagaaacatcatcggggtcataccgtactttccttacagcaaacaaagcaaaatgaggaagcggggctcaatcgtgtgtaagctccttgccagcatgctggcgaaggcaggcctcactcacatcatcacaatggacctccatcaaaaagagatacaaggtttctttagcttccccgtggacaacctcagagcgtcccctttcctgctgcaatacattcaagaggagatccctaattacaggaacgcagtgatcgtagcaaaatctcctgatgccgccaaacgcgcacagtcttacgcagaacgcctgcgcttgggcctggccgtgattcatggtgaggcccagtgcacggagcttgacatggatgacgggaggcacagtccccctatggtgaaaaacgctaccgtgcatccaggcttggaattgcccctgatgatggccaaagaaaaacctccaatcaccgtggtgggtgatgttggggggcgaattgccatcatcgtggacgacattattgacgatgtcgagagttttgttgcagccgctgagatcttgaaagagagaggcgcatataaaatttatgtgatggcaactcacgggatcctgagcgcagaggcccccaggctgatcgaggagtctagtgtggatgaggtggtggtgaccaacaccgttcctcatgaggtgcagaagcttcaatgcccaaaaatcaaaactgttgatatctcactcatccttagcgaggccattcggagaatccacaacggggaatctatggcttacctgttccgcaacataactgtggacgactag

SEQ ID NO: 131752 - DNA, 1158 bp, Artificial Sequence
  derived and/or modified sequence
atgcccaagaagctgctgctgctgcccccacccagcgccagcagcgccttccgggtgccccgggcccggcctgtgcccccaccagccatgaatgctgccaggacaggctacagagtcttcagcgccaacagcacagctgcctgcacagagctggccaagaggatcacagagcggctgggcgctgagctgggcaagtctgtggtgtaccaggagaccaatggagagaccagggtggagatcaaggagagcgtgcggggccaggacatcttcatcatccagaccatccccagagatgtgaacacagctgtgatggagctgctgatcatggcctatgccctgaagacagcctgtgccaggaacatcatcggggtcatcccctacttcccctacagcaagcagagcaagatgaggaagaggggcagcatcgtgtgcaagctgctggcctccatgctggccaaggccggcctgacccacatcatcaccatggacctgcaccagaaggagatccagggcttcttctccttccctgtggacaacctgcgggccagccccttcctgctgcagtacatccaggaggagatccccaactacagaaatgctgtgattgtggccaagagcccagatgctgccaagagggcccagagctatgcagagcggctgcggctgggcctggccgtcatccacggggaggcccagtgcacagagctggacatggatgatggccgccacagcccccccatggtgaagaatgccaccgtgcaccctggcctggagctgcccctgatgatggccaaggagaagccacccatcaccgtggtgggagatgtgggcggccgcatcgccatcatcgtggatgacatcattgatgatgtggagagctttgtggccgctgctgagatcctgaaggagcggggggcctacaagatctacgtgatggccacccacggcatcctgtctgctgaggcccccaggctcatcgaggagagctctgtggatgaggtggtggtgaccaacacagtgccccatgaggtgcagaagctgcagtgccccaagatcaagacagtggacatcagcctcatcctgtctgaggccatccgccgcatccacaacggggagagcatggcctacctgttcaggaacatcaccgtggatgactag

SEQ ID NO: 131753 - DNA, 1158 bp, Artificial Sequence
  derived and/or modified sequence
atgcccaagaagctgctgctgctgcccccccccagcgccagcagcgctttccgtgtgccacgggctcgtccagtcccaccacccgcgatgaatgctgctaggacagggtatcgagtcttctcagccaatagtactgccgcatgtacggaactggctaagaggattacagagcggctgggggccgaactggggaagtctgtcgtgtatcaagagaccaacggcgagacccgcgtcgagatcaaggaatctgtgcgaggacaagacattttcataatccagacaatcccacgcgatgtgaacactgcagtgatggagctgctgattatggcttatgctctgaagacagcctgtgccagaaatatcattggagtgatcccatactttccatactccaaacagtctaaaatgcggaaaaggggatcaatcgtgtgtaaattactggcctctatgctggccaaagcgggattgacacatatcataactatggatttacatcagaaagaaattcaaggttttttcagtttccctgtggacaacctcagagcatcgccgtttttgttacagtacatacaggaggaaatccccaactaccggaacgccgtaatcgttgcgaaaagtcctgacgcagccaagagagcccagtcatacgccgagcgcctccgactgggactggccgtgattcatggagaagcacaatgcactgagctggacatggatgatgggcgccattcccctcctatggttaagaatgctacagtccaccctgggctggaactacccctcatgatggcgaaggagaagcctccaatcacggttgttggagatgtgggagggcgtattgctattatagttgacgacatcattgacgatgtggaaagctttgtggcagctgccgagattctaaaggaacgcggagcttataaaatttacgtgatggccacccacggcatcttgagcgccgaggcaccccgtctgatagaagagtctagcgtggacgaagtagtcgtgactaatacagtgccccacgaagtgcagaaactgcaatgccccaagatcaaaacagtggatattagtctgattctatcggaagctattcggagaattcacaatggcgaaagcatggcatatttgtttaggaatatcactgtcgatgattag

SEQ ID NO: 131754 - DNA, 1678 bp, Artificial Sequence
  derived and/or modified sequence
agagctagatcgtatacctcctcggaggcggacatgttgggtcctggccaaaaagttggaaacacctggggccactaccgaggcgccttggtgctgaattggggaagtctgttgtatatcaagagaccaatggagaaacaagagttgaaataaaagaatctgttcgtggccaagatattttcattatacagacaatacccagagatgtgaatacagctgtgatggagttgctcatcatggcttacgcactgaagactgcctgtgccaggaacattattggggtcatcccctacttcccctacagcaagcagagcaagatgaggaagaggggttccattgtgtgcaagctgctagcatccatgctggcgaaagcaggtttaactcacattatcactatggatcttcatcaaaaggaaatacaaggctttttcagctttcctgtggacaaccttagagcctcacctttcctgcttcagtatatccaggaagaaattccaaattacagaaatgcagtcattgtagctaagtctcctgatgctgcaaagagggcccagtcctatgcggagagactgcgtctgggtttggccgtcattcacggggaagctcagtgcacggaactggacatggacgatggtcgtcactccccgcctatggtcaaaaatgctactgtgcacccaggcctggagttgccattgatgatggccaaagagaagccaccgataactgtagttggagatgttggaggccgcatcgcaatcatcgtggatgacattattgacgatgtggagagttttgttgctgccgcggagatcctgaaagagagaggcgcctataagatctatgttatggccacccacggcatcctgtctgcagaggcccctcgcctgattgaggagtcctccgtagacgaggtggtggtgacgaatactgtccctcatgaggttcagaagctgcaatgtcccaagataaagactgtggatatcagtttgattctttctgaagccattcggagaatccacaatggagagtccatggcctaccttttccgaaacatcactgtggatgactagctttcacgagggtctcgaccctggacctcctgagggaaacatggaaaaagcagtgccatgagtgatacagtgtttccttgcaagggaggactcgaaacagcctggagttagatatcttcttttgcccggattgatggggaggagggattaaaagagtcaggaagaagacagagctaatggataaatatcataacatggccttacatgtctgctgtcatcagccctgttccttaaaagttctagctgctttcttaaaaataatctgaaaatcttattgatactaaagaggagttaaaggcacataaagtcttaactctataatgttcatttagttgtttcagctccagggaaatggaggtattgatgttgaacctggttagggaagctgagcgcctgtggccctattactatccagttggcctctcccaaatcaacttcaagtcttttatagagaatcgtatttttctttcagaaattgttatgcctacagccattgaaaaatgaagcattcatgttgttacatcttccaaggatgtcagattagaaaatagcatcccacctctgggtatctgagtggctctgaagttgcaaataaaataatttgttgt

SEQ ID NO: 131755 - DNA, 2213 bp, Artificial Sequence
  derived and/or modified sequence
aaaaagttggaaacacctggggccactaccgaggtaggctgctcctcccaagaaagtgagaccgaaagagctcccgtggaagcggtcaaagcaggggcggggcgaacctgtgacatgcccctcggaagaacaggcttttagagagtcgccaggctccctgccctcatccgagatggcggcctgagggcgctctagccgacgctcttcggatgcccggagggggcggtggccttgcctctggctctgaggcggcggcgccgggcgctgcgaaggctcggccgctgtagtcagtggtgtggggtgcgcaagggcacggacctcggagctctccccgcttgcgccgagtttctcagcgccttccccacccaaaccggggtctcgcagtcggaagcactcagagtgcagccccgcgcggggccggtcgtaaccgcgccgcgggccggacgatgcccaagaagctgctgctgttgcccccgccctccgcgtcctcggctttccgcgtcccgcgcgcccgccccgttcccccgccggccatgaacgccgctcgcaccggctaccgagtcttctcggccaactccacggccgcctgcacggagctggccaagcgcatcacagagcgccttggtgctgaattggggaagtctgttgtatatcaagagaccaatggagaaacaagagttgaaataaaagaatctgttcgtggccaagatattttcattatacagacaatacccagagatgtgaatacagctgtgatggagttgctcatcatggcttacgcactgaagactgcctgtgccaggaacattattggggtcatcccctacttcccctacagcaagcagagcaagatgaggaagaggggttccattgtgtgcaagctgctagcatccatgctggcgaaagcaggtttaactcacattatcactatggatcttcatcaaaaggaaatacaaggctttttcagctttcctgtggacaaccttagagcctcacctttcctgcttcagtatatccaggaagaaattccaaattacagaaatgcagtcattgtagctaagtctcctgatgctgcaaagagggcccagtcctatgcggagagactgcgtctgggtttggccgtcattcacggggaagctcagtgcacggaactggacatggacgatggtcgtcactccccgcctatggtcaaaaatgctactgtgcacccaggcctggagttgccattgatgatggccaaagagaagccaccgataactgtagttggagatgttggaggccgcatcgcaatcatcgtggatgacattattgacgatgtggagagttttgttgctgccgcggagatcctgaaagagagaggcgcctataagatctatgttatggccacccacggcatcctgtctgcagaggcccctcgcctgattgaggagtcctccgtagacgaggtggtggtgacgaatactgtccctcatgaggttcagaagctgcaatgtcccaagataaagactgtggatatcagtttgattctttctgaagccattcggagaatccacaatggagagtccatggcctaccttttccgaaacatcactgtggatgactagctttcacgagggtctcgaccctggacctcctgagggaaacatggaaaaagcagtgccatgagtgatacagtgtttccttgcaagggaggactcgaaacagcctggagttagatatcttcttttgcccggattgatggggaggagggattaaaagagtcaggaagaagacagagctaatggataaatatcataacatggccttacatgtctgctgtcatcagccctgttccttaaaagttctagctgctttcttaaaaataatctgaaaatcttattgatactaaagaggagttaaaggcacataaagtcttaactctataatgttcatttagttgtttcagctccagggaaatggaggtattgatgttgaacctggttagggaagctgagcgcctgtggccctattactatccagttggcctctcccaaatcaacttcaagtcttttatagagaatcgtatttttctttcagaaattgttatgcctacagccattgaaaaatgaagcattcatgttgttacatcttccaaggatgtcagattagaaaatagcatcccacctctgggtatctgagtggctctgaagttgcaaataaaataatttgttgtc

SEQ ID NO: 131756 - DNA, 1158 bp, Artificial Sequence
  derived and/or modified sequence
atgcccaaaaagctgcttcttctgcccccaccatcagccagctctgcgttcagagtgcctagagccaggccagttccgccacctgcgatgaacgccgcaaggacggggtaccgcgttttctccgcaaattctacagcagcctgcactgagttggctaagaggattacagagcgtttgggcgcagagctggggaaaagcgtcgtgtaccaggaaaccaatggcgaaacgcgcgttgaaattaaagaaagcgtcaggggccaagacatcttcatcattcagacaatacctagagacgtgaataccgctgtgatggaactgctgatcatggcatacgcactgaagaccgcttgcgctcggaacattatcggcgtgatcccttacttcccatactccaagcagtccaaaatgcgaaaacggggttccattgtgtgtaagcttctggctagcatgttagctaaggccggactgacacacattatcactatggacctgcaccagaaggagatccaaggcttcttctcttttcctgttgataacttgcgcgctagcccctttcttctccagtatatccaggaagaaattcctaactacagaaacgcagtgatagttgcaaaaagccccgacgcagccaagagggcacagtcatacgcagagcgactgagactgggactggccgtgatccacggcgaggctcaatgtactgagctggacatggacgatggtcgtcattccccacctatggtcaaaaatgctacagtccacccaggactggaactaccgctgatgatggccaaagagaagcctcctatcactgtagtgggggatgtagggggaagaattgcgattattgtggatgacattatcgatgatgtggagtcctttgtagcggcagccgaaatacttaaggaacgcggagcatacaaaatctacgtcatggctacccacggaatcttgagcgcagaggcgcctcgactgatcgaagagagctcagtggatgaggtggtggtgactaacaccgtgcctcatgaagtccaaaaactgcagtgtcccaagatcaagactgtggatatttctctaattcttagcgaagcaatcaggagaatccataatggggaatccatggcatatctcttccggaacattaccgtggacgattag

SEQ ID NO: 131757 - DNA, 1158 bp, Artificial Sequence
  derived and/or modified sequence
atgcccaagaagctgctgctgctgcccccccccagcgccagcagcgccttcagagtgcccagagccagacccgtgcccccccccgccatgaacgccgccagaaccggctacagagtgttcagcgccaacagcaccgccgcctgcaccgagctggccaagagaatcaccgagagactgggcgccgagctgggcaagagcgtggtgtaccaggagaccaacggcgagaccagagtggagatcaaggagagcgtgagaggccaggacatcttcatcatccagaccatccccagagacgtgaacaccgccgtgatggagctgctgatcatggcctacgccctgaagaccgcctgcgccagaaacatcatcggcgtgatcccctacttcccctacagcaagcagagcaagatgagaaagagaggcagcatcgtgtgcaagctgctggccagcatgctggccaaggccggcctgacccacatcatcaccatggacctgcaccagaaggagatccagggcttcttcagcttccccgtggacaacctgagagccagccccttcctgctgcagtacatccaggaggagatccccaactacagaaacgccgtgatcgtggccaagagccccgacgccgccaagagagcccagagctacgccgagagactgagactgggcctggccgtgatccacggcgaggcccagtgcaccgagctggacatggacgacggcagacacagcccccccatggtgaagaacgccaccgtgcaccccggcctggagctgcccctgatgatggccaaggagaagccccccatcaccgtggtgggcgacgtgggcggcagaatcgccatcatcgtggacgacatcatcgacgacgtggagagcttcgtggccgccgccgagatcctgaaggagagaggcgcctacaagatctacgtgatggccacccacggcatcctgagcgccgaggcccccagactgatcgaggagagcagcgtggacgaggtggtggtgaccaacaccgtgccccacgaggtgcagaagctgcagtgccccaagatcaagaccgtggacatcagcctgatcctgagcgaggccatcagaagaatccacaacggcgagagcatggcctacctgttcagaaacatcaccgtggacgactag

SEQ ID NO: 131758 - protein, 196 aa, Artificial Sequence
  derived and/or modified sequence
MDDTLFQLKFTAKQLEKLAKKAEKDSKAEQAKVKKALLQKNVECARVYAENAIRKKNEGVNWLRMASRVDAVASKVQTAVTMKGVTKNMAQVTKALDKALSTMDLQKVSSVMDRFEQQVQNLDVHTSVMEDSMSSATTLTTPQEQVDSLIMQIAEENGLEVLDQLSQLPEGASAVGESSVRSQEDQLSRRLAALRN

SEQ ID NO: 131759 - DNA, 591 bp, Artificial Sequence
  derived and/or modified sequence
atggacgatacactcttccagctcaagtttacggccaagcagctagagaagttagccaagaaggcggaaaaggacagcaaggcagagcaggccaaagtgaagaaggcgttgctgcagaaaaatgtcgaatgtgccagggtttatgcagagaatgccataagaaaaaaaaacgagggggtcaactggctaagaatggcgtcaagagtggatgccgttgcttctaaagtgcagacagctgtgactatgaaaggagtcacgaagaatatggctcaggtaacaaaggctctagataaagcgttaagtaccatggacttgcaaaaggtctcaagcgttatggatcgcttcgagcagcaggtgcagaatctggatgtgcacacttcagtcatggaggatagcatgagtagcgctacaactcttacaacaccccaggaacaggtggatagcctgatcatgcagattgccgaggagaatggactggaggttctcgatcagctgtctcagctgccagaaggcgcatcagctgtgggcgaatccagcgtacgcagccaggaagaccagttgagccgacgcctggctgcactgaggaactag

SEQ ID NO: 131760 - DNA, 591 bp, Artificial Sequence
  derived and/or modified sequence
atggatgacaccctcttccagctgaagttcaccgccaagcagctggagaagctggccaagaaggccgagaaggacagcaaggccgagcaggccaaggtgaagaaggccctgctgcagaagaatgtggagtgtgcccgggtgtatgcagaaaatgccatcaggaagaagaatgaaggagtgaactggctgaggatggccagccgggtggatgctgtggccagcaaggtgcagacagctgtgaccatgaagggcgtgaccaagaacatggcccaggtgaccaaggccctggacaaggccctgagcaccatggacctgcagaaggtgtcctctgtgatggacagatttgagcagcaggtgcagaacctggatgtgcacacctctgtgatggaggacagcatgagcagcgccaccaccctgaccaccccccaggagcaggtggacagcctcatcatgcagattgctgaggagaatggcctggaggtgctggaccagctgagccagctgcctgagggcgccagcgctgtgggggagagctctgtgcgcagccaggaggaccagctgagccggcggctggccgccctgagaaattag

SEQ ID NO: 131761 - DNA, 591 bp, Artificial Sequence
  derived and/or modified sequence
atggacgacaccctgttccagctgaagttcaccgccaagcagctggagaaactggccaagaaagctgagaaggatagtaaagccgaacaggctaaggtgaaaaaagcacttctccagaagaatgttgagtgcgctcgcgtctacgcagagaatgcaataagaaagaagaatgaaggagtgaattggcttcgcatggcctctcgggtagatgccgtggccagcaaggtgcagacagctgtcaccatgaagggagtgacgaaaaacatggctcaggtgaccaaggctctggataaagctctgagcactatggatttgcagaaggtgtcctcagttatggatcggttcgaacagcaggttcagaatctcgacgtgcacacatctgttatggaggactccatgagcagcgcaacaacactcacaacaccacaggaacaggtcgattcactgataatgcaaattgccgaggagaacgggctggaggtgctcgatcaactcagtcaattacctgaaggcgcatctgccgtgggagagtctagtgtgcggtctcaggaagaccagctctctcggaggctggcagccctaagaaactag

SEQ ID NO: 131762 - DNA, 591 bp, Artificial Sequence
  derived and/or modified sequence
atggacgataccctgtttcaactgaaattcaccgctaaacaattggaaaaactggcgaagaaggccgagaaagattccaaggcagagcaggctaaagtgaagaaggctctactgcagaagaacgtagaatgcgccagagtctacgctgaaaacgcaattaggaagaagaacgagggtgtcaattggctcaggatggcctctcgcgtcgatgctgtggctagcaaggtgcaaacagccgtgacgatgaaaggcgtcaccaagaatatggctcaggtgaccaaggcactggacaaagccttatctaccatggatttgcaaaaagtatccagcgtcatggatagatttgagcagcaggttcaaaatctggacgtgcataccagcgtgatggaagacagtatgtcctccgctactaccctcactaccccacaggagcaggtagacagcctgatcatgcagatcgctgaggagaacgggctggaggtccttgatcagttgagtcaacttcccgaaggagcctctgccgttggtgaaagttctgtcagatcgcaggaagaccagttgtccagacggctcgccgcattgcgaaattag

SEQ ID NO: 131763 - DNA, 591 bp, Artificial Sequence
  derived and/or modified sequence
atggacgacaccctgttccagctgaagttcaccgccaagcagctggagaagctggccaagaaggccgagaaggacagcaaggccgagcaggccaaggtgaagaaggccctgctgcagaagaacgtggagtgcgccagagtgtacgccgagaacgccatcagaaagaagaacgagggcgtgaactggctgagaatggccagcagagtggacgccgtggccagcaaggtgcagaccgccgtgaccatgaagggcgtgaccaagaacatggcccaggtgaccaaggccctggacaaggccctgagcaccatggacctgcagaaggtgagcagcgtgatggacagattcgagcagcaggtgcagaacctggacgtgcacaccagcgtgatggaggacagcatgagcagcgccaccaccctgaccaccccccaggagcaggtggacagcctgatcatgcagatcgccgaggagaacggcctggaggtgctggaccagctgagccagctgcccgagggcgccagcgccgtgggcgagagcagcgtgagaagccaggaggaccagctgagcagaagactggccgccctgagaaactag

SEQ ID NO: 131764 - DNA, 744 bp, Artificial Sequence
  derived and/or modified sequence
atgaacccacttctcatactaacatttgtcgcagccgccctagcggctccattcgatgatgatgacaaaatcgtcggaggttataattgcgaagaaaacagcgtgccataccaagtgagccttaattcgggatatcacttctgtgggggatctctcattaatgagcagtgggtggtgtccgccggccactgctacaaaagccgcattcaggtgcgcctgggcgagcataacattgaagtactcgaggggaatgaacagttcatcaacgctgctaaaataataagacatccacagtatgatcgcaagacgctgaataatgacatcatgcttatcaaactgtctagcagagctgttattaacgccagggtgagtactatttccctgcctaccgctccaccggcaacaggaactaagtgcctgattagcggctggggtaacaccgcctcctccggggcagactaccctgatgagctccagtgtttggacgcaccagtgctctcccaggcgaagtgtgaggcctcatatccaggaaagatcactagtaatatgttctgcgtcggcttccttgaggggggtaaagatagctgccaaggggactcagggggacccgtagtgtgcaacgggcaactccagggcgtggtgtcctggggagatggctgtgctcagaaaaacaagcctggggtttacaccaaagtgtacaattatgtgaaatggattaaaaacacgatcgccgccaacagctag

SEQ ID NO: 131765 - DNA, 714 bp, Artificial Sequence
  derived and/or modified sequence
atgaaccccctgttgattctcacctttgtcgcagctgcgttggccgcgccatttgatgatgatgacaagatcgtgggggggtacaattgtgaagaaaattcagtgccttaccaggtatccctgaatagtgggtaccatttctgtggggggagcctgataaatgaacagtgggttgtgtccgccgggcactgctacaaaagcaggatccaggttagattgggcgaacataacatcaacgctgctaaaataatccgtcacccgcagtacgacaggaagacattgaacaacgacataatgctcatcaaactctcgagcagggctgtgatcaatgcgagagtgagtaccattagcttgcctactgcccctcctgcaaccggaacaaaatgcctaatcagcggctggggaaacaccgctagcagtggtgccgactacccggacgagctacagtgtctcgacgcacctgtcctttctcaggcaaagtgcgaagcctcttatccaggcaagatcaccagtaatatgttctgtgtgggatttctggaaggtgggaaggacagctgtcagggcgattctggaggtcccgtggtatgcaacggacagctccagggagtcgtgagctggggcgacgggtgcgctcagaagaacaaaccgggagtctacacaaaagtttacaactatgtcaagtggattaagaacacaatcgctgccaactcctag

SEQ ID NO: 131766 - DNA, 744 bp, Artificial Sequence
  derived and/or modified sequence
atgaaccccctgctgatcctgacctttgtggccgccgccctggccgccccctttgatgatgatgacaagatcgtgggcggctacaactgtgaggagaacagcgtgccctaccaggtgtccctgaacagcggctaccacttctgtggcggcagcctcatcaatgagcagtgggtggtgtctgctggccactgctacaagagccgcatccaggtgcggctgggggagcacaacatcgaggtgctggagggcaatgagcagttcatcaatgctgccaagatcatccgccacccccagtatgacaggaagaccctgaacaatgacatcatgctgatcaagctgagcagcagagctgtgatcaatgcccgggtgtccaccatcagcctgcccacagcccccccagccaccggcaccaagtgcctgatcagcggctggggcaacacagccagcagcggggctgactacccagatgagctgcagtgcctggatgcccctgtgctgagccaggccaagtgtgaggccagctacccaggcaagatcaccagcaacatgttctgtgtgggcttcctggagggcggcaaggacagctgccagggcgacagcggcggccctgtggtgtgcaatggccagctgcagggcgtggtgtcctggggagatggctgtgcccagaagaacaagccaggagtgtacaccaaggtgtacaactacgtgaagtggatcaagaacaccatcgccgccaacagctag

SEQ ID NO: 131767 - DNA, 714 bp, Artificial Sequence
  derived and/or modified sequence
atgaaccccctgctgatcctgacctttgtggccgccgccctggccgccccctttgatgatgatgacaagatcgtgggcggctacaactgtgaggagaacagcgtgccctaccaggtgtccctgaacagcggctaccacttctgtggcggcagcctcatcaatgagcagtgggtggtgtctgctggccactgctacaagagccgcatccaggtgcggctgggggagcacaacatcaatgctgccaagatcatccgccacccccagtatgacaggaagaccctgaacaatgacatcatgctgatcaagctgagcagcagagctgtgatcaatgcccgggtgtccaccatcagcctgcccacagcccccccagccaccggcaccaagtgcctgatcagcggctggggcaacacagccagcagcggggctgactacccagatgagctgcagtgcctggatgcccctgtgctgagccaggccaagtgtgaggccagctacccaggcaagatcaccagcaacatgttctgtgtgggcttcctggagggcggcaaggacagctgccagggcgacagcggcggccctgtggtgtgcaatggccagctgcagggcgtggtgtcctggggagatggctgtgcccagaagaacaagccaggagtgtacaccaaggtgtacaactacgtgaagtggatcaagaacaccatcgccgccaacagctag

SEQ ID NO: 131768 - DNA, 744 bp, Artificial Sequence
  derived and/or modified sequence
atgaaccccctgctgatcctgaccttcgtggccgccgccctggccgctccattcgacgacgacgacaagatagttggcggctataattgtgaagaaaactccgtgccttaccaggtttcattgaactcgggctaccatttctgcgggggtagcctgatcaacgagcagtgggtggtgagcgctggtcattgctataaaagcagaatccaggtgcgcctcggcgaacacaatatcgaggttctggagggaaatgagcagtttatcaatgctgctaaaattataaggcacccacaatacgaccgtaaaacactgaacaatgatatcatgctgatcaaactgtcgtcacgggccgtgatcaatgctagagtttccacaatctccctgcccaccgctccccccgcaaccgggacaaaatgcctgatttccggttggggtaatacagctagctctggcgcagattatccggacgagctacagtgtctggacgcccccgtgctgtctcaggcaaaatgcgaagcctcgtacccgggaaagatcaccagtaacatgttttgtgtaggcttcctagaggggggaaaggacagctgtcagggcgattcaggaggacctgtagtgtgcaatggacagcttcagggcgttgtgtcttggggggacgggtgcgctcagaagaacaaacctggcgtatatacgaaggtctataattatgtgaagtggattaagaatactattgccgctaattcttag

SEQ ID NO: 131769 - DNA, 714 bp, Artificial Sequence
  derived and/or modified sequence
atgaaccccctgctgatcctgaccttcgtggccgccgccctggccgcaccatttgatgatgatgataagatcgtaggcgggtacaactgcgaggagaattccgtaccataccaggtgagcctgaattctggctatcatttttgtggtgggtccttgatcaacgaacagtgggttgtcagcgccgggcactgctacaaatctagaattcaggtgcgtttaggcgagcacaacattaatgcggcaaagatcattagacaccctcaatacgacaggaagaccctgaataatgacatcatgctgataaagctgtctagcagagcagttattaacgctcgggtgagcactatctcccttcccaccgctccacctgccactggaacaaaatgcttaatcagcggctggggaaatactgccagctccggggccgactatccggatgagttacagtgtctcgacgctcccgttctcagccaggccaagtgtgaagcatcctaccctggaaagattaccagtaacatgttctgtgtcggcttcttggagggaggtaaagattcctgtcagggggactctggtggcccagttgtatgcaatggacagctgcagggtgttgtgagctggggtgacggatgtgcccagaagaacaaaccaggggtttatactaaggtgtacaattatgttaaatggattaagaacaccatcgccgccaattcatag

SEQ ID NO: 131770 - DNA, 744 bp, Artificial Sequence
  derived and/or modified sequence
atgaacccattgcttattctcacgttcgttgcggctgctttggcagcacctttcgacgacgatgataagatcgtaggcggatacaactgtgaagaaaattcagtgccgtaccaggtgagtttgaactcaggttatcacttttgcggcggatctcttatcaacgagcagtgggtggtgagcgcaggccattgttacaagtcccgtatacaagtcaggctgggtgaacataatatcgaagtgcttgagggcaacgaacaattcattaatgcagcaaagatcatacggcatccacagtacgatcgaaaaactcttaataacgacattatgctcataaaactgagttccagagccgtgattaatgcccgagtgagcaccatttcactgcccactgcccctcccgcaacgggaaccaagtgcctgatttccggctgggggaacactgcatcttcgggggctgactaccccgacgagcttcagtgcctagacgcccctgtgttaagtcaggccaaatgcgaagccagctaccctggcaagatcacatctaacatgttctgcgtgggatttttagaaggcggaaaggactcctgtcagggcgacagtggcggtcctgttgtgtgcaacgggcagctacagggtgtcgtttcctggggagatggttgtgctcagaaaaataagccaggcgtctataccaaagtctacaactacgttaagtggataaagaataccatcgcagcgaattcttag

SEQ ID NO: 131771 - DNA, 714 bp, Artificial Sequence
  derived and/or modified sequence
atgaatccgctcctaatcttaaccttcgttgcggctgccctggccgcacccttcgatgatgatgacaaaatcgtggggggatataactgtgaagagaactccgttccttatcaagtcagcctgaacagcgggtatcacttctgtggcggaagcctgattaacgaacaatgggtcgtgtctgcaggccactgttacaagtcacggatccaggtgaggctgggcgaacacaacattaacgccgcaaagatcatcagacacccccaatatgacaggaaaacactgaacaatgacatcatgctcatcaaactctccagccgtgccgttatcaacgcgcgagtatccacaattagcttgccaacagcgccaccggctactggaacaaaatgcctgatatctggttgggggaacacagctagctctggtgctgattatcctgacgagctccaatgcctggacgcccctgttctgagccaggccaagtgcgaggcttcctaccctggcaagatcacttctaacatgttctgcgtgggatttcttgagggcggaaaggacagctgccaaggggatagcggaggcccagtcgtgtgcaacgggcagctgcagggagtcgtgtcttggggcgacggttgcgcccaaaagaacaaaccaggagtgtatactaaggtgtataactatgtcaaatggattaagaacacaatcgccgctaattcctag

SEQ ID NO: 131772 - DNA, 800 bp, Artificial Sequence
  derived and/or modified sequence
accaccatgaatccactcctgatccttacctttgtggcagctgctcttgctgccccctttgatgatgatgacaagatcgttgggggctacaactgtgaggagaattctgtcccctaccaggtgtccctgaattctggctaccacttctgtggtggctccctcatcaacgaacagtgggtggtatcagcaggccactgctacaagtcccgcatccaggtgagactgggagagcacaacatcgaagtcctggaggggaatgagcagttcatcaatgcagccaagatcatccgccacccccaatacgacaggaagactctgaacaatgacatcatgttaatcaagctctcctcacgtgcagtaatcaacgcccgcgtgtccaccatctctctgcccaccgcccctccagccactggcacgaagtgcctcatctctggctggggcaacactgcgagctctggcgccgactacccagacgagctgcagtgcctggatgctcctgtgctgagccaggctaagtgtgaagcctcctaccctggaaagattaccagcaacatgttctgtgtgggcttccttgagggaggcaaggattcatgtcagggtgattctggtggccctgtggtctgcaatggacagctccaaggagttgtctcctggggtgatggctgtgcccagaagaacaagcctggagtctacaccaaggtctacaactatgtgaaatggattaagaacaccatagctgccaatagctaaagcccccagtatctcttcagtctctataccaataaagtgaccctgttctc

SEQ ID NO: 131773 - DNA, 714 bp, Artificial Sequence
  derived and/or modified sequence
atgaatccactcctgatccttacctttgtggcagctgctcttgctgccccctttgatgatgatgacaagatcgttgggggctacaactgtgaggagaattctgtcccctaccaggtgtccctgaattctggctaccacttctgtggtggctccctcatcaacgaacagtgggtggtatcagcaggccactgctacaagtcccgcatccaggtgagactgggagagcacaacatcaatgcagccaagatcatccgccacccccaatacgacaggaagactctgaacaatgacatcatgttaatcaagctctcctcacgtgcagtaatcaacgcccgcgtgtccaccatctctctgcccaccgcccctccagccactggcacgaagtgcctcatctctggctggggcaacactgcgagctctggcgccgactacccagacgagctgcagtgcctggatgctcctgtgctgagccaggctaagtgtgaagcctcctaccctggaaagattaccagcaacatgttctgtgtgggcttccttgagggaggcaaggattcatgtcagggtgattctggtggccctgtggtctgcaatggacagctccaaggagttgtctcctggggtgatggctgtgcccagaagaacaagcctggagtctacaccaaggtctacaactatgtgaaatggattaagaacaccatagctgccaatagctaa

SEQ ID NO: 131774 - DNA, 744 bp, Artificial Sequence
  derived and/or modified sequence
atgaaccccctgctgatcctgaccttcgtggccgccgccctggccgcccccttcgacgacgacgacaagatcgtgggcggctacaactgcgaggagaacagcgtgccctaccaggtgagcctgaacagcggctaccacttctgcggcggcagcctgatcaacgagcagtgggtggtgagcgccggccactgctacaagagcagaatccaggtgagactgggcgagcacaacatcgaggtgctggagggcaacgagcagttcatcaacgccgccaagatcatcagacacccccagtacgacagaaagaccctgaacaacgacatcatgctgatcaagctgagcagcagagccgtgatcaacgccagagtgagcaccatcagcctgcccaccgccccccccgccaccggcaccaagtgcctgatcagcggctggggcaacaccgccagcagcggcgccgactaccccgacgagctgcagtgcctggacgcccccgtgctgagccaggccaagtgcgaggccagctaccccggcaagatcaccagcaacatgttctgcgtgggcttcctggagggcggcaaggacagctgccagggcgacagcggcggccccgtggtgtgcaacggccagctgcagggcgtggtgagctggggcgacggctgcgcccagaagaacaagcccggcgtgtacaccaaggtgtacaactacgtgaagtggatcaagaacaccatcgccgccaacagctag

SEQ ID NO: 131775 - DNA, 714 bp, Artificial Sequence
  derived and/or modified sequence
atgaaccccctgctgatcctgaccttcgtggccgccgccctggccgcccccttcgacgacgacgacaagatcgtgggcggctacaactgcgaggagaacagcgtgccctaccaggtgagcctgaacagcggctaccacttctgcggcggcagcctgatcaacgagcagtgggtggtgagcgccggccactgctacaagagcagaatccaggtgagactgggcgagcacaacatcaacgccgccaagatcatcagacacccccagtacgacagaaagaccctgaacaacgacatcatgctgatcaagctgagcagcagagccgtgatcaacgccagagtgagcaccatcagcctgcccaccgccccccccgccaccggcaccaagtgcctgatcagcggctggggcaacaccgccagcagcggcgccgactaccccgacgagctgcagtgcctggacgcccccgtgctgagccaggccaagtgcgaggccagctaccccggcaagatcaccagcaacatgttctgcgtgggcttcctggagggcggcaaggacagctgccagggcgacagcggcggccccgtggtgtgcaacggccagctgcagggcgtggtgagctggggcgacggctgcgcccagaagaacaagcccggcgtgtacaccaaggtgtacaactacgtgaagtggatcaagaacaccatcgccgccaacagctag

SEQ ID NO: 131776 - protein, 247 aa, Artificial Sequence
  derived and/or modified sequence
MNLLLILTFVAAAVAAPFDDDDKIVGGYICEENSVPYQVSLNSGYHFCGGSLISEQWVVSAGHCYKSRIQVRLGEHNIEVLEGNEQFINAAKIIRHPKYNSRTLDNDILLIKLSSPAVINSRVSAISLPTAPPAAGTESLISGWGNTLSSGADYPDELQCLDAPVLSQAECEASYPGKITNNMFCVGFLEGGKDSCQGDSGGPVVSNGELQGIVSWGYGCAQKNRPGVYTKVYNYVDWIKDTIAANS

SEQ ID NO: 131777 - DNA, 744 bp, Artificial Sequence
  derived and/or modified sequence
atgaacctgctgctgatcctgaccttcgtggccgccgccgtggccgcccccttcgacgacgacgacaagatcgtgggcggctacatctgcgaggagaacagcgtgccctaccaggtgagcctgaacagcggctaccacttctgcggcggcagcctgatcagcgagcagtgggtggtgagcgccggccactgctacaagagcagaatccaggtgagactgggcgagcacaacatcgaggtgctggagggcaacgagcagttcatcaacgccgccaagatcatcagacaccccaagtacaacagcagaaccctggacaacgacatcctgctgatcaagctgagcagccccgccgtgatcaacagcagagtgagcgccatcagcctgcccaccgccccccccgccgccggcaccgagagcctgatcagcggctggggcaacaccctgagcagcggcgccgactaccccgacgagctgcagtgcctggacgcccccgtgctgagccaggccgagtgcgaggccagctaccccggcaagatcaccaacaacatgttctgcgtgggcttcctggagggcggcaaggacagctgccagggcgacagcggcggccccgtggtgagcaacggcgagctgcagggcatcgtgagctggggctacggctgcgcccagaagaacagacccggcgtgtacaccaaggtgtacaactacgtggactggatcaaggacaccatcgccgccaacagctag

SEQ ID NO: 131778 - DNA, 744 bp, Artificial Sequence
  derived and/or modified sequence
atgaatctgctcctgatcctgacctttgttgctgctgcagtggccgcccccttcgatgacgacgataagatcgtgggaggatacatctgcgaggaaaattcagtgccatatcaggtgagtctgaactccggctaccacttctgcggtggcagtctcatctcagaacaatgggttgtgagcgccggccattgctacaaaagtcggatacaggtgaggctgggcgaacataacatcgaagtactggagggtaatgagcagttcatcaacgcagcaaaaattatacgccaccctaagtacaattctaggactctggacaacgatattttgctgattaaactcagcagcccagctgtgattaactcaagagtgagcgctatatcactgcccacggctcccccagccgcgggcacagagtctcttatctcagggtgggggaacaccctgtcatcgggagccgattaccccgatgagttacagtgcctagacgcacccgttttgagccaggctgagtgtgaggcctcttatcctggcaaaatcaccaataatatgttctgtgtcgggttcctggagggcgggaaagactcatgccagggagacagtggagggcctgtcgtttccaatggggaacttcagggcatagtatcgtggggctatggttgtgctcagaagaatagacctggcgtttacacgaaggtctacaattatgtggactggatcaaagacactattgccgctaattcctag

SEQ ID NO: 131779 - DNA, 744 bp, Artificial Sequence
  derived and/or modified sequence
atgaacctgctgctgatcctgacctttgtggccgctgctgtggccgccccctttgatgatgatgacaagatcgtgggcggctacatctgtgaggagaacagcgtgccctaccaggtgtccctgaacagcggctaccacttctgtggcggcagcctcatcagcgagcagtgggtggtgtctgctggccactgctacaagagccgcatccaggtgcggctgggggagcacaacatcgaggtgctggagggcaatgagcagttcatcaatgctgccaagatcatccgccaccccaagtacaacagcaggaccctggacaatgacatcctgctgatcaagctgagcagccctgctgtgatcaacagccgggtgtctgccatcagcctgcccacagcccccccagctgctggaacagagagcctcatcagcggctggggcaacaccctgagcagcggggctgactacccagatgagctgcagtgcctggatgcccctgtgctgagccaggccgagtgtgaggccagctacccaggcaagatcaccaacaacatgttctgtgtgggcttcctggagggcggcaaggacagctgccagggcgacagcggcggccctgtggtgtccaatggagagctgcagggcatcgtgtcctggggctacggctgtgcccagaagaacagacctggggtgtacaccaaggtgtacaactacgtggactggatcaaggacaccatcgccgccaacagctag

SEQ ID NO: 131780 - DNA, 744 bp, Artificial Sequence
  derived and/or modified sequence
atgaacctgctgctgatcctgaccttcgtggccgccgccgtggccgcacccttcgatgacgatgacaaaatcgtgggaggctacatctgtgaggaaaattcagtgccctatcaagtgtctttgaacagtgggtaccatttctgtggaggatctctgatttcggaacagtgggtggtatccgcggggcactgctataagtcaagaatccaggtgcggcttggtgagcataatatagaagtcctggaaggcaacgagcagtttataaatgcagccaaaatcattcggcatcccaagtataactcacgcaccctcgataacgacattttgctgatcaaactatcgtctcccgccgtaattaattcgcgcgttagcgccatatccctcccaacagcccctccggccgctggtacagaatccctgattagtggctgggggaataccttgtcaagcggagccgactacccggatgaattgcaatgtctggacgcccccgtcctctctcaggcagaatgcgaggcatcataccccggaaagattacgaacaacatgttctgtgtgggttttttggaagggggcaaagattcttgccagggtgatagcggcggaccggtcgtttccaacggcgagctccaggggattgttagctggggctatggatgcgcgcagaaaaatcggccaggcgtgtatacaaaggtttataactacgtggactggattaaagacaccattgcagcaaacagttag

SEQ ID NO: 131781 - DNA, 744 bp, Artificial Sequence
  derived and/or modified sequence
atgaatctgctgcttattctcaccttcgtggccgcagcagttgcggctccatttgacgacgacgataagatcgtaggtggctacatttgcgaggaaaatagtgtgccctatcaggtgagtctgaattctgggtaccatttctgcggcggatcgctgatatcagagcagtgggtggtgtctgccggacattgttacaagtcccgaatccaggtgagacttggagagcataacatcgaggtgttagaagggaatgaacagtttatcaacgcggcaaagataatccggcaccctaaatataactctcgcactctcgataatgacattctgctgataaagctgtctagccctgcagtcatcaactcacgcgtgtctgccatcagcttgcctaccgcccctccagcagcagggacggagtccttgatcagtggctggggcaatacactgtcttcaggtgctgattaccccgacgaattgcagtgcctggacgccccagtactgtcgcaggccgaatgtgaggcatcctatcccggaaagatcaccaacaatatgttctgcgtgggtttcctggagggcggaaaggattcttgtcagggggactccggaggaccagtggttagcaatggcgagctccaaggaatagtctcttggggctacggatgcgcgcaaaaaaataggccgggtgtctataccaaggtgtataactatgtggattggataaaggacaccatcgcggctaatagttag

SEQ ID NO: 131782 - DNA, 812 bp, Artificial Sequence
  derived and/or modified sequence
aggcacactctaccaccatgaatctacttctgatccttacctttgttgcagctgctgttgctgccccctttgatgatgatgacaagatcgttgggggctacatctgtgaggagaattctgtcccctaccaggtgtccttgaattctggctaccacttctgcggtggctccctcatcagcgaacagtgggtggtgtcagcaggtcactgctacaagtcccgcatccaggtgagactgggagagcacaacatcgaagtcctggaggggaatgaacagttcatcaatgcagccaagatcatccgccaccccaaatacaacagccggactctggacaatgacatcctgctgatcaagctctcctcacctgccgtcatcaattcccgcgtgtccgccatctctctgcccactgcccctccagctgctggcaccgagtccctcatctccggctggggcaacactctgagttctggtgccgactacccagacgagctgcagtgcctggatgctcctgtgctgagccaggctgagtgtgaagcctcctaccctggaaagattaccaacaacatgttctgtgtgggcttcctcgagggaggcaaggattcctgccagggtgattctggtggccctgtggtctccaatggagagctccaaggaattgtctcctggggctatggctgtgcccagaagaacaggcctggagtctacaccaaggtctacaactatgtggactggattaaggacaccatagctgccaacagctaaagcccctggtccctctgcagtctctataccaataaagtgaccctgctctca

SEQ ID NO: 131783 - protein, 247 aa, Artificial Sequence
  derived and/or modified sequence
MNPFLILAFVGAAVAVPFDDDDKIVGGYTCEENSLPYQVSLNSGSHFCGGSLISEQWVVSAAHCYKTRIQVRLGEHNIKVLEGNEQFINAAKIIRHPKYNRDTLDNDIMLIKLSSPAVINARVSTISLPTTPPAAGTECLISGWGNTLSFGADYPDELKCLDAPVLTQAECKASYPGKITNSMFCVGFLEGGKDSCQRDSGGPVVCNGQLQGVVSWGHGCAWKNRPGVYTKVYNYVDWIKDTIAANS

SEQ ID NO: 131784 - DNA, 744 bp, Artificial Sequence
  derived and/or modified sequence
atgaatccttttttaatactcgcatttgttggtgccgcggtcgccgtgccgtttgacgacgatgacaagattgtgggtggttacacctgcgaggagaactctctcccctatcaggtctccctgaattcaggtagtcatttctgcggaggatcattgatatcggaacaatgggtggtgtctgctgcacattgttacaaaacccggattcaagtccggctaggggaacacaatatcaaggtgctcgaaggaaacgagcagttcattaacgccgccaagattatccgacacccaaagtataatcgagatactctcgataacgatatcatgttgatcaaattaagctcccctgctgttatcaacgccagagtgtccactatcagcctgcccaccacccctcccgccgcaggcaccgagtgtctgatctcaggctggggtaataccctcagtttcggagccgactaccccgacgaattgaaatgcctggatgcccccgtcttgacacaggccgaatgcaaggcatcttatccaggcaaaatcaccaattccatgttttgcgttggctttttggagggcggtaaggatagttgtcagagagactcagggggaccagtggtctgcaatggtcaactgcaaggggtggtgtcttggggtcatgggtgcgcctggaaaaatcggcccggggtatacacaaaagtgtataactacgtcgactggattaaggataccatcgcagccaacagctag

SEQ ID NO: 131785 - DNA, 744 bp, Artificial Sequence
  derived and/or modified sequence
atgaaccccttcctgatcctggcctttgtgggcgctgctgtggccgtgccctttgatgatgatgacaagatcgtgggcggctacacctgtgaggagaacagcctgccctaccaggtgtccctgaacagcggcagccacttctgtggcggcagcctcatcagcgagcagtgggtggtgtctgctgcccactgctacaagacccgcatccaggtgcggctgggggagcacaacatcaaggtgctggagggcaatgagcagttcatcaatgctgccaagatcatccgccaccccaagtacaacagagacaccctggacaatgacatcatgctgatcaagctgagcagccctgctgtgatcaatgcccgggtgtccaccatcagcctgcccaccaccccacctgctgctggaacagagtgcctgatcagcggctggggcaacaccctgagctttggagctgactacccagatgagctgaagtgcctggatgcccctgtgctgacccaggccgagtgcaaggccagctacccaggcaagatcaccaacagcatgttctgtgtgggcttcctggagggcggcaaggacagctgccagagggacagcggcggccctgtggtgtgcaatggccagctgcagggcgtggtgtcctggggccacggctgtgcctggaagaacagacctggggtgtacaccaaggtgtacaactacgtggactggatcaaggacaccatcgccgccaacagctag

SEQ ID NO: 131786 - DNA, 744 bp, Artificial Sequence
  derived and/or modified sequence
atgaaccccttcctgatcctggccttcgtgggcgccgccgtggccgtcccttttgacgacgatgacaagatcgtagggggctatacttgcgaagagaactctttgccatatcaggtgagcctgaactctggatcccacttctgtgggggctcgctgatatcggagcagtgggtggtgagcgctgcccactgctacaagactaggatacaggtgagactcggggaacataacatcaaagtgctggaagggaacgagcagtttatcaatgccgctaaaattattcgccatccaaagtacaatcgggacacccttgataatgatatcatgttaatcaaattaagctcgccagccgtaataaacgctagggttagcacaatttctttgcctactactcccccagctgcgggtacagaatgcctcatttctggctggggtaacacgctcagcttcggtgccgattacccagacgaacttaaatgtctagacgcccccgtactgacacaggccgagtgcaaggcgagctatccaggcaagattaccaactccatgttctgtgttggttttctcgaaggaggtaaggatagctgtcagagggactctggagggccagttgtgtgcaacgggcagttgcaaggggttgttagctggggccatgggtgtgcttggaagaatcggcctggtgtgtatacaaaagtctataactacgtagactggatcaaggacaccatcgctgctaactcttag

SEQ ID NO: 131787 - DNA, 744 bp, Artificial Sequence
  derived and/or modified sequence
atgaacccttttctgattttggccttcgtcggcgcagcagttgccgtgccattcgacgacgacgataagatcgtaggcggttacacttgcgaggaaaacagtcttccgtaccaagtttccctgaattccggtagccatttttgcgggggttctctgatcagtgaacagtgggtggttagcgctgcccattgctacaaaaccagaattcaggtcagactgggcgagcacaatatcaaggtactggagggaaacgagcagttcataaacgccgctaagatcatacgccaccctaaatataaccgagacacactcgataacgacatcatgcttatcaagctgagtagcccggctgtgatcaacgcccgagttagcacgatctctctgcctactaccccgccagccgcagggactgaatgcctgatttcgggatgggggaacactctctcatttggagccgactacccggatgagctgaagtgcttagacgctcctgtcttgacccaggctgaatgcaaggccagctatcctgggaaaataaccaattccatgttctgcgtgggtttcctagagggtgggaaagattcctgtcagcgggacagtggtgggccagtggtgtgtaatggccagctgcaaggcgtggttagctggggccacggctgtgcctggaagaatcgacccggagtatacaccaaagtctacaactatgtcgattggattaaggacaccatcgcggctaattcatag

SEQ ID NO: 131788 - DNA, 834 bp, Artificial Sequence
  derived and/or modified sequence
gacaggccttccaccaccagtcaggcacactctaccaccatgaatccattcctgatccttgcctttgtgggagctgctgttgctgtcccctttgacgatgatgacaagattgttgggggctacacctgtgaggagaattctctcccctaccaggtgtccctgaattctggctcccacttctgcggtggctccctcatcagcgaacagtgggtggtatcagcagctcactgctacaagacccgcatccaggtgagactgggagagcacaacatcaaagtcctggaggggaatgagcagttcatcaatgcggccaagatcatccgccaccctaaatacaacagggacactctggacaatgacatcatgctgatcaaactctcctcacctgccgtcatcaatgcccgcgtgtccaccatctctctgcccaccacccctccagctgctggcactgagtgcctcatctccggctggggcaacactctgagctttggtgctgactacccagacgagctgaagtgcctggatgctccggtgctgacccaggctgagtgtaaagcctcctaccctggaaagattaccaacagcatgttctgtgtgggcttccttgagggaggcaaggattcctgccagcgtgactctggtggccctgtggtctgcaacggacagctccaaggagttgtctcctggggccatggctgtgcctggaagaacaggcctggagtctacaccaaggtctacaactatgtggactggattaaggacaccatcgctgccaacagctaaagcccccggtccctctgcagtctctataccaataaagtggccctgctctca

SEQ ID NO: 131789 - DNA, 744 bp, Artificial Sequence
  derived and/or modified sequence
atgaaccccttcctgatcctggccttcgtgggcgccgccgtggccgtgcccttcgacgacgacgacaagatcgtgggcggctacacctgcgaggagaacagcctgccctaccaggtgagcctgaacagcggcagccacttctgcggcggcagcctgatcagcgagcagtgggtggtgagcgccgcccactgctacaagaccagaatccaggtgagactgggcgagcacaacatcaaggtgctggagggcaacgagcagttcatcaacgccgccaagatcatcagacaccccaagtacaacagagacaccctggacaacgacatcatgctgatcaagctgagcagccccgccgtgatcaacgccagagtgagcaccatcagcctgcccaccaccccccccgccgccggcaccgagtgcctgatcagcggctggggcaacaccctgagcttcggcgccgactaccccgacgagctgaagtgcctggacgcccccgtgctgacccaggccgagtgcaaggccagctaccccggcaagatcaccaacagcatgttctgcgtgggcttcctggagggcggcaaggacagctgccagagagacagcggcggccccgtggtgtgcaacggccagctgcagggcgtggtgagctggggccacggctgcgcctggaagaacagacccggcgtgtacaccaaggtgtacaactacgtggactggatcaaggacaccatcgccgccaacagctag

SEQ ID NO: 131790 - protein, 1019 aa, Artificial Sequence
  derived and/or modified sequence
MGSKRGISSRHHSLSSYEIMFAALFAILVVLCAGLIAVSCLTIKESQRGAALGQSHEARATFKITSGVTYNPNLQDKLSVDFKVLAFDLQQMIDEIFLSSNLKNEYKNSRVLQFENGSIIVVFDLFFAQWVSDENVKEELIQGLEANKSSQLVTFHIDLNSVDILDKLTTTSHLATPGNVSIECLPGSSPCTDALTCIKADLFCDGEVNCPDGSDEDNKMCATVCDGRFLLTGSSGSFQATHYPKPSETSVVCQWIIRVNQGLSIKLSFDDFNTYYTDILDIYEGVGSSKILRASIWETNPGTIRIFSNQVTATFLIESDESDYVGFNATYTAFNSSELNNYEKINCNFEDGFCFWVQDLNDDNEWERIQGSTFSPFTGPNFDHTFGNASGFYISTPTGPGGRQERVGLLSLPLDPTLEPACLSFWYHMYGENVHKLSINISNDQNMEKTVFQKEGNYGDNWNYGQVTLNETVKFKVAFNAFKNKILSDIALDDISLTYGICNGSLYPEPTLVPTPPPELPTDCGGPFELWEPNTTFSSTNFPNSYPNLAFCVWILNAQKGKNIQLHFQEFDLENINDVVEIRDGEEADSLLLAVYTGPGPVKDVFSTTNRMTVLLITNDVLARGGFKANFTTGYHLGIPEPCKADHFQCKNGECVPLVNLCDGHLHCEDGSDEADCVRFFNGTTNNNGLVRFRIQSIWHTACAENWTTQISNDVCQLLGLGSGNSSKPIFPTDGGPFVKLNTAPDGHLILTPSQQCLQDSLIRLQCNHKSCGKKLAAQDITPKIVGGSNAKEGAWPWVVGLYYGGRLLCGASLVSSDWLVSAAHCVYGRNLEPSKWTAILGLHMKSNLTSPQTVPRLIDEIVINPHYNRRRKDNDIAMMHLEFKVNYTDYIQPICLPEENQVFPPGRNCSIAGWGTVVYQGTTANILQEADVPLLSNERCQQQMPEYNITENMICAGYEEGGIDSCQGDSGGPLMCQENNRWFLAGVTSFGYKCALPNRPGVYARVSRFTEWIQSFLH

SEQ ID NO: 131791 - DNA, 3060 bp, Artificial Sequence
  derived and/or modified sequence
atgggcagcaagagaggcatcagcagcagacaccacagcctgagcagctacgagatcatgttcgccgccctgttcgccatcctggtggtgctgtgcgccggcctgatcgccgtgagctgcctgaccatcaaggagagccagagaggcgccgccctgggccagagccacgaggccagagccaccttcaagatcaccagcggcgtgacctacaaccccaacctgcaggacaagctgagcgtggacttcaaggtgctggccttcgacctgcagcagatgatcgacgagatcttcctgagcagcaacctgaagaacgagtacaagaacagcagagtgctgcagttcgagaacggcagcatcatcgtggtgttcgacctgttcttcgcccagtgggtgagcgacgagaacgtgaaggaggagctgatccagggcctggaggccaacaagagcagccagctggtgaccttccacatcgacctgaacagcgtggacatcctggacaagctgaccaccaccagccacctggccacccccggcaacgtgagcatcgagtgcctgcccggcagcagcccctgcaccgacgccctgacctgcatcaaggccgacctgttctgcgacggcgaggtgaactgccccgacggcagcgacgaggacaacaagatgtgcgccaccgtgtgcgacggcagattcctgctgaccggcagcagcggcagcttccaggccacccactaccccaagcccagcgagaccagcgtggtgtgccagtggatcatcagagtgaaccagggcctgagcatcaagctgagcttcgacgacttcaacacctactacaccgacatcctggacatctacgagggcgtgggcagcagcaagatcctgagagccagcatctgggagaccaaccccggcaccatcagaatcttcagcaaccaggtgaccgccaccttcctgatcgagagcgacgagagcgactacgtgggcttcaacgccacctacaccgccttcaacagcagcgagctgaacaactacgagaagatcaactgcaacttcgaggacggcttctgcttctgggtgcaggacctgaacgacgacaacgagtgggagagaatccagggcagcaccttcagccccttcaccggccccaacttcgaccacaccttcggcaacgccagcggcttctacatcagcacccccaccggccccggcggcagacaggagagagtgggcctgctgagcctgcccctggaccccaccctggagcccgcctgcctgagcttctggtaccacatgtacggcgagaacgtgcacaagctgagcatcaacatcagcaacgaccagaacatggagaagaccgtgttccagaaggagggcaactacggcgacaactggaactacggccaggtgaccctgaacgagaccgtgaagttcaaggtggccttcaacgccttcaagaacaagatcctgagcgacatcgccctggacgacatcagcctgacctacggcatctgcaacggcagcctgtaccccgagcccaccctggtgcccacccccccccccgagctgcccaccgactgcggcggccccttcgagctgtgggagcccaacaccaccttcagcagcaccaacttccccaacagctaccccaacctggccttctgcgtgtggatcctgaacgcccagaagggcaagaacatccagctgcacttccaggagttcgacctggagaacatcaacgacgtggtggagatcagagacggcgaggaggccgacagcctgctgctggccgtgtacaccggccccggccccgtgaaggacgtgttcagcaccaccaacagaatgaccgtgctgctgatcaccaacgacgtgctggccagaggcggcttcaaggccaacttcaccaccggctaccacctgggcatccccgagccctgcaaggccgaccacttccagtgcaagaacggcgagtgcgtgcccctggtgaacctgtgcgacggccacctgcactgcgaggacggcagcgacgaggccgactgcgtgagattcttcaacggcaccaccaacaacaacggcctggtgagattcagaatccagagcatctggcacaccgcctgcgccgagaactggaccacccagatcagcaacgacgtgtgccagctgctgggcctgggcagcggcaacagcagcaagcccatcttccccaccgacggcggccccttcgtgaagctgaacaccgcccccgacggccacctgatcctgacccccagccagcagtgcctgcaggacagcctgatcagactgcagtgcaaccacaagagctgcggcaagaagctggccgcccaggacatcacccccaagatcgtgggcggcagcaacgccaaggagggcgcctggccctgggtggtgggcctgtactacggcggcagactgctgtgcggcgccagcctggtgagcagcgactggctggtgagcgccgcccactgcgtgtacggcagaaacctggagcccagcaagtggaccgccatcctgggcctgcacatgaagagcaacctgaccagcccccagaccgtgcccagactgatcgacgagatcgtgatcaacccccactacaacagaagaagaaaggacaacgacatcgccatgatgcacctggagttcaaggtgaactacaccgactacatccagcccatctgcctgcccgaggagaaccaggtgttcccccccggcagaaactgcagcatcgccggctggggcaccgtggtgtaccagggcaccaccgccaacatcctgcaggaggccgacgtgcccctgctgagcaacgagagatgccagcagcagatgcccgagtacaacatcaccgagaacatgatctgcgccggctacgaggagggcggcatcgacagctgccagggcgacagcggcggccccctgatgtgccaggagaacaacagatggttcctggccggcgtgaccagcttcggctacaagtgcgccctgcccaacagacccggcgtgtacgccagagtgagcagattcaccgagtggatccagagcttcctgcactag

SEQ ID NO: 131792 - DNA, 3060 bp, Artificial Sequence
  derived and/or modified sequence
atgggctccaaacggggtataagtagcagacaccactcgctgagtagctacgaaatcatgttcgctgcccttttcgccatcttagttgtcctgtgtgccggactgattgctgtgagctgcctgacaatcaaggaaagccagcgaggagcagctctgggccagagccacgaagcacgggccaccttcaaaatcacttctggcgttacatataacccaaatctgcaggacaagctgtctgtagattttaaggtgctggccttcgatctccaacagatgatcgatgaaatcttcttgtcttccaaccttaagaacgagtataagaactccagggttctacagttcgaaaatggcagcatcattgtcgtgtttgatctgttttttgctcagtgggtcagcgacgagaatgttaaagaagagttgatccaagggctggaggcaaacaaaagctctcagctcgttaccttccatattgacttgaacagtgtggatattctggataaattgacgactaccagtcatctagccactcctggcaacgtgagcattgaatgtcttcccggctctagcccttgtactgacgcactgacttgcataaaagctgaccttttctgcgacggagaggtaaactgccccgatggcagcgacgaggataacaaaatgtgtgccaccgtgtgcgatggtcgttttctgctgactggatcctctggaagtttccaggctacacattatcccaagccttcagaaacctctgtggtgtgtcaatggattataagagtgaatcaaggcctcagcattaagctctcatttgatgatttcaacacgtattatactgatatcctggacatttatgaaggggtggggtcatcgaaaatcctgcgggcaagtatctgggagacgaatcccggaaccattagaatctttagtaatcaagtaactgcgaccttcctcattgagtctgatgagagtgactacgtaggctttaatgcaacgtataccgcatttaattcttctgagcttaataattacgaaaagattaactgtaattttgaggacgggttctgcttttgggttcaagacttaaatgatgacaatgagtgggagcggattcagggctccaccttcagtccctttaccggacctaacttcgatcacacttttgggaacgcaagtgggttctatataagcactcctactgggcctggcggtagacaggaaagagtggggcttttgtctctaccactggatcctactttagagcctgcgtgcctgagtttttggtaccacatgtatggcgaaaatgtgcataagctgtcgatcaacatcagcaatgaccaaaacatggagaagactgtgttccagaaagagggtaactacggtgataactggaattatggacaagtcactttgaatgagacggtgaaatttaaagtggccttcaatgccttcaaaaacaaaatcctctcggatattgcactggacgatatctccctcacgtacggtatatgtaacggctccctttatcctgagcccactctggtgcctacccccccacctgagctgcccactgactgcggcggtccttttgaactctgggagccaaacactacctttagctcaaccaactttcctaactcctaccctaacttagcattttgcgtgtggattctaaacgcacagaaggggaaaaatatacaactacacttccaggagtttgacctggagaacattaatgatgtggtagaaatcagagatggggaagaggcagatagtcttctactggccgtgtatacggggcctggacccgtgaaggatgtgttctcaacaacaaaccgaatgacggtgctgctgatcacaaacgatgtacttgctaggggaggattcaaggccaactttacgactggttaccacttagggatcccggaaccatgtaaagccgaccacttccaatgtaagaatggtgagtgcgtgccactcgtgaacctctgcgacggtcatctccattgcgaggatggctccgatgaggccgactgtgttaggttcttcaatggaactacaaataacaacgggctagtccgcttcaggattcaatctatttggcataccgcctgtgctgaaaactggactacccagatctccaatgatgtgtgtcaactgctggggctcggtagcgggaattcctcgaaacccatctttccaaccgatggaggcccctttgtgaaactgaatactgcgcctgacggccatctcattctgaccccgagccaacagtgcctccaggattccctgatcagactacagtgcaatcataaaagctgcggaaagaaacttgcggcccaagacatcacccccaaaatcgtgggagggagtaatgcaaaggagggtgcatggccctgggttgttggcttgtactacggagggagactgctgtgtggagccagcttggttagctccgattggctggtttccgctgcccactgcgtgtacggtcgcaacctggagccgagtaagtggacagcaattttgggcctgcacatgaaatctaacctgacttctccacagacagtccccaggcttatcgacgagatagtaatcaacccccactataacaggcggaggaaagataacgatattgctatgatgcacttagaatttaaagtgaattatacagactacatccagccgatttgcctgcctgaagaaaaccaggtgtttccacccggccgaaactgcagcatagccggctggggcaccgtcgtgtaccaagggactaccgcaaacatcctgcaagaggcagacgtgccactcctgagcaatgaaagatgtcaacagcagatgcccgaatataatatcactgagaacatgatctgtgctgggtatgaggagggggggattgatagctgtcagggagactctggtggacccttgatgtgccaggagaacaaccggtggttcctcgcaggcgtgacctccttcggatataagtgcgccctgccaaatagacctggcgtatacgcgagggtgagtagatttaccgagtggattcagtcgttcttacactag

SEQ ID NO: 131793 - DNA, 3060 bp, Artificial Sequence
  derived and/or modified sequence
atgggcagcaagaggggcatcagcagccgccaccacagcctgagcagctatgagatcatgtttgctgccctgtttgccatcctggtggtgctgtgtgccggcctgattgctgtgtcctgcctgaccatcaaggagagccagagaggagctgccctgggccagagccatgaggcccgggccaccttcaagatcaccagcggcgtgacctacaaccccaacctgcaggacaagctgtctgtggacttcaaggtgctggcctttgacctgcagcagatgattgatgagatcttcctgagcagcaacctgaagaatgagtacaagaacagccgggtgctgcagtttgaaaatggcagcatcatcgtggtgtttgacctcttctttgcccagtgggtgtctgatgaaaatgtgaaggaggagctgatccagggcctggaggccaacaagagcagccagctggtgaccttccacatcgacctgaacagcgtggacatcctggacaagctgaccaccaccagccacctggccaccccaggaaatgtgtccattgaatgtctgcccggcagcagcccctgcacagatgccctgacctgcatcaaggctgacctcttctgtgatggagaggtgaactgcccagatggcagtgatgaggacaacaagatgtgtgccaccgtgtgtgatggccgcttcctgctgaccggcagcagcggcagcttccaggccacccactaccccaagcccagcgagacctctgtggtgtgccagtggatcatccgggtgaaccagggcctgagcatcaagctgagctttgatgacttcaacacctactacacagacatcctggacatctatgaaggagtgggcagcagcaagatcctgcgggccagcatctgggagaccaaccctggcaccatccgcatcttcagcaaccaggtgacagccaccttcctgattgaaagtgatgaaagtgactatgtgggcttcaatgccacctacacagccttcaacagcagcgagctgaacaactatgagaagatcaactgcaactttgaagatggcttctgcttctgggtgcaggacctgaatgatgacaatgagtgggagcgcatccagggcagcaccttcagccccttcaccggccccaactttgaccacacctttggaaatgccagcggcttctacatcagcacccccaccggccctgggggccggcaggagcgggtgggcctgctgagcctgcccctggaccccaccctggagcccgcctgcctgtccttctggtaccacatgtacggggagaatgtgcacaagctgagcatcaacatcagcaatgaccagaacatggagaagacagtgttccagaaggagggcaactacggggacaactggaactacggccaggtgaccctgaatgagaccgtgaagttcaaggtggccttcaatgccttcaagaacaagatcctgagtgacatcgccctggatgacatcagcctgacctacggcatctgcaatggcagcctgtacccagagcccaccctggtgcccaccccacctcctgagctgcccacagactgtggcggcccctttgagctgtgggagcccaacaccaccttcagcagcaccaacttccccaacagctaccccaacctggccttctgtgtgtggatcctgaatgcccagaagggcaagaacatccagctgcacttccaggagtttgacctggagaacatcaatgatgtggtggagatcagagatggagaggaggccgacagcctgctgctggccgtgtacacaggccctggccctgtgaaggatgtgttcagcaccaccaacaggatgacagtgctgctgatcaccaatgatgtgctggcccggggcggcttcaaggccaacttcaccaccggctaccacctgggcatccctgagccctgcaaggctgaccacttccagtgcaagaatggagaatgtgtgcccctggtgaacctgtgtgatggccacctgcactgtgaagatggcagtgatgaagctgactgtgtgcgcttcttcaacggcaccaccaacaacaacggcctggtgcgcttccgcatccagagcatctggcacacagcctgtgccgagaactggaccacccagatcagcaatgatgtgtgccagctgctgggcctgggcagcggcaacagcagcaagcccatcttccccacagatggcggcccctttgtgaagctgaacacagccccagatggccacctgatcctgacccccagccagcagtgcctgcaggacagcctcatccggctgcagtgcaaccacaagagctgtgggaagaagctggccgcccaggacatcacccccaagatcgtgggcggcagcaatgccaaggagggcgcctggccctgggtggtgggcctgtactacggcggccgcctgctgtgtggggccagcctggtgtccagtgactggctggtgtctgctgcccactgtgtgtatggcaggaacctggagcccagcaagtggacagccatcctgggcctgcacatgaagagcaacctgaccagcccccagacagtgccccggctgattgatgagatcgtcatcaacccccactacaacagaagaaggaaggacaatgacatcgccatgatgcacctggagttcaaggtgaactacacagactacatccagcccatctgcctgcctgaggagaaccaggtgtttcctcctggcaggaactgcagcattgctggctggggcaccgtggtgtaccagggcaccacagccaacatcctgcaggaggctgatgtgcccctgctgagcaatgaacgctgccagcagcagatgcctgagtacaacatcacagagaacatgatctgtgccggctatgaggagggcggcatcgacagctgccagggcgacagcggcggccccctgatgtgccaggagaacaaccgctggttcctggccggcgtgaccagctttggctacaagtgtgccctgcccaacagacctggggtgtatgcccgggtgagccgcttcacagagtggatccagagcttcctgcactag

SEQ ID NO: 131794 - DNA, 3060 bp, Artificial Sequence
  derived and/or modified sequence
atgggcagcaagcggggcatcagcagccggcaccacagcctgagcagttatgagattatgttcgccgccctttttgctatactcgtcgtgctatgtgcaggactcattgcagtttcctgcctgactattaaggagtcccagcggggggccgccctgggacagtcgcacgaggctcgcgccactttcaaaatcacgagcggggtaacttacaatcctaatcttcaagataagctctccgtggacttcaaagtcctcgccttcgatcttcaacagatgattgacgaaatcttcctgtcttccaatctgaaaaacgagtataaaaatagtagggtccttcagtttgagaatggttcgattatcgttgtgttcgatctgtttttcgcacagtgggtttcagatgaaaatgtgaaggaggagctaatacaggggctcgaggccaataaatcaagccagctcgtgacctttcatatcgatctgaattccgtagatattctcgacaagcttaccactacttctcatctcgccactccggggaatgtgtctatcgagtgtctgcccggcagttctccttgtaccgatgcactgacgtgcattaaggccgatctgttctgcgatggagaggttaactgcccggacggcagtgatgaagacaacaaaatgtgcgccacagtgtgcgacggccgttttttgcttacaggcagctctggcagcttccaagcaacacactatcctaaaccaagcgagacaagtgtggtttgccagtggatcattagagtaaatcaggggctgagcatcaaactgtcttttgatgacttcaacacatattatacggacattcttgatatatatgagggcgtcggttcttcgaagatcctgagggcttccatatgggaaaccaatcccggcacaattagaattttcagcaatcaagtcaccgcaaccttcctcattgaaagtgatgagagcgattatgtcggtttcaatgccacttatacagcttttaactcaagcgagttgaacaattacgagaagatcaattgcaacttcgaggacgggttctgtttctgggtccaggatctgaatgacgacaacgagtgggagcgaatccagggatctaccttctccccctttaccggacctaattttgaccatactttcggaaacgcatccggcttctacatctctaccccgacaggcccgggaggccggcaggagagagtcggactcctctcactgccactggatccaaccctggaacccgcctgtctcagcttctggtaccacatgtatggagagaatgttcacaagttgagtattaatatttctaacgaccagaacatggagaaaactgtgttccagaaggaggggaattatggggataactggaactacgggcaagtgacgctgaacgagacagtcaaattcaaggtggccttcaacgcattcaagaataagatcttatcagatattgcactggatgatatatccctcacatatggcatttgtaatggatcactttacccagagcccacgctggtgcccacgcccccacctgagctacctaccgactgcggaggcccgttcgagctgtgggaacccaacaccacgttctcaagcaccaacttcccaaattcctatcctaatcttgctttctgtgtgtggattctcaatgcacaaaaagggaaaaacattcagttgcactttcaagaatttgacttagaaaacataaatgatgtggtcgagatccgcgacggcgaggaggctgactctctcctactggcagtctatacaggccccggccctgtgaaagatgtttttagcactactaatagaatgacggtgctgctcattactaacgacgtgctggctagaggcggattcaaggccaactttactactggttatcaccttggaattcccgaaccttgtaaggccgaccattttcaatgcaaaaacggtgagtgcgtgccactggtgaacctctgtgatggacaccttcactgtgaagacgggtcagacgaagccgactgtgtgcggttcttcaacgggacgacaaataacaatggacttgttcgtttccggattcagagtatttggcatactgcctgtgccgagaactggaccactcaaataagtaatgacgtatgccagctactaggcctcggcagcggcaactccagcaagccaatcttccctaccgatggcggaccttttgtgaaattaaatacagcacccgacggacacctgatccttaccccctcacagcaatgtctgcaggattccctgatacgccttcagtgtaaccacaaatcttgtggaaagaaactggccgcccaagacatcacccccaagattgtgggcggctccaacgccaaagaaggggcttggccttgggtcgtaggactatactacggagggcggttgctctgcggagcctcactggtcagctctgactggcttgtttccgcagcacactgtgtatatgggaggaacctggagcctagcaagtggaccgctatcttaggcctgcacatgaagtccaatctgacgtcaccccagactgtcccacggctcatcgatgaaatcgtcatcaaccctcactacaaccgtcgacgtaaggataacgacatagcaatgatgcacctcgaattcaaggtgaattatactgattacattcagcccatatgccttccggaagagaatcaggtgttccctcccggacggaactgctcaattgctggatgggggaccgtcgtttaccagggcacgactgcgaacattctgcaagaggctgacgtccctctactgagcaacgagcggtgccagcagcagatgccagaatacaatatcaccgagaatatgatctgcgccggatatgaggaaggaggaatagacagttgccagggcgattccggaggtcccctaatgtgtcaggaaaacaataggtggttccttgcaggggtcacatccttcggctacaaatgcgcccttccaaaccggccgggggtctacgctcgcgtgagcaggttcactgagtggatccagagttttctacattag

SEQ ID NO: 131795 - DNA, 3060 bp, Artificial Sequence
  derived and/or modified sequence
atgggaagcaaacgcggtatcagtagtagacaccactccctgtcctcatacgagattatgtttgccgctctgttcgcgattttagttgttttgtgcgccggtttaattgctgtgtcctgcctgactattaaagaaagccagagaggggctgccttaggccaaagccatgaggcacgagcgacgtttaagatcacgagtggcgtgacctacaaccccaacttacaggacaagttaagcgtcgattttaaggtactggcgtttgatctgcagcagatgattgacgagattttcctgtcctctaatttaaaaaatgagtataaaaactcccgggtccttcaattcgaaaatggttctatcatcgtagtcttcgatctgttcttcgcgcagtgggtcagcgacgagaatgtgaaagaggaattgatccaggggctcgaagccaataaatccagtcagctggtgaccttccacattgaccttaacagtgtggacatcctcgacaagctgacaacaaccagccacctggcaacccccggaaacgttagcatagagtgtttgccaggttcctcaccttgcacagatgcattgacctgtattaaagctgacctgttttgcgatggcgaagtcaactgccccgatggatctgacgaagataataagatgtgtgctacagtgtgcgacggacggtttctgctcactgggagctctggctcattccaggctacgcactatcctaaacccagtgaaacgagtgtggtctgtcagtggatcatcagagttaatcagggcttatcaattaaattgagcttcgatgactttaacacttactatactgatatcctcgatatctatgagggagtcggatccagcaaaatcttaagggcttctatatgggagaccaaccctggtacaatccgcattttcagcaaccaagtgacggccacattccttatcgagagcgacgagtctgactatgttggattcaacgccacctacaccgcttttaatagtagtgagctgaacaattacgaaaaaattaattgcaactttgaagacgggttttgtttttgggtccaggacctgaatgatgataatgaatgggagcggatacaaggcagcacattttctcccttcaccgggccaaatttcgaccatacattcggaaacgcatcagggttttacatctccaccccaaccggtcctgggggtcgccaggagcgggttggcctgctatctttgcctctcgatccaaccctggagccagcctgtctctccttctggtaccacatgtacggcgaaaacgtacacaaactctctattaatattagcaacgaccagaatatggaaaagacagtatttcagaaggaaggcaattacggagacaactggaattatggccaggtaacactcaacgaaacggtgaaattcaaggttgcctttaatgccttcaagaacaaaatcctgagcgatattgctttagacgacattagcctgacgtatggcatctgtaacggaagcctgtaccctgaaccaacgctggtgccaactcctccgccagagctccccaccgactgcgggggaccattcgaactttgggagcccaataccactttctctagcaccaatttcccaaacagttatccaaatctggccttttgcgtgtggatcctgaatgctcagaagggcaagaatattcagctccatttccaggagttcgacttggagaatattaatgacgtagttgagatcagggacggcgaggaggccgattccctgctcctggcagtctataccgggcctgggcctgtgaaggatgtgttctccaccacaaaccgtatgaccgtgctactgatcactaatgatgttctggcccgaggcggatttaaagccaacttcacaactggatatcatctcggaatccctgaaccttgcaaggctgatcatttccagtgtaaaaatggcgagtgcgtgcctctggtgaatctttgcgatggacatctgcactgcgaagacgggagcgacgaagctgattgtgtgcgctttttcaatggtactacaaataacaatggcctggtgcggttccgtatccagtcaatttggcatacagcctgcgccgaaaattggactactcagatttccaatgacgtctgccagctcctggggctgggatctggaaatagctccaagcctatctttcccacagacgggggtccatttgtgaaactcaataccgcccctgacggacacctaatcctgaccccctctcagcagtgtctccaggatagcctcatcagactgcagtgcaaccataaaagttgcgggaaaaaactggcggctcaggatatcacacccaaaatcgtcgggggttctaacgcaaaagagggcgcttggccttgggtcgtaggcctttattacggtggacggttgttatgcggcgctagtctggtcagtagcgactggctcgtttctgctgcccattgtgtgtatggtaggaacttggagccctctaagtggactgccattcttggcttgcatatgaaatccaatctaacgagtccacagactgtaccacgactgatcgatgaaatcgttatcaacccccactacaatcgtcgcagaaaggacaacgacatcgctatgatgcaccttgagttcaaggtaaactacaccgactatatacaacccatctgcctccctgaggaaaaccaggtgttcccgcctggtaggaactgctcaatcgccggttggggcaccgtggtatatcagggaacaacagcaaatatccttcaggaagccgatgtgccgctgctgagcaacgagaggtgccaacagcaaatgcctgaatacaacattaccgaaaatatgatttgcgcgggatatgaagaagggggaattgactcttgtcagggtgactctgggggtcctctgatgtgtcaggagaacaataggtggttcctggccggagtgaccagctttggctataaatgcgctctgcctaataggcccggagtctacgccagggtaagccgcttcacagagtggattcaaagctttttacattag

SEQ ID NO: 131796 - DNA, 3947 bp, Artificial Sequence
  derived and/or modified sequence
cagttcttaaattagcaagccttcaaaaccaaaaatggggtcgaaaagaggcatatcttctaggcatcattctctcagctcctatgaaatcatgtttgcagctctctttgccatattggtagtgctctgtgctggattaattgcagtatcctgcctgacaatcaaggaatcccaacgaggtgcagcacttggacagagtcatgaagccagagcgacatttaaaataacatccggagttacatataatcctaatttgcaagacaaactctcagtggatttcaaagttcttgcttttgaccttcagcaaatgatagatgagatctttctatcaagcaatctgaagaatgaatataagaactcaagagttttacaatttgaaaatggcagcattatagtcgtatttgaccttttctttgcccagtgggtgtcagatgaaaatgtaaaagaagaactgattcaaggccttgaagcaaataaatccagccaactggtcactttccatattgatttgaacagcgttgatatcctagacaagctaacaaccaccagtcatctggcaactccaggaaatgtctcaatagagtgcctgcctggttcaagtccttgtactgatgctctaacgtgtataaaagctgatttattttgtgatggagaagtaaactgtccagatggttctgacgaagacaataaaatgtgtgccacagtttgtgatggaagatttttgttaactggatcatctgggtctttccaggctactcattatccaaaaccttctgaaacaagtgttgtctgccagtggatcatacgtgtaaaccaaggactttccattaaactgagcttcgatgattttaatacatattatacagatatattagatatttatgaaggtgtaggatcaagcaagattttaagagcttctatttgggaaactaatcctggcacaataagaattttttccaaccaagttactgccacctttcttatagaatctgatgaaagtgattatgttggctttaatgcaacatatactgcatttaacagcagtgagcttaataattatgagaaaattaattgtaactttgaggatggcttttgtttctgggtccaggatctaaatgatgataatgaatgggaaaggattcagggaagcaccttttctccttttactggacccaattttgaccacacttttggcaatgcttcaggattttacatttctaccccaactggaccaggagggagacaagaacgagtggggcttttaagcctccctttggaccccactttggagccagcttgccttagtttctggtatcatatgtatggtgaaaatgtccataaattaagcattaatatcagcaatgaccaaaatatggagaagacagttttccaaaaggaaggaaattatggagacaattggaattatggacaagtaaccctaaatgaaacagttaaatttaaggttgcttttaatgcttttaaaaacaagatcctgagtgatattgcgttggatgacattagcctaacatatgggatttgcaatgggagtctttatccagaaccaactttggtgccaactcctccaccagaacttcctacggactgtggaggaccttttgagctgtgggagccaaatacaacattcagttctacgaactttccaaacagctaccctaatctggctttctgtgtttggattttaaatgcacaaaaaggaaagaatatacaacttcattttcaagaatttgacttagaaaatattaacgatgtagttgaaataagagatggtgaagaagctgattccttgctcttagctgtgtacacagggcctggcccagtaaaggatgtgttctctaccaccaacagaatgactgtgcttctcatcactaacgatgtgttggcaagaggagggtttaaagcaaactttactactggctatcacttggggattccagagccatgcaaggcagaccattttcaatgtaaaaatggagagtgtgttccactggtgaatctctgtgacggtcatctgcactgtgaggatggctcagatgaagcagattgtgtgcgttttttcaatggcacaacgaacaacaatggtttagtgcggttcagaatccagagcatatggcatacagcttgtgctgagaactggaccacccagatttcaaatgatgtttgtcaactgctgggactagggagtggaaactcatcaaagccaatcttccctaccgatggtggaccatttgtcaaattaaacacagcacctgatggccacttaatactaacacccagtcaacagtgtttacaggattccttgattcggttacagtgtaaccataaatcttgtggaaaaaaactggcagctcaagacatcaccccaaagattgttggaggaagtaatgccaaagaaggggcctggccctgggttgtgggtctgtattatggcggccgactgctctgcggcgcatctctcgtcagcagtgactggctggtgtccgccgcacactgcgtgtatgggagaaacttagagccatccaagtggacagcaatcctaggcctgcatatgaaatcaaatctgacctctcctcaaacagtccctcgattaatagatgaaattgtcataaaccctcattacaataggcgaagaaaggacaacgacattgccatgatgcatctggaatttaaagtgaattacacagattacatacaacctatttgtttaccggaagaaaatcaagtttttcctccaggaagaaattgttctattgctggttgggggacggttgtatatcaaggtactactgcaaacatattgcaagaagctgatgttcctcttctatcaaatgagagatgccaacagcagatgccagaatataacattactgaaaatatgatatgtgcaggctatgaagaaggaggaatagattcttgtcagggggattcaggaggaccattaatgtgccaagaaaacaacaggtggttccttgctggtgtgacctcatttggatacaagtgtgccctgcctaatcgccccggagtgtatgccagggtctcaaggtttaccgaatggatacaaagttttctacattagcgcatttcttaaactaaacaggaaagtcgcattattttcccattctactctagaaagcatggaaattaagtgtttcgtacaaaaattttaaaaagttaccaaaggtttttattcttacctatgtcaatgaaatgctagggggccagggaaacaaaattttaaaaataataaaattcaccatagcaatacagaataactttaaaataccattaaatacatttgtatttcattgtgaacaggtatttcttcacagatctcatttttaaaattcttaatgattatttttattacttactgttgtttaaagggatgttattttaaagcatataccatacacttaagaaatttgagcagaatttaaaaaagaaagaaaataaattgtttttcccaaagtatgtcactgttggaaataaactgccataaattttctagttccagtttagtttgctgctattagcagaaactcaattgtttctctgtcttttctatcaaaattttcaacatatgcataaccttagtattttcccaaccaatagaaactatttattgtaagcttatgtcacaggcctggactaaattgattttacgttcctcttaaataagttaattaaataaaagataaattaactgatatagtcattgtatattagataaattttacctatttatttcaagcaagtatttttaagtctcaagaaaataatcagacataccaaagaaatgcacctattgcaaatcctggtcttggtttatgtgtgttacagtggatatttctaatatatgaaaacttatttagacacagctgaatcacccatgagaaggtcaaatatgtgtaataaatgaatttgcttca

SEQ ID NO: 131797 - protein, 343 aa, Artificial Sequence
  derived and/or modified sequence
MAQKGVLGPGQLGAVAILLYLGLLRSGTGAEGAEAPCGVAPQARITGGSSAVAGQWPWQVSITYEGVHVCGGSLVSEQWVLSAAHCFPSEHHKEAYEVKLGAHQLDSYSEDAKVSTLKDIIPHPSYLQEGSQGDIALLQLSRPITFSRYIRPICLPAANASFPNGLHCTVTGWGHVAPSVSLLTPKPLQQLEVPLISRETCNCLYNIDAKPEEPHFVQEDMVCAGYVEGGKDACQGDSGGPLSCPVEGLWYLTGIVSWGDACGARNRPGVYTLASSYASWIQSKVTELQPRVVPQTQESQPDSNLCGSHLAFSSAPAQGLLRPILFLPLGLALGLLSPWLSEH

SEQ ID NO: 131798 - protein, 167 aa, Artificial Sequence
  derived and/or modified sequence
MAQKGVLGPGQLGAVAILLYLGLLRSGTGKEGAAAPCGVAPQARITGGSSAVAGQWPWQVSITFSRYIRPICLPAANASFPNGLHCTVTGWGHVAPSVSLLTPKPLQQLEVPLISRETCNCLYNIDAKPEEPHFVQEDMVCAGYVEGALLRVTLGAHSPALWRVSGT

SEQ ID NO: 131799 - DNA, 1032 bp, Artificial Sequence
  derived and/or modified sequence
atggcacaaaagggcgtactcggtcccggtcagcttggggccgtagcaatcctgctgtacctgggactgctgcgttcgggcacaggtgcggagggggccgaagctccttgtggcgttgccccccaagcgaggattaccggtggaagcagtgctgtcgccggacagtggccatggcaagtgtccattacctacgagggggtccacgtctgcgggggctccctcgtgtcagagcagtgggtgttgagcgccgctcactgttttcccagcgaacatcacaaggaagcgtacgaggttaagcttggcgctcatcagttggacagctatagtgaggacgccaaagtttccacacttaaggacatcattccacacccctcctatcttcaggaagggtcccagggagatatagcactgctgcagttgagtagacccatcacattttccaggtatatccggcccatctgcttacctgccgcaaacgcatctttccccaatggtctgcactgtaccgtgacagggtggggccacgtggctcccagcgtctcgcttctgactcctaagcccctgcaacagctcgaagtccctttgatctcgcgcgaaacgtgtaattgcctgtacaacatagatgccaagcctgaggagccccacttcgtccaggaagatatggtctgtgctggctatgtcgaaggggggaaggacgcatgccaaggcgattcagggggcccactgtcttgtccagtcgaggggttgtggtatctaacgggcattgtgtcgtggggggatgcttgcggggctaggaacagacccggggtttataccttggcgtcctcgtatgcctcttggattcagtcaaaggtgaccgaactgcagcctagggtcgtccctcagacccaggaaagccagcctgactctaatctctgtggcagccaccttgccttttcttccgcgcccgcacaaggcctgctccgccctatattattcctgcctcttggactcgctcttggccttctgagtccatggctcagcgaacactag

SEQ ID NO: 131800 - DNA, 504 bp, Artificial Sequence
  derived and/or modified sequence
atggcccagaaaggggtgttagggcccggacaacttggggccgtggccatccttctgtacctgggcctcctgagatccggtaccggcaaggaaggagcagccgcgccctgtggcgtcgcaccccaagcccgcattactgggggctcatctgcagttgcaggtcagtggccttggcaagtttccataacttttagtaggtacatacggccaatctgcctccccgccgctaacgcatcattccctaatggcctgcactgtactgtgactgggtgggggcacgtggctccaagcgtttcacttttaacccctaaacctctgcagcaactggaggtgccactgatcagcagggaaacctgcaattgtctgtacaacatcgacgctaagccggaggagccccatttcgtccaggaggacatggtttgtgccgggtacgtcgagggggcccttctgagggttaccctgggcgcccacagccccgctctctggagggtgtctgggacctag

SEQ ID NO: 131801 - DNA, 1032 bp, Artificial Sequence
  derived and/or modified sequence
atggcccagaagggcgtgctgggccctggccagctgggcgctgtggccatcctgctgtacctgggcctgctgcggagcggcaccggggctgagggcgctgaggccccctgtggggtggccccccaggcccgcatcaccggcggcagcagcgctgtggccggccagtggccctggcaggtgtccatcacctatgagggcgtgcacgtgtgtggcggcagcctggtgtctgagcagtgggtgctgtctgctgcccactgcttccccagcgagcaccacaaggaggcctatgaggtgaagctgggcgcccaccagctggacagctacagtgaagatgccaaggtgtccaccctgaaggacatcatcccccaccccagctacctgcaggagggcagccagggcgacatcgccctgctgcagctgagccggcccatcaccttcagccgctacatccggcccatctgcctgcctgctgccaatgccagcttccccaacggcctgcactgcaccgtgacaggctggggccacgtggcccccagcgtgtccctgctgacccccaagcccctgcagcagctggaggtgcccctcatcagccgggagacctgcaactgcctgtacaacattgatgccaagccagaggagccccactttgtgcaggaggacatggtgtgtgccggctacgtggagggcggcaaggatgcctgccagggcgacagcggcggccccctgagctgccctgtggagggcctgtggtacctgactggaattgtgtcctggggagatgcctgtggggccaggaacagacctggggtgtacaccctggccagcagctatgcctcctggatccagagcaaggtgacagagctgcagccccgggtggtgccccagacccaggagagccagcctgacagcaacctgtgtggcagccacctggccttcagcagcgccccagcccagggcctgctgcggcccatcctcttcctgcccctgggcctggccctgggcctgctgagcccctggctgtctgagcactag

SEQ ID NO: 131802 - DNA, 504 bp, Artificial Sequence
  derived and/or modified sequence
atggcccagaagggcgtgctgggccctggccagctgggcgctgtggccatcctgctgtacctgggcctgctgcggagcggcaccgggaaggagggcgccgccgccccctgtggggtggccccccaggcccgcatcaccggcggcagcagcgctgtggccggccagtggccctggcaggtgtccatcaccttcagccgctacatccggcccatctgcctgcctgctgccaatgccagcttccccaacggcctgcactgcaccgtgacaggctggggccacgtggcccccagcgtgtccctgctgacccccaagcccctgcagcagctggaggtgcccctcatcagccgggagacctgcaactgcctgtacaacattgatgccaagccagaggagccccactttgtgcaggaggacatggtgtgtgccggctacgtggagggcgccctgctgcgggtgaccctgggcgcccacagccctgccctgtggagggtgtctggcacctag

SEQ ID NO: 131803 - DNA, 1032 bp, Artificial Sequence
  derived and/or modified sequence
atggcccagaagggcgtgctgggccccggccagctgggcgccgtggcaatcctgctgtacctcgggcttctgcgctccggaaccggcgccgaaggagccgaggccccttgcggagtggctcctcaggctaggatcaccggcggcagttctgctgtggctggccagtggccatggcaggtgagtatcacctatgaaggcgtgcacgtctgcggaggctctcttgttagcgagcagtgggtgttgagcgccgcccactgctttccgagcgaacatcacaaggaggcatacgaagtcaaactgggcgcccaccaacttgactcttatagcgaggatgccaaagtgtctactctgaaggacataattccccatccaagctaccttcaagaggggtctcaaggagacattgcactgctgcagctttcccggcctatcacgttctcgagatatattagaccaatttgtcttcctgctgccaatgcaagctttcccaacgggcttcactgtacggtgactggctggggacatgtagcgccatctgtgagtctcttgacaccaaaacctctacagcagcttgaggtcccactaatcagtagagaaacctgcaactgcttatataacattgacgccaaacctgaagagcctcacttcgtgcaggaggacatggtatgtgccggatatgtggaaggcggtaaagacgcctgtcagggggattccggcggtccactctcctgcccggtcgagggcctctggtatctgacaggaatagtgtcttggggtgatgcttgtggcgccaggaaccgccccggtgtgtacaccctggctagttcgtacgctagctggattcagagcaaagtgactgagcttcagccccgcgtcgtcccccagactcaagagtcccagcccgatagcaacctgtgcggctctcatttggccttcagcagtgctcctgcccaggggttactccgtcctatcttgttcctgcctctcggtttggcacttggactcctgtcaccttggctctccgagcactag

SEQ ID NO: 131804 - DNA, 504 bp, Artificial Sequence
  derived and/or modified sequence
atggcccagaagggcgtgctgggccccggccagctgggcgccgtggccatcctcctttacctgggcctgctgaggagcggaactggcaaagagggagcagcagctccgtgtggcgtagctccgcaggcaagaataacaggaggatcctccgctgttgccggacagtggccttggcaggtcagtattacattctcgaggtatatacgtccaatttgtctgcctgctgcgaatgcgtcatttcccaacgggttacactgtactgtaacaggatggggacacgttgccccatcggtgtcactgctgacccctaagccactgcagcagcttgaggttccgttgatctcaagagaaacttgcaattgtttgtataatatcgatgcgaaacctgaagagccgcactttgtccaagaagacatggtctgcgctggctacgtggagggcgctttgctgcgggtgaccctgggtgctcactctcctgccctttggcgcgtctcagggacctag

SEQ ID NO: 131805 - DNA, 1032 bp, Artificial Sequence
  derived and/or modified sequence
atggctcaaaagggggtcctggggcctggacagctgggagcagtagccattttactttatctgggcctgctgagatccgggactggggcagagggtgccgaagctccttgtggggtggcaccacaggctaggatcaccggagggtcctccgctgtcgcaggccagtggccctggcaggtgtctattacttatgagggcgtgcacgtgtgcgggggttctttggtgtccgaacaatgggtccttagtgccgctcattgcttcccatctgaacaccataaagaagcctacgaagtaaagttgggagcgcaccagttggacagctattctgaggacgctaaagtgagtaccctaaaagatataatacctcacccctcctatcttcaggaggggagccaaggcgatatagcactgctgcaattaagccgccctatcacatttagccggtatatcaggcccatttgccttcccgcagctaatgcaagctttcctaacggactacactgcacagttactgggtggggccatgtggcacctagcgtgagtctgctcactcccaagccactgcagcaactggaagttccattgattagtagggagacctgcaactgtctgtataacatcgatgccaaacccgaagaaccccattttgtgcaggaggacatggtgtgcgcgggatatgtggaggggggaaaagatgcatgtcagggcgactctgggggtccactgtcttgtcccgtcgagggcttatggtatctcacgggtatagtttcttggggcgatgcctgcggggcacggaaccggcctggcgtatacacactggctagctcctatgcatcttggattcaatcgaaagtgacggaactccagccacgcgtcgtcccgcagacgcaagagagtcaaccagattcaaacctgtgcgggtcacatttagcatttagttctgcccctgctcaaggtctcctcagacctatcttgttcctgcccctgggtcttgcactcggccttctgtccccatggctgagtgagcactag

SEQ ID NO: 131806 - DNA, 504 bp, Artificial Sequence
  derived and/or modified sequence
atggcccagaaaggggtgctcggtcccggacagttaggcgcagtcgcaatcctactgtatctgggactgctccgtagcggtacgggcaaagaaggagcagcggctccctgtggcgtcgcccctcaggcacgcattacaggcggtagctccgccgtggccggtcagtggccctggcaagtgtctatcactttctctagatatatcagacctatctgcctcccagcagctaacgcctcatttcctaacgggcttcattgcacagtgaccggctgggggcatgtagctcccagcgtcagtctgcttacacccaaacctctacagcagctcgaagtgcctctgatttcacgggagacgtgtaattgtctctacaacatagatgctaagcccgaggaacctcacttcgtccaagaggatatggtctgtgctggctacgtagagggcgctctgttgcgggtcaccctgggtgctcacagtccagctctgtggcgggtgagtgggacctag

SEQ ID NO: 131807 - DNA, 1940 bp, Artificial Sequence
  derived and/or modified sequence
gactttggtggcaagaggagctggcggagcccagccagtgggcggggccaggggaggggcgggcaggtaggtgcagccactcctgggaggaccctgcgtggccagacggtgctggtgactcgtccacactgctcgcttcggatactccaggcgtctcccgttgcggccgctccctgccttagaggccagccttggacacttgctgcccctttccagcccggattctgggatccttccctctgagccaacatctgggtcctgccttcgacaccaccccaaggcttcctaccttgcgtgcctggagtctgccccaggggcccttgtcctgggccatggcccagaagggggtcctggggcctgggcagctgggggctgtggccattctgctctatcttggattactccggtcggggacaggagcggaaggggcagaagctccctgcggtgtggccccccaagcacgcatcacaggtggcagcagtgcagtcgccggtcagtggccctggcaggtcagcatcacctatgaaggcgtccatgtgtgtggtggctctctcgtgtctgagcagtgggtgctgtcagctgctcactgcttccccagcgagcaccacaaggaagcctatgaggtcaagctgggggcccaccagctagactcctactccgaggacgccaaggtcagcaccctgaaggacatcatcccccaccccagctacctccaggagggctcccagggcgacattgcactcctccaactcagcagacccatcaccttctcccgctacatccggcccatctgcctccctgcagccaacgcctccttccccaacggcctccactgcactgtcactggctggggtcatgtggccccctcagtgagcctcctgacgcccaagccactgcagcaactcgaggtgcctctgatcagtcgtgagacgtgtaactgcctgtacaacatcgacgccaagcctgaggagccgcactttgtccaagaggacatggtgtgtgctggctatgtggaggggggcaaggacgcctgccagggtgactctgggggcccactctcctgccctgtggagggtctctggtacctgacgggcattgtgagctggggagatgcctgtggggcccgcaacaggcctggtgtgtacactctggcctccagctatgcctcctggatccaaagcaaggtgacagaactccagcctcgtgtggtgccccaaacccaggagtcccagcccgacagcaacctctgtggcagccacctggccttcagctctgccccagcccagggcttgctgaggcccatccttttcctgcctctgggcctggctctgggcctcctctccccatggctcagcgagcactgagctggccctacttccaggatggatgcatcacactcaaggacaggagcctggtccttccctgatggcctttggacccagggcctgacttgagccactccttccttcaggactctgcgggaggctggggccccatcttgatctttgagcccattcttctgggtgtgctttttgggaccatcactgagagtcaggagttttactgcctgtagcaatggccagagcctctggcccctcacccaccatggaccagcccattggccgagctcctggggagctcctgggacccttggctatgaaaatgagccctggctcccacctgtttctggaagactgctcccggcccgcctgcccagactgatgagcacatctctctgccctctccctgtgttctgggctggggccacctttgtgcagcttcgaggacaggaaaggccccaatcttgcccactggccgctgagcgcccccgagccctgactcctggactccggaggactgagcccccaccggaactgggctggcgcttggatctggggtgggagtaacagggcagaaatgattaaaatgtttgagcacaa

SEQ ID NO: 131808 - DNA, 504 bp, Artificial Sequence
  derived and/or modified sequence
atggcccagaagggggtcctggggcctgggcagctgggggctgtggccattctgctctatcttggattactccggtcggggacaggtaaggaaggggccgcagctccctgcggtgtggccccccaagcacgcatcacaggtggcagcagtgcagtcgccggtcagtggccctggcaggtcagcatcaccttctcccgctacatccggcccatctgcctccctgcagccaacgcctccttccccaacggcctccactgcactgtcactggctggggtcatgtggccccctcagtgagcctcctgacgcccaagccactgcagcaactcgaggtgcctctgatcagtcgtgagacgtgtaactgcctgtacaacatcgacgccaagcctgaggagccgcactttgtccaagaggacatggtgtgtgctggctatgtggagggggctctcctcagggtgactctgggggcccactctcctgccctgtggagggtctctggtacctga

SEQ ID NO: 131809 - DNA, 1032 bp, Artificial Sequence
  derived and/or modified sequence
atggcccagaagggcgtgctgggccccggccagctgggcgccgtggccatcctgctgtacctgggcctgctgagaagcggcaccggcgccgagggcgccgaggccccctgcggcgtggccccccaggccagaatcaccggcggcagcagcgccgtggccggccagtggccctggcaggtgagcatcacctacgagggcgtgcacgtgtgcggcggcagcctggtgagcgagcagtgggtgctgagcgccgcccactgcttccccagcgagcaccacaaggaggcctacgaggtgaagctgggcgcccaccagctggacagctacagcgaggacgccaaggtgagcaccctgaaggacatcatcccccaccccagctacctgcaggagggcagccagggcgacatcgccctgctgcagctgagcagacccatcaccttcagcagatacatcagacccatctgcctgcccgccgccaacgccagcttccccaacggcctgcactgcaccgtgaccggctggggccacgtggcccccagcgtgagcctgctgacccccaagcccctgcagcagctggaggtgcccctgatcagcagagagacctgcaactgcctgtacaacatcgacgccaagcccgaggagccccacttcgtgcaggaggacatggtgtgcgccggctacgtggagggcggcaaggacgcctgccagggcgacagcggcggccccctgagctgccccgtggagggcctgtggtacctgaccggcatcgtgagctggggcgacgcctgcggcgccagaaacagacccggcgtgtacaccctggccagcagctacgccagctggatccagagcaaggtgaccgagctgcagcccagagtggtgccccagacccaggagagccagcccgacagcaacctgtgcggcagccacctggccttcagcagcgcccccgcccagggcctgctgagacccatcctgttcctgcccctgggcctggccctgggcctgctgagcccctggctgagcgagcactag

SEQ ID NO: 131810 - DNA, 504 bp, Artificial Sequence
  derived and/or modified sequence
atggcccagaagggcgtgctgggccccggccagctgggcgccgtggccatcctgctgtacctgggcctgctgagaagcggcaccggcaaggagggcgccgccgccccctgcggcgtggccccccaggccagaatcaccggcggcagcagcgccgtggccggccagtggccctggcaggtgagcatcaccttcagcagatacatcagacccatctgcctgcccgccgccaacgccagcttccccaacggcctgcactgcaccgtgaccggctggggccacgtggcccccagcgtgagcctgctgacccccaagcccctgcagcagctggaggtgcccctgatcagcagagagacctgcaactgcctgtacaacatcgacgccaagcccgaggagccccacttcgtgcaggaggacatggtgtgcgccggctacgtggagggcgccctgctgagagtgaccctgggcgcccacagccccgccctgtggagagtgagcggcacctag

SEQ ID NO: 131811 - protein, 480 aa, Artificial Sequence
  derived and/or modified sequence
MQIPRAALLPLLLLLLAAPASAQLSRAGRSAPLAAGCPDRCEPARCPPQPEHCEGGRARDACGCCEVCGAPEGAACGLQEGPCGEGLQCVVPFGVPASATVRRRAQAGLCVCASSEPVCGSDANTYANLCQLRAASRRSERLHRPPVIVLQRGACGQGQEDPNSLRHKYNFIADVVEKIAPAVVHIELFRKLPFSKREVPVASGSGFIVSEDGLIVTNAHVVTNKHRVKVELKNGATYEAKIKDVDEKADIALIKIDHQGKLPVLLLGRSSELRPGEFVVAIGSPFSLQNTVTTGIVSTTQRGGKELGLRNSDMDYIQTDAIINYGNSGGPLVNLDGEVIGINTLKVTAGISFAIPSDKIKKFLTESHDRQAKGKAITKKKYIGIRMMSLTSSKAKELKDRHRDFPDVISGAYIIEVIPDTPAEAGGLKENDVIISINGQSVVSANDVSDVIKRESTLNMVVRRGNEDIMITVIPEEIDP

SEQ ID NO: 131812 - protein, 221 aa, Artificial Sequence
  derived and/or modified sequence
GKLPVLLLGRSSELRPGEFVVAIGSPFSLQNTVTTGIVSTTQRGGKELGLRNSDMDYIQTDAIINYGNSGGPLVNLDGEVIGINTLKVTAGISFAIPSDKIKKFLTESHDRQAKGKAITKKKYIGIRMMSLTSSKAKELKDRHRDFPDVISGAYIIEVIPDTPAEAGGLKENDVIISINGQSVVSANDVSDVIKRESTLNMVVRRGNEDIMITVIPEEIDP

SEQ ID NO: 131813 - protein, 447 aa, Artificial Sequence
  derived and/or modified sequence
MGWAARPRALAPAAPEALLHSPRRRSPALALSAATAAAARGPGRVRLLRGVRRARGRRVRPAGGPVRRGAAVRGALRGASLGHGAAARAGRPLCVRQQLRAASRRSERLHRPPVIVLQRGACGQGQEDPNSLRHKYNFIADVVEKIAPAVVHIELFRKLPFSKREVPVASGSGFIVSEDGLIVTNAHVVTNKHRVKVELKNGATYEAKIKDVDEKADIALIKIDHQGKLPVLLLGRSSELRPGEFVVAIGSPFSLQNTVTTGIVSTTQRGGKELGLRNSDMDYIQTDAIINYGNSGGPLVNLDGEVIGINTLKVTAGISFAIPSDKIKKFLTESHDRQAKGKAITKKKYIGIRMMSLTSSKAKELKDRHRDFPDVISGAYIIEVIPDTPAEAGGLKENDVIISINGQSVVSANDVSDVIKRESTLNMVVRRGNEDIMITVIPEEIDP

SEQ ID NO: 131814 - DNA, 1443 bp, Artificial Sequence
  derived and/or modified sequence
atgcagattccacgcgccgcattattaccactcctgctactcctacttgcggctcctgctagcgctcagctgtccagagcagggcggtctgctccactggccgccggatgccccgaccgatgcgagcccgccagatgtccgcctcagcccgagcattgtgagggggggagggcacgcgacgcatgtggatgttgcgaggtgtgcggtgcgccagagggtgccgcctgcggcttacaggagggcccttgcggcgaagggttacaatgcgtggttccattcggagtgcctgcctctgctaccgttcgcagacgtgcacaggcaggtctttgcgtttgtgccagttcagaaccagtatgtggaagcgacgctaatacctacgccaatttatgccagctgcgcgctgcaagccgtagatctgaacgactgcatcgacctcccgtgatcgttttgcagcgcggggcatgtggccaaggccaggaggacccgaactccttacgacataaatataacttcatcgccgacgtagtagagaaaattgccccagctgttgtccacatcgaactttttcgcaagctcccctttagcaaaagagaggtccccgtggcctctggcagcggattcatcgtctctgaggacggccttattgtcacaaacgcccacgtggttaccaacaagcaccgggtcaaggtggaactgaaaaacggtgctacctatgaggcaaagataaaggacgtggatgaaaaggcagatatcgctctcatcaagatcgatcatcagggcaagctgcccgtgcttctgctaggcagatcatccgagctgcgtccgggagagttcgtggtggccatcggatccccattttcccttcagaatactgtcaccaccggcatcgtctctacaactcagagagggggaaaggagttgggccttaggaactctgatatggactatatacagacagatgcgattataaactatggcaattccggcggccctctggtgaatctggacggagaggtaatcggtatcaacaccctcaaagttaccgctggaataagctttgccatcccctcagacaagatcaaaaagtttttgacagagagtcatgacagacaggccaaggggaaggccattacaaaaaagaagtatattggtattcgcatgatgtccctaactagttccaaggcaaaagaactgaaagacagacaccgggatttcccagatgtgatcagtggcgcctatattattgaggtgatccccgacacccccgcagaggcaggtgggctcaaggaaaatgatgtcataatctcaattaatggccagtccgtggtgagtgcaaacgatgtttctgacgtgatcaaaagagaatcaactctaaacatggtggtgagacgggggaacgaggacattatgatcacggtcattcccgaagagattgacccttag

SEQ ID NO: 131815 - DNA, 666 bp, Artificial Sequence
  derived and/or modified sequence
ggcaaactccccgtgctgctcctcggtagaagctctgaactgcgcccgggagagtttgtggtcgccattgggagccctttctctttgcagaacaccgtgactactggcatcgtgagcacgactcagcggggaggtaaggagctgggccttcgcaacagtgatatggactatatccaaaccgatgctatcattaactatggtaacagcggcgggccccttgtaaatctggatggggaagtgatcgggattaacaccctcaaagtgacggctggaatcagcttcgctatcccatctgataaaataaagaagtttctgacagaaagccatgatcgccaggctaaagggaaggccatcactaagaagaagtatatcggtatacgcatgatgtccctaacgagtagcaaggcaaaggaactcaaagaccggcaccgtgactttccggatgtcatcagtggcgcttacatcatagaggtgatcccagatacgcccgctgaagccggcgggctgaaagaaaacgatgtcatcattagtatcaatgggcagagcgtcgtctccgctaacgatgtgagtgacgtgatcaaaagagagtccacactgaatatggtggttaggcgcggcaatgaggatattatgatcaccgtcattccggaggagattgacccttag

SEQ ID NO: 131816 - DNA, 1344 bp, Artificial Sequence
  derived and/or modified sequence
atgggctgggccgccaggccacgggcacttgcacctgctgcaccagaggctctgcttcacagtccccgtagacgctcccctgccctcgccctgtctgcagccaccgctgcagcagcccgcggaccgggccgagttcgactattaaggggagtgcgcagggctcgtggtcggagagtaagacctgccggcggtcctgttcgccggggtgctgcagttcggggcgcccttcggggggcgtccctgggccatggcgctgcggctcgtgctggccggcctctgtgcgtgcgtcagcagctgagagcagcttcccggagaagcgagcgactgcaccgaccaccagtcattgtgcttcagaggggcgcctgcggtcagggtcaagaggacccaaattcattaagacataaatacaactttatagcagacgttgtcgagaagatagcacccgccgtggtccacatcgagttattccgcaagctgccgttcagtaagagggaagtgcccgtcgcatcaggtagtggcttcattgtgtccgaggatgggttgattgtgactaacgcacacgtcgttacaaacaaacatcgagtcaaggtggagctgaagaacggcgccacctacgaggcaaaaattaaagatgtggatgagaaggcggatatagcgctcatcaaaattgaccatcaggggaaactgccggtactgttgctgggcagaagcagtgaactgcggcccggcgagtttgtggtagccatcggctcacctttctctctgcaaaataccgtcacaaccggaatcgttagtaccacccagaggggtggaaaggagctgggccttcgaaactctgacatggactatatccagaccgacgccatcatcaattatggcaatagtggtggcccactggtgaacctggatggagaagtgatcggtattaacaccctcaaggtcaccgcgggcatctctttcgcaattccctccgataagatcaagaagttcctcacggaatcacatgatcgacaggccaaggggaaagcaatcacaaaaaaaaaatatatcggcatcaggatgatgagcttgacatcttccaaggcaaaggaattgaaagatagacaccgggacttccctgatgtaatttccggggcctacatcatcgaggtcattccagacacccctgctgaggctggaggcctgaaagaaaatgacgtcattattagtataaatggacagtccgtcgtcagtgccaacgatgtcagcgacgttatcaagcgcgaaagtacgctgaatatggtagtccgccgtgggaatgaagacattatgatcacggttatccccgaagagattgacccatag

SEQ ID NO: 131817 - DNA, 2120 bp, Artificial Sequence
  derived and/or modified sequence
caatgggctgggccgcgcggccgcgcgcactcgcacccgctgcccccgaggccctcctgcactctccccggcgccgctctccggccctcgccctgtccgccgccaccgccgccgccgccagagtcgccatgcagatcccgcgcgccgctcttctcccgctgctgctgctgctgctggcggcgcccgcctcggcgcagctgtcccgggccggccgctcggcgcctttggccgccgggtgcccagaccgctgcgagccggcgcgctgcccgccgcagccggagcactgcgagggcggccgggcccgggacgcgtgcggctgctgcgaggtgtgcggcgcgcccgagggcgccgcgtgcggcctgcaggagggcccgtgcggcgaggggctgcagtgcgtggtgcccttcggggtgccagcctcggccacggtgcggcggcgcgcgcaggccggcctctgtgtgtgcgccagcagcgagccggtgtgcggcagcgacgccaacacctacgccaacctgtgccagctgcgcgccgccagccgccgctccgagaggctgcaccggccgccggtcatcgtcctgcagcgcggagcctgcggccaagggcaggaagatcccaacagtttgcgccataaatataactttatcgcggacgtggtggagaagatcgcccctgccgtggttcatatcgaattgtttcgcaagcttccgttttctaaacgagaggtgccggtggctagtgggtctgggtttattgtgtcggaagatggactgatcgtgacaaatgcccacgtggtgaccaacaagcaccgggtcaaagttgagctgaagaacggtgccacttacgaagccaaaatcaaggatgtggatgagaaagcagacatcgcactcatcaaaattgaccaccagggcaagctgcctgtcctgctgcttggccgctcctcagagctgcggccgggagagttcgtggtcgccatcggaagcccgttttcccttcaaaacacagtcaccaccgggatcgtgagcaccacccagcgaggcggcaaagagctggggctccgcaactcagacatggactacatccagaccgacgccatcatcaactatggaaactcgggaggcccgttagtaaacctggacggtgaagtgattggaattaacactttgaaagtgacagctggaatctcctttgcaatcccatctgataagattaaaaagttcctcacggagtcccatgaccgacaggccaaaggaaaagccatcaccaagaagaagtatattggtatccgaatgatgtcactcacgtccagcaaagccaaagagctgaaggaccggcaccgggacttcccagacgtgatctcaggagcgtatataattgaagtaattcctgataccccagcagaagctggtggtctcaaggaaaacgacgtcataatcagcatcaatggacagtccgtggtctccgccaatgatgtcagcgacgtcattaaaagggaaagcaccctgaacatggtggtccgcaggggtaatgaagatatcatgatcacagtgattcccgaagaaattgacccataggcagaggcatgagctggacttcatgtttccctcaaagactctcccgtggatgacggatgaggactctgggctgctggaataggacactcaagacttttgactgccattttgtttgttcagtggagactccctggccaacagaatccttcttgatagtttgcaggcaaaacaaatgtaatgttgcagatccgcaggcagaagctctgcccttctgtatcctatgtatgcagtgtgctttttcttgccagcttgggccattcttgcttagacagtcagcatttgtctcctcctttaactgagtcatcatcttagtccaactaatgcagtcgatacaatgcgtagatagaagaagccccacgggagccaggatgggactggtcgtgtttgtgcttttctccaagtcagcacccaaaggtcaatgcacagagaccccgggtgggtgagcgctggcttctcaaacggccgaagttgcctcttttaggaatctctttggaattgggagcacgatgactctgagtttgagctattaaagtacttcttacacattgc

SEQ ID NO: 131818 - DNA, 1214 bp, Artificial Sequence
  derived and/or modified sequence
ggcaagctgcctgtcctgctgcttggccgctcctcagagctgcggccgggagagttcgtggtcgccatcggaagcccgttttcccttcaaaacacagtcaccaccgggatcgtgagcaccacccagcgaggcggcaaagagctggggctccgcaactcagacatggactacatccagaccgacgccatcatcaactatggaaactcgggaggcccgttagtaaacctggacggtgaagtgattggaattaacactttgaaagtgacagctggaatctcctttgcaatcccatctgataagattaaaaagttcctcacggagtcccatgaccgacaggccaaaggaaaagccatcaccaagaagaagtatattggtatccgaatgatgtcactcacgtccagcaaagccaaagagctgaaggaccggcaccgggacttcccagacgtgatctcaggagcgtatataattgaagtaattcctgataccccagcagaagctggtggtctcaaggaaaacgacgtcataatcagcatcaatggacagtccgtggtctccgccaatgatgtcagcgacgtcattaaaagggaaagcaccctgaacatggtggtccgcaggggtaatgaagatatcatgatcacagtgattcccgaagaaattgacccataggcagaggcatgagctggacttcatgtttccctcaaagactctcccgtggatgacggatgaggactctgggctgctggaataggacactcaagacttttgactgccattttgtttgttcagtggagactccctggccaacagaatccttcttgatagtttgcaggcaaaacaaatgtaatgttgcagatccgcaggcagaagctctgcccttctgtatcctatgtatgcagtgtgctttttcttgccagcttgggccattcttgcttagacagtcagcatttgtctcctcctttaactgagtcatcatcttagtccaactaatgcagtcgatacaatgcgtagatagaagaagccccacgggagccaggatgggactggtcgtgtttgtgcttttctccaagtcagcacccaaaggtcaatgcacagagaccccgggtgggtgagcgctggcttctcaaacggccgaagttgcctcttttaggaatctctttggaattgggagcacgatgactctgagtttgagctattaaagtacttcttacacattg

SEQ ID NO: 131819 - DNA, 1892 bp, Artificial Sequence
  derived and/or modified sequence
atgggctgggccgcgcggccgcgcgcactcgcacccgctgcccccgaggccctcctgcactctccccggcgccgctctccggccctcgccctgtccgccgccaccgccgccgccgccagaggcccgggacgcgtgcggctgctgcgaggtgtgcggcgcgcccgagggcgccgcgtgcggcctgcaggagggcccgtgcggcgaggggctgcagtgcgtggtgcccttcggggtgccagcctcggccacggtgcggcggcgcgcgcaggccggcctctgtgtgtgcgccagcagctgcgcgccgccagccgccgctccgagaggctgcaccggccgccggtcatcgtcctgcagcgcggagcctgcggccaagggcaggaagatcccaacagtttgcgccataaatataactttatcgcggacgtggtggagaagatcgcccctgccgtggttcatatcgaattgtttcgcaagcttccgttttctaaacgagaggtgccggtggctagtgggtctgggtttattgtgtcggaagatggactgatcgtgacaaatgcccacgtggtgaccaacaagcaccgggtcaaagttgagctgaagaacggtgccacttacgaagccaaaatcaaggatgtggatgagaaagcagacatcgcactcatcaaaattgaccaccagggcaagctgcctgtcctgctgcttggccgctcctcagagctgcggccgggagagttcgtggtcgccatcggaagcccgttttcccttcaaaacacagtcaccaccgggatcgtgagcaccacccagcgaggcggcaaagagctggggctccgcaactcagacatggactacatccagaccgacgccatcatcaactatggaaactcgggaggcccgttagtaaacctggacggtgaagtgattggaattaacactttgaaagtgacagctggaatctcctttgcaatcccatctgataagattaaaaagttcctcacggagtcccatgaccgacaggccaaaggaaaagccatcaccaagaagaagtatattggtatccgaatgatgtcactcacgtccagcaaagccaaagagctgaaggaccggcaccgggacttcccagacgtgatctcaggagcgtatataattgaagtaattcctgataccccagcagaagctggtggtctcaaggaaaacgacgtcataatcagcatcaatggacagtccgtggtctccgccaatgatgtcagcgacgtcattaaaagggaaagcaccctgaacatggtggtccgcaggggtaatgaagatatcatgatcacagtgattcccgaagaaattgacccataggcagaggcatgagctggacttcatgtttccctcaaagactctcccgtggatgacggatgaggactctgggctgctggaataggacactcaagacttttgactgccattttgtttgttcagtggagactccctggccaacagaatccttcttgatagtttgcaggcaaaacaaatgtaatgttgcagatccgcaggcagaagctctgcccttctgtatcctatgtatgcagtgtgctttttcttgccagcttgggccattcttgcttagacagtcagcatttgtctcctcctttaactgagtcatcatcttagtccaactaatgcagtcgatacaatgcgtagatagaagaagccccacgggagccaggatgggactggtcgtgtttgtgcttttctccaagtcagcacccaaaggtcaatgcacagagaccccgggtgggtgagcgctggcttctcaaacggccgaagttgcctcttttaggaatctctttggaattgggagcacgatgactctgagtttgagctattaaagtacttcttacacattg

SEQ ID NO: 131820 - DNA, 1443 bp, Artificial Sequence
  derived and/or modified sequence
atgcagatcccccgggccgccctgctgcccctgctgctgctgctgctggccgccccagccagcgcccagctgagcagagctggccgcagcgcccccctggccgccggctgcccagacagatgtgagcccgcccgctgccccccccagcctgagcactgtgagggcggccgggccagagatgcctgtggctgctgtgaggtgtgtggggcccctgagggcgccgcctgtggcctgcaggagggcccctgtggggagggcctgcagtgtgtggtgccctttggagtgcctgccagcgccaccgtgagaagaagagcccaggccggcctgtgtgtgtgtgccagcagcgagcctgtgtgtggcagtgatgccaacacctacgccaacctgtgccagctgcgggccgccagcagaagaagtgagcggctgcacaggcctcctgtgattgtgctgcagagaggagcctgtggccagggccaggaggaccccaacagcctgcggcacaagtacaacttcatcgcagatgtggtggagaagatcgccccagctgtggtgcacatcgagctgttcaggaagctgcccttcagcaagcgggaggtgcctgtggccagcggcagcggcttcatcgtgtctgaagatggcctgattgtgaccaatgcccacgtggtgaccaacaagcaccgggtgaaggtggagctgaagaatggagccacctatgaggccaagatcaaggatgtggatgagaaggctgacatcgccctgatcaagattgaccaccagggcaagctgcctgtgctgctgctgggccgcagcagcgagctgcggcctggagaatttgtggtggccatcggcagccccttcagcctgcagaacacagtgaccaccggcatcgtgtccaccacccagagaggaggcaaggagctgggcctgaggaacagcgacatggactacatccagacagatgccatcatcaactacggcaacagcggcggccccctggtgaacctggatggagaggtgattggcatcaacaccctgaaggtgacagctggcatcagctttgccatccccagcgacaagatcaagaagttcctgacagagagccatgaccggcaggccaagggcaaggccatcaccaagaagaagtacatcggcatccgcatgatgagcctgaccagcagcaaggccaaggagctgaaggacagacaccgggacttcccagatgtgatcagcggggcctacatcattgaagtcatcccagacaccccagctgaggccggcggcctgaaggaaaatgatgtgatcatcagcatcaatggccagagcgtggtgtctgccaatgatgtgtctgatgtgatcaagcgggagagcaccctgaacatggtggtgagaagaggaaatgaagacatcatgatcaccgtcatccctgaggagattgacccctag

SEQ ID NO: 131821 - DNA, 666 bp, Artificial Sequence
  derived and/or modified sequence
gggaagctgcctgtgctgctgctgggccgcagcagcgagctgcggcctggagaatttgtggtggccatcggcagccccttcagcctgcagaacacagtgaccactggaattgtgtccaccacccagaggggcggcaaggagctgggcctgaggaacagcgacatggactacatccagacagatgccatcatcaactacggcaacagcggcggccccctggtgaacctggatggagaggtgattggcatcaacaccctgaaggtgacagctggcatcagctttgccatccccagcgacaagatcaagaagttcctgacagagagccatgaccggcaggccaagggcaaggccatcaccaagaagaagtacatcggcatccgcatgatgagcctgaccagcagcaaggccaaggagctgaaggacagacaccgggacttcccagatgtgatcagcggggcctacatcatcgaggtgatcccagacaccccagctgaggccggcggcctgaaggaaaatgatgtgatcatcagcatcaatggccagagcgtggtgtctgccaatgatgtgtctgatgtgatcaagcgggagagcaccctgaacatggtggtgagaagaggaaatgaagacatcatgatcaccgtcatccctgaggagattgacccctag

SEQ ID NO: 131822 - DNA, 1344 bp, Artificial Sequence
  derived and/or modified sequence
atgggctgggccgcccggccccgggccctggccccagctgcccctgaggccctgctgcacagcccccggcggcgcagccctgccctggccctgtctgctgccacagctgctgctgcccggggccctggccgggtgcggctgctgcggggcgtgcggcgggcccggggcagaagagtgcggcctgctgggggccctgtgagaagaggagctgctgtgcggggggccctgcggggggccagcctgggccatggagctgctgcccgggccggccggcccctgtgtgtgcggcagcagctgcgggccgccagccgccgctctgagcggctgcaccggccccctgtgattgtgctgcagagaggagcctgtggccagggccaggaggaccccaacagcctgcggcacaagtacaacttcatcgcagatgtggtggagaagatcgccccagctgtggtgcacatcgagctgttcaggaagctgcccttcagcaagcgggaggtgcctgtggccagcggcagcggcttcatcgtgtctgaagatggcctcatcgtgaccaatgcccacgtggtgaccaacaagcaccgggtgaaggtggagctgaagaatggagccacctatgaggccaagatcaaggatgtggatgagaaggctgacatcgccctgatcaagattgaccaccagggcaagctgcctgtgctgctgctgggccgcagcagcgagctgcggcctggagaatttgtggtggccatcggcagccccttcagcctgcagaacacagtgaccactggaattgtgtccaccacccagaggggcggcaaggagctgggcctgaggaacagcgacatggactacatccagacagatgccatcatcaactacggcaacagcggcggccccctggtgaacctggatggagaggtgattggcatcaacaccctgaaggtgacagctggcatcagctttgccatccccagcgacaagatcaagaagttcctgacagagagccatgaccggcaggccaagggcaaggccatcaccaagaagaagtacatcggcatccgcatgatgagcctgaccagcagcaaggccaaggagctgaaggacagacaccgggacttcccagatgtgatcagcggggcctacatcatcgaggtgatcccagacaccccagctgaggccggcggcctgaaggaaaatgatgtgatcatcagcatcaatggccagagcgtggtgtctgccaatgatgtgtctgatgtgatcaagcgggagagcaccctgaacatggtggtgagaagaggaaatgaagacatcatgatcaccgtcatccctgaggagattgacccctag

SEQ ID NO: 131823 - DNA, 1443 bp, Artificial Sequence
  derived and/or modified sequence
atgcagatcccccgggccgccctgctgcccctgctgctgctgctgctggcagctcctgctagtgcgcagcttagtcgagccgggagatcagcacctctggccgcagggtgtcccgatagatgcgagccagcacgatgcccaccacagccagaacactgtgaaggcgggcgagcccgggacgcctgcgggtgttgtgaagtctgtggcgcaccggaaggcgccgcatgtggactacaggagggaccttgtggcgagggactgcagtgtgttgtccctttcggagtaccagcatccgcaactgtgcgacggagagcgcaggccgggctgtgtgtttgtgcgtcttctgaaccggtttgtggatctgacgcgaacacttacgcaaacctctgccagctcagagccgcctccagacgatcagaaagactccaccggccacctgttatagtcctgcagcgaggcgcatgcggacagggccaagaggatccaaatagcctgagacataaatacaatttcattgcagacgttgtggagaaaatcgcaccagctgtcgtgcatatcgagctgttcaggaagctgcccttctccaaacgagaagtgccagtggccagcgggagcggcttcattgtcagcgaggacggtttgattgtgaccaatgcccacgttgtgacgaacaagcaccgggtaaaggtggaactgaagaacggcgccacctatgaggcaaagattaaggatgtagatgagaaagccgatattgctcttattaagattgaccatcagggcaagttgccagtgctcttactggggcgctcatcggaactgcgcccgggggagtttgtagtcgccataggaagccccttctctttacagaacacagtgacaaccgggattgtttccacaacccagcggggtgggaaggagctgggactaagaaactccgatatggattatatccagaccgatgcgattatcaattacggaaattctggcggaccactcgttaatctggatggggaagtgatcgggattaacactttaaaggtgactgctggcatttcgttcgctatccccagtgataaaatcaagaagttcctgacggagagccatgataggcaggcaaagggtaaggccatcactaagaaaaagtacatcggcattcgaatgatgtccctcacctcatcaaaggccaaggagctaaaggataggcaccgcgacttccctgacgtcattagcggcgcatacattatagaagtcatcccagacacaccagccgaggcaggcggcctgaaggagaatgacgttatcatttccattaacggtcagagtgtggtgtctgctaacgatgtaagcgacgttatcaaacgagaatcgaccctaaatatggtcgtgcgccgagggaacgaggatatcatgatcaccgttatccccgaagagattgacccctag

SEQ ID NO: 131824 - DNA, 666 bp, Artificial Sequence
  derived and/or modified sequence
ggcaagctgcccgtgctgctgctgggccggagcagcgagctgcggcccggtgaattcgtagttgctatcggctccccattctcactgcaaaataccgttacgacaggcattgtgtcgactacccagaggggcgggaaggagctcgggctacggaattctgacatggactatatccagaccgacgcaattatcaactatggaaacagtggggggcctttggtgaacctagacggtgaagtcattggcataaacactctaaaagtgaccgctggcatatccttcgcgatcccctctgacaagattaaaaagttcctcaccgaatctcacgaccgtcaggctaaaggcaaagctattaccaaaaaaaagtatatcggtattcgtatgatgagcctaacctcttctaaagcaaaagagttgaaggaccgtcaccgcgattttcctgatgtaattagcggggcttacatcattgaagtgattcccgatactcccgcagaagcggggggccttaaggagaacgacgttattatatctattaacggacagagtgtagtgagtgctaacgacgtcagcgatgtgatcaagagagagagcactctgaacatggtcgtccggcggggcaacgaggatataatgatcacagtcattcccgaagagatagacccctag

SEQ ID NO: 131825 - DNA, 1344 bp, Artificial Sequence
  derived and/or modified sequence
atgggctgggccgcccggccccgggccctggcccccgccgcccccgaggccttgttgcacagcccaagaaggagatcacccgcattagcacttagcgcagctacagcagctgcggctcgcggacccgggcgagtacgccttctgcgtggcgtccggcgggctcgcgggcgcagagtgcgcccagcaggggggcctgttcggaggggcgccgcagtgcggggggcactgcggggagcttctctaggccatggcgccgccgcccgcgcagggagacccctgtgcgtcagacagcaactccgggcagcatcgcggcgaagcgaacgtctgcataggccgccagtaatcgtgctccagagaggagcctgcgggcaggggcaagaggacccaaacagtctcaggcataagtataattttattgccgacgttgtggagaaaatcgcccccgctgttgtacatatcgaactctttcggaagctgcctttttctaagcgggaggttcctgttgcctccggcagtggatttatcgtcagcgaggatggccttatcgttacgaacgcccacgttgtcaccaacaagcatcgtgtaaaggtggaactgaagaatggagccacctacgaggctaagattaaggatgtggatgaaaaggcagatattgcccttattaagatcgaccatcagggaaaactcccagtgttactgctcgggcgctcctcagagctcaggcctggagagttcgtggttgcaattgggtcacctttttcactccagaacacagttactactggaattgtctcgaccacgcaacggggcgggaaggaactggggctccggaactctgatatggattatatccagactgacgccattattaattacggtaattccggggggccgctggtgaatctggatggcgaagtgatcggcattaacacgctgaaagtgacggctggcatatccttcgccatccctagcgacaaaattaaaaagtttttgaccgaaagccatgacaggcaagctaaaggtaaggctataaccaagaaaaaatatataggtataagaatgatgtcacttacaagttccaaggctaaagagctaaaagaccggcatcgcgactttcccgatgtgatttcaggggcatatatcatcgaagtgattccagacaccccagccgaagctggcggacttaaggagaacgacgtgatcattagtatcaacggccagagcgtggtttctgccaatgatgtttctgacgttataaaaagggagtccaccctgaacatggtcgtgcgcagaggcaacgaggacattatgatcacagttattccagaagaaatcgacccatag

SEQ ID NO: 131826 - DNA, 1443 bp, Artificial Sequence
  derived and/or modified sequence
atgcagattcctagggcagcactcctaccccttctgttactgctgctggcggctccagcctctgcacaactgtctcgggctgggaggtccgcacctttggccgctggttgccctgaccgatgcgagcctgctcgctgcccccctcaaccagagcactgtgagggcggtcgagcacgggatgcatgcggctgctgtgaggtgtgcggggctccagaaggggcagcatgtgggctacaggagggcccatgtggggagggtctgcagtgtgtggttccattcggtgttcctgctagtgccacggtcaggcgtcgagctcaagcgggattatgtgtgtgcgcaagttccgagcccgtgtgtgggtctgatgctaatacctatgccaacctgtgccagctcagggccgcttcccggcgatctgaacgcctccacagaccacctgtgatagtgttgcagcgcggtgcctgtggtcagggccaggaggatccgaactccctaagacacaagtacaatttcattgccgatgtggttgagaaaatcgccccagccgtagtccacatagaactgttcagaaagttgccctttagtaagcgggaagtccctgtcgcaagtgggtcagggtttatcgtgtcagaagatggacttatcgtgaccaatgcccacgtggtgactaataagcatagagtgaaagtcgagttaaaaaatggtgccacctatgaagccaagattaaagatgttgacgagaaggctgatatagccctgattaagatagaccaccaaggaaaactcccagtgctgctgttgggaaggtcctcagaactgaggcctggcgaatttgtcgtagctatcggaagtcccttttcactgcagaacaccgtgaccaccggtatagtctcaacaacacagagaggcggaaaagagttaggtctcagaaacagtgatatggattacatccagaccgatgctataatcaattacggcaacagcggcggtcctctggtgaacctggacggcgaagtcataggaattaatacgctgaaggtgacagccggtatttcttttgcaattccctctgataagattaaaaaattcctcactgaatcccacgatagacaagccaaggggaaggctatcactaagaaaaaatatatcggtattcgcatgatgtctctcacaagctccaaagctaaagagctaaaagatcggcacagggacttccccgacgtcatttccggtgcatacattatagaggttatcccagatacaccagccgaagcgggtggactgaaggagaatgatgtcattatttccatcaacggacagtcggttgtgtcagccaatgacgtatcagatgtgatcaaacgtgagagtacattgaatatggtcgtccgcaggggtaatgaggatattatgataacggtcataccagaagaaatcgatccttag

SEQ ID NO: 131827 - DNA, 666 bp, Artificial Sequence
  derived and/or modified sequence
ggtaaactgcccgtgctccttctcggcagatcctcggagctgcgtcctggagagttcgttgtggccatcggatctccgttctccctgcaaaacacagtgactacgggcattgtttctactacacaacgcggaggcaaagaactcggactccgcaatagcgacatggattatattcagaccgatgctataataaactatggtaattccggtggaccacttgtgaatctggacggcgaagtgattggcatcaacacattaaaagttactgctggaattagctttgcgatcccctccgataaaattaaaaagttcctgaccgaaagtcacgataggcaggctaaagggaaagcaattactaagaaaaagtacattggaatccgcatgatgtcactgacctcatccaaagcgaaggagctgaaggacagacacagggattttccagatgtaatttccggagcttatatcatcgaggtaattccagacacacctgcggaagccggtgggctgaaagaaaatgatgtgataatatctattaacggccagagtgtggtatctgcgaatgatgttagcgatgtgataaaacgtgaatccactctaaatatggtggtccggcgtgggaatgaggacataatgatcaccgtgatcccagaggaaatcgatccatag

SEQ ID NO: 131828 - DNA, 1344 bp, Artificial Sequence
  derived and/or modified sequence
atggggtgggcagcccgaccacgggcactggccccagccgcacccgaggctctgcttcactcaccacgaaggaggagccccgctctcgcactctctgcagcaactgcagctgccgcacggggacccggacgggttcggctgctccggggagtgagaagagccagagggcgacgcgtcagacccgctggaggtcctgtcagacgcggagccgcagtgaggggcgctctcaggggcgcttccctcgggcacggagcggcagccagagccggaagacccctgtgtgtgcgccagcagctccgcgctgcaagcagacggtctgagaggctgcataggccaccggtgattgtcctgcagcgaggtgcctgtggtcaggggcaggaggaccctaatagcttgagacacaaatataatttcatagcagatgtcgtggagaagattgcacctgctgtggtgcatattgagctcttccgcaagctcccatttagtaaacgggaagttcctgtggcgtcgggatcagggttcatcgtttctgaggacgggctcattgttacaaatgcacatgtcgtgaccaataagcaccgggtgaaggtcgagctgaagaacggggctacgtatgaagcaaaaataaaggatgtggacgagaaggccgatatcgcgttaataaaaatagatcatcaagggaagctccctgtcctgttactggggaggtcgtccgagctgcggcctggagaatttgtggtagcaattggcagcccttttagcttgcagaatacggtcacaactggaatcgttagcacgacccagaggggtgggaaggagctgggactgcggaactccgacatggactacatccaaactgatgctatcatcaattatggaaattcaggcggtcccttggtgaatctggatggggaggtaatcggcataaacacactgaaagtgaccgcaggcatttcctttgcaatcccctccgataagatcaagaaatttctgaccgagtcccacgataggcaggctaaaggcaaggccataactaagaagaaatacatcggcatccggatgatgagcctgactagtagcaaagccaaggaactcaaggataggcaccgggactttcctgacgttattagcggcgcatatatcattgaagttatccctgacaccccagcggaggcgggaggccttaaagaaaatgatgttatcatatccatcaacgggcagtcagttgtgtccgctaacgatgtcagcgacgtgataaaaagagagtctacactaaatatggtggtccgcagagggaatgaagatatcatgatcacagtgataccagaggagatcgacccgtag

SEQ ID NO: 131829 - DNA, 1443 bp, Artificial Sequence
  derived and/or modified sequence
atgcagatccccagagccgccctgctgcccctgctgctgctgctgctggccgcccccgccagcgcccagctgagcagagccggcagaagcgcccccctggccgccggctgccccgacagatgcgagcccgccagatgccccccccagcccgagcactgcgagggcggcagagccagagacgcctgcggctgctgcgaggtgtgcggcgcccccgagggcgccgcctgcggcctgcaggagggcccctgcggcgagggcctgcagtgcgtggtgcccttcggcgtgcccgccagcgccaccgtgagaagaagagcccaggccggcctgtgcgtgtgcgccagcagcgagcccgtgtgcggcagcgacgccaacacctacgccaacctgtgccagctgagagccgccagcagaagaagcgagagactgcacagaccccccgtgatcgtgctgcagagaggcgcctgcggccagggccaggaggaccccaacagcctgagacacaagtacaacttcatcgccgacgtggtggagaagatcgcccccgccgtggtgcacatcgagctgttcagaaagctgcccttcagcaagagagaggtgcccgtggccagcggcagcggcttcatcgtgagcgaggacggcctgatcgtgaccaacgcccacgtggtgaccaacaagcacagagtgaaggtggagctgaagaacggcgccacctacgaggccaagatcaaggacgtggacgagaaggccgacatcgccctgatcaagatcgaccaccagggcaagctgcccgtgctgctgctgggcagaagcagcgagctgagacccggcgagttcgtggtggccatcggcagccccttcagcctgcagaacaccgtgaccaccggcatcgtgagcaccacccagagaggcggcaaggagctgggcctgagaaacagcgacatggactacatccagaccgacgccatcatcaactacggcaacagcggcggccccctggtgaacctggacggcgaggtgatcggcatcaacaccctgaaggtgaccgccggcatcagcttcgccatccccagcgacaagatcaagaagttcctgaccgagagccacgacagacaggccaagggcaaggccatcaccaagaagaagtacatcggcatcagaatgatgagcctgaccagcagcaaggccaaggagctgaaggacagacacagagacttccccgacgtgatcagcggcgcctacatcatcgaggtgatccccgacacccccgccgaggccggcggcctgaaggagaacgacgtgatcatcagcatcaacggccagagcgtggtgagcgccaacgacgtgagcgacgtgatcaagagagagagcaccctgaacatggtggtgagaagaggcaacgaggacatcatgatcaccgtgatccccgaggagatcgacccctag

SEQ ID NO: 131830 - DNA, 666 bp, Artificial Sequence
  derived and/or modified sequence
ggcaagctgcccgtgctgctgctgggcagaagcagcgagctgagacccggcgagttcgtggtggccatcggcagccccttcagcctgcagaacaccgtgaccaccggcatcgtgagcaccacccagagaggcggcaaggagctgggcctgagaaacagcgacatggactacatccagaccgacgccatcatcaactacggcaacagcggcggccccctggtgaacctggacggcgaggtgatcggcatcaacaccctgaaggtgaccgccggcatcagcttcgccatccccagcgacaagatcaagaagttcctgaccgagagccacgacagacaggccaagggcaaggccatcaccaagaagaagtacatcggcatcagaatgatgagcctgaccagcagcaaggccaaggagctgaaggacagacacagagacttccccgacgtgatcagcggcgcctacatcatcgaggtgatccccgacacccccgccgaggccggcggcctgaaggagaacgacgtgatcatcagcatcaacggccagagcgtggtgagcgccaacgacgtgagcgacgtgatcaagagagagagcaccctgaacatggtggtgagaagaggcaacgaggacatcatgatcaccgtgatccccgaggagatcgacccctag

SEQ ID NO: 131831 - DNA, 1344 bp, Artificial Sequence
  derived and/or modified sequence
atgggctgggccgccagacccagagccctggcccccgccgcccccgaggccctgctgcacagccccagaagaagaagccccgccctggccctgagcgccgccaccgccgccgccgccagaggccccggcagagtgagactgctgagaggcgtgagaagagccagaggcagaagagtgagacccgccggcggccccgtgagaagaggcgccgccgtgagaggcgccctgagaggcgccagcctgggccacggcgccgccgccagagccggcagacccctgtgcgtgagacagcagctgagagccgccagcagaagaagcgagagactgcacagaccccccgtgatcgtgctgcagagaggcgcctgcggccagggccaggaggaccccaacagcctgagacacaagtacaacttcatcgccgacgtggtggagaagatcgcccccgccgtggtgcacatcgagctgttcagaaagctgcccttcagcaagagagaggtgcccgtggccagcggcagcggcttcatcgtgagcgaggacggcctgatcgtgaccaacgcccacgtggtgaccaacaagcacagagtgaaggtggagctgaagaacggcgccacctacgaggccaagatcaaggacgtggacgagaaggccgacatcgccctgatcaagatcgaccaccagggcaagctgcccgtgctgctgctgggcagaagcagcgagctgagacccggcgagttcgtggtggccatcggcagccccttcagcctgcagaacaccgtgaccaccggcatcgtgagcaccacccagagaggcggcaaggagctgggcctgagaaacagcgacatggactacatccagaccgacgccatcatcaactacggcaacagcggcggccccctggtgaacctggacggcgaggtgatcggcatcaacaccctgaaggtgaccgccggcatcagcttcgccatccccagcgacaagatcaagaagttcctgaccgagagccacgacagacaggccaagggcaaggccatcaccaagaagaagtacatcggcatcagaatgatgagcctgaccagcagcaaggccaaggagctgaaggacagacacagagacttccccgacgtgatcagcggcgcctacatcatcgaggtgatccccgacacccccgccgaggccggcggcctgaaggagaacgacgtgatcatcagcatcaacggccagagcgtggtgagcgccaacgacgtgagcgacgtgatcaagagagagagcaccctgaacatggtggtgagaagaggcaacgaggacatcatgatcaccgtgatccccgaggagatcgacccctag

SEQ ID NO: 131832 - protein, 276 aa, Artificial Sequence
  derived and/or modified sequence
MRAPHLHLSAASGARALAKLLPLLMAQLWAAEAALLPQNDTRLDPEAYGSPCARGSQPWQVSLFNGLSFHCAGVLVDQSWVLTAAHCGNKPLWARVGDDHLLLLQGEQLRRTTRSVVHPKYHQGSGPILPRRTDEHDLMLLKLARPVVLGPRVRALQLPYRCAQPGDQCQVAGWGTTAARRVKYNKGLTCSSITILSPKECEVFYPGVVTNNMICAGLDRGQDPCQSDSGGPLVCDETLQGILSWGVYPCGSAQHPAVYTQICKYMSWINKVIRSN

SEQ ID NO: 131833 - DNA, 204 bp, Artificial Sequence
  derived and/or modified sequence
atgcggaagccccaggccggcaccggcgaggccgcccgggacccctcgttgcggcctgcacggacagttctggtcggcgaccaggatgagtataccgcagcggagaataagtctcctcgcggaacactatgccctaccggcgagcagaggattcatgccagggaggatgcatgtattttctcccgccttttctccgagaagtag

SEQ ID NO: 131834 - DNA, 831 bp, Artificial Sequence
  derived and/or modified sequence
atgagagccccccacctgcacctgagcgccgccagcggcgccagagccctggccaagctgctgcccctgctgatggcccagctgtgggccgccgaggccgccctgctgccccagaacgacaccagactggaccccgaggcctacggcagcccctgcgccagaggcagccagccctggcaggtgagcctgttcaacggcctgagcttccactgcgccggcgtgctggtggaccagagctgggtgctgaccgccgcccactgcggcaacaagcccctgtgggccagagtgggcgacgaccacctgctgctgctgcagggcgagcagctgagaagaaccaccagaagcgtggtgcaccccaagtaccaccagggcagcggccccatcctgcccagaagaaccgacgagcacgacctgatgctgctgaagctggccagacccgtggtgctgggccccagagtgagagccctgcagctgccctacagatgcgcccagcccggcgaccagtgccaggtggccggctggggcaccaccgccgccagaagagtgaagtacaacaagggcctgacctgcagcagcatcaccatcctgagccccaaggagtgcgaggtgttctaccccggcgtggtgaccaacaacatgatctgcgccggcctggacagaggccaggacccctgccagagcgacagcggcggccccctggtgtgcgacgagaccctgcagggcatcctgagctggggcgtgtacccctgcggcagcgcccagcaccccgccgtgtacacccagatctgcaagtacatgagctggatcaacaaggtgatcagaagcaactag

SEQ ID NO: 131835 - DNA, 831 bp, Artificial Sequence
  derived and/or modified sequence
atgcgagccccccatctccacctctccgccgcttcaggggccagggcactggctaaactcttaccgctgttgatggcccagctgtgggccgctgaggcagccctcttgccccagaacgacaccagattagaccccgaagcatatgggagcccctgcgcgcggggaagtcagccctggcaggtgagtctattcaatgggctgagttttcattgcgccggcgtgctagttgatcagagctgggtacttactgcagcccactgcgggaataagccactatgggccagagtgggcgacgaccacctattgctgttgcagggcgagcagctccggaggactacgagaagcgtggtccatcccaagtatcatcaaggatccgggccaatcctgccaaggcggaccgacgagcacgatctgatgctcctgaaactcgcccggcctgtggtgttagggccccgtgtcagggctttgcagctcccttatcgctgcgcgcagccgggcgatcagtgtcaggttgccggctggggcaccaccgccgcccgcagggttaaatataataaggggctcacctgttctagtatcacaattctctctccaaaagagtgcgaagtgttttatccaggcgtggtgactaacaatatgatatgcgccggcctcgatcgtggacaggatccgtgtcagagtgatagcggcggcccccttgtgtgtgatgaaaccctgcaggggatactgtcctggggtgtgtacccttgtggatcagctcagcaccctgcggtgtacacccagatctgcaagtacatgtcctggatcaacaaggtcatcaggtccaactag

SEQ ID NO: 131836 - DNA, 831 bp, Artificial Sequence
  derived and/or modified sequence
atgcgggcgcctcaccttcatctgagcgcagcctctggtgcccgggcactggcgaaactgctccccctgctgatggcacagctctgggctgccgaggcggctttactgccacagaatgataccagactggaccccgaagcatatggctctccttgcgctaggggctcccagccttggcaggtgagcctctttaatggtctgtccttccactgtgccggagtgctggtagatcagtcctgggtcctgaccgccgcccattgtggcaacaaacctctctgggcgcgggtaggcgatgaccacctacttcttctacagggagagcagctgaggaggaccaccaggagtgtagtacaccccaaatatcaccagggatctggtccaattctgccccggagaacagacgagcatgacctcatgttgctgaagttagcgaggcccgtggtgcttggcccccgggtgagagcgcttcaacttccttataggtgcgcccagcctggtgaccaatgtcaggtggctggatggggtaccacagcggctagacgcgttaagtataataagggcctgacttgtagctccatcacaatactctcaccaaaagaatgcgaggtcttttacccaggagttgtcacaaataatatgatttgcgccggactggatcgaggacaggacccatgtcagtcagattccggcggcccgttggtttgcgacgagacgctccaggggatcttgtcttggggggtttacccatgcgggtcagcccagcaccctgcagtgtacactcagatatgtaaatacatgtcatggattaataaggtgatacgatcaaactag

SEQ ID NO: 131837 - DNA, 831 bp, Artificial Sequence
  derived and/or modified sequence
atgagggccccacaccttcacctgtcggccgctagcggagcacgcgcactggctaaactgctccctctattgatggcccagctgtgggccgccgaggcagcgctgctcccacagaatgacacacggcttgacccagaagcatacggcagcccatgtgccaggggctcccagccttggcaggtgtccttgttcaatgggctcagtttccactgcgctggagttctcgtcgaccaatcatgggtgctcacggccgcacactgcggcaacaaaccgctttgggccagagtgggcgacgaccatctgttgttgttacagggggagcagctgcgtcgcacaacccgctcagttgtgcaccctaagtatcaccagggatccgggccgatccttcctagacgcacagatgaacatgatcttatgctgctgaagcttgcccgccctgtagtcctggggcctcgcgtccgggcattgcagctgccgtatcgttgcgcacaacccggagaccagtgtcaggtcgccgggtgggggaccaccgcagcaagaagagtgaagtacaacaaggggctgacctgtagctcaattacaattttgagtcctaaagagtgcgaggttttttaccctggtgtcgtcactaataatatgatatgtgccggattagataggggccaagatccttgccaatccgatagtggaggacccctggtttgcgatgaaacattgcagggtatcttaagctggggcgtgtacccttgtggcagcgcccagcaccctgcggtttatacgcaaatctgtaaatatatgagttggatcaacaaagttatccgatcaaattag

SEQ ID NO: 131838 - DNA, 831 bp, Artificial Sequence
  derived and/or modified sequence
atgagggccccccacctgcacctgtctgctgccagcggggcccgggccctggccaagctgctgcccctgctgatggcccagctgtgggccgctgaggccgccctgctgccccagaatgacacccggctggaccctgaggcctacggcagcccctgtgcccggggcagccagccctggcaggtgtccctcttcaacggcctgtccttccactgtgccggcgtgctggtggaccagagctgggtgctgacagctgcccactgcggcaacaagcccctgtgggcccgggtgggagatgaccacctgctgctgctgcagggcgagcagctgcggaggaccaccaggtctgtggtgcaccccaagtaccaccagggcagcggccccatcctgcccaggagaacagatgaacatgacctgatgctgctgaagctggcccggcctgtggtgctgggcccccgggtgcgggccctgcagctgccctaccgctgtgcccagcccggggaccagtgccaggtggccggctggggcaccacagctgcccggcgggtgaagtacaacaagggcctgacctgcagcagcatcaccatcctgagccccaaggaatgtgaggtgttctacccaggagtggtgaccaacaacatgatctgtgccggcctggaccggggccaggacccctgccagagcgacagcggcggccccctggtgtgtgatgagaccctgcagggcatcctgtcctggggcgtgtacccctgtggcagcgcccagcaccctgctgtgtacacccagatctgcaagtacatgtcctggatcaacaaggtgatccgcagcaactag

SEQ ID NO: 131839 - DNA, 3105 bp, Artificial Sequence
  derived and/or modified sequence
catcctgccacccctagccttgctggggacgtgaaccctctccccgcgcctgggaagccttcttggcaccgggacccggagaatccccacggaagccagttccaaaagggatgaaaagggggcgtttcgggcactgggagaagcctgtattccagggcccctcccagagcaggaatctgggacccaggagtgccagcctcacccacgcagatcctggccatgagagctccgcacctccacctctccgccgcctctggcgcccgggctctggcgaagctgctgccgctgctgatggcgcaactctgggccgcagaggcggcgctgctcccccaaaacgacacgcgcttggaccccgaagcctatggctccccgtgcgcgcgcggctcgcagccctggcaggtctcgctcttcaacggcctctcgttccactgcgcgggtgtcctggtggaccagagttgggtgctgacggccgcgcactgcggaaacaagccactgtgggctcgagtaggggatgaccacctgctgcttcttcagggagagcagctccgccggaccactcgctctgttgtccatcccaagtaccaccagggctcaggccccatcctgccaaggcgaacggatgagcacgatctcatgttgctgaagctggccaggcccgtagtgctggggccccgcgtccgggccctgcagcttccctaccgctgtgctcagcccggagaccagtgccaggttgctggctggggcaccacggccgcccggagagtgaagtacaacaagggcctgacctgctccagcatcactatcctgagccctaaagagtgtgaggtcttctaccctggcgtggtcaccaacaacatgatatgtgctggactggaccggggccaggacccttgccagagtgactctggaggccccctggtctgtgacgagaccctccaaggcatcctctcgtggggtgtttacccctgtggctctgcccagcatccagctgtctacacccagatctgcaaatacatgtcctggatcaataaagtcatacgctccaactgatccagatgctacgctccagctgatccagatgttatgctcctgctgatccagatgcccagaggctccatcgtccatcctcttcctccccagtcggctgaactctccccttgtctgcactgttcaaacctctgccgccctccacacctctaaacatctcccctctcacctcattcccccacctatccccattctctgcctgtactgaagctgaaatgcaggaagtggtggcaaaggtttattccagagaagccaggaagccggtcatcacccagcctctgagagcagttactggggtcacccaacctgacttcctctgccactccctgctgtgtgactttgggcaagccaagtgccctctctgaacctcagtttcctcatctgcaaaatgggaacaatgacgtgcctacctcttagacatgttgtgaggagactatgatataacatgtgtatgtaaatcttcatggtgattgtcatgtaaggcttaacacagtgggtggtgagttctgactaaaggttacctgttgtcgtgatctgaccacgtcccggtgaaagcgtgtgtccagggaagaagtgcacagggtagcccccagtcccaaccttccatccccaacccttagggatgatggaagaatcattttcctcaccctagttccaagtcccaggaaacaccttttaaccacttccttctcatctcccactgtttcccacttctggttccacccaacaccagttcctccgagctaggctggccctgagtcattagcaccttctctgccttcatgaggccactgaactcaagggacctcaccttgcttctatcccagcctctaagaccagagggccgagggggtagtgaagattgggaaacccttgccacctcaactgcccagcttgtgccaagaaacctccctctgacatttaggggaaaatctttggtttgtctgttattaattggctgtgagattttcgtcctgaaaacttgggaggaggaattgtttgattctccctgaaattgggggagggaaggggagttaatacacagaatccaggtaaggctaatagaagcttcagtgtccgctgggtgtggtggctcacgcctgtaatcctagcactttgggaggccgaggaaagcagatcatctgaggtcaggtgttcgagaccagtctggccaaaatggtgaaatcccatctctactgaaaatacaaaaactagccaggcatggtggcaggcacctataatcccatctacttgggaggctgaggcagaagaatcacttgaacccggggggcagaggttgcagtgagccaagattgcaccattgcactccatccagcctggacaaaagagcaaaactccatctcaaaaaaagaagaagtttgagtgtctcagcttatcctgaactttgaagcagtaacataagctagctgaatataggcacaacagaaatttcccattaagcacggggtttttgtttgtttgtttgtcctttcagttaccaatttatggagcatctattatgtgccaggcccagtgctgggtgctggggacatacgtaggggtgatcacaaggtcccccaccctgcagagcccacaggaggttgatgtacaaggtctgagcacacagctcccttccgtggcctctttcccattctgcccccattagcacacgcaggaaatgtcagacaggcgtatcagctgggtttgtcatccaaagaccagaagcgaggtcggtggaaacttgaaaactcgattcattattaaaggcaactcacccgtccctttagtcactccacaatgtttatcgagccacgtcttatgccaggcctcaaagatgaatcagaccaggcactaccctcaaggagctgctagttaggtcagggagacaggccagtcttacattcctgtcattcaggtctccactcaaaagtcacctcctccgggaggccttcctgaattgcccaggctataggagtccacttttggtcatccagtcccgatgctctgttttttgtttgtttgtttttttttttaatagcacctattatacctgaaatt

SEQ ID NO: 131840 - DNA, 2967 bp, Artificial Sequence
  derived and/or modified sequence
accagcggcagaccacaggcagggcagaggcacgtctgggtcccctccctccttcctatcggcgactcccagatcctggccatgagagctccgcacctccacctctccgccgcctctggcgcccgggctctggcgaagctgctgccgctgctgatggcgcaactctgggccgcagaggcggcgctgctcccccaaaacgacacgcgcttggaccccgaagcctatggctccccgtgcgcgcgcggctcgcagccctggcaggtctcgctcttcaacggcctctcgttccactgcgcgggtgtcctggtggaccagagttgggtgctgacggccgcgcactgcggaaacaagccactgtgggctcgagtaggggatgaccacctgctgcttcttcagggagagcagctccgccggaccactcgctctgttgtccatcccaagtaccaccagggctcaggccccatcctgccaaggcgaacggatgagcacgatctcatgttgctgaagctggccaggcccgtagtgctggggccccgcgtccgggccctgcagcttccctaccgctgtgctcagcccggagaccagtgccaggttgctggctggggcaccacggccgcccggagagtgaagtacaacaagggcctgacctgctccagcatcactatcctgagccctaaagagtgtgaggtcttctaccctggcgtggtcaccaacaacatgatatgtgctggactggaccggggccaggacccttgccagagtgactctggaggccccctggtctgtgacgagaccctccaaggcatcctctcgtggggtgtttacccctgtggctctgcccagcatccagctgtctacacccagatctgcaaatacatgtcctggatcaataaagtcatacgctccaactgatccagatgctacgctccagctgatccagatgttatgctcctgctgatccagatgcccagaggctccatcgtccatcctcttcctccccagtcggctgaactctccccttgtctgcactgttcaaacctctgccgccctccacacctctaaacatctcccctctcacctcattcccccacctatccccattctctgcctgtactgaagctgaaatgcaggaagtggtggcaaaggtttattccagagaagccaggaagccggtcatcacccagcctctgagagcagttactggggtcacccaacctgacttcctctgccactccctgctgtgtgactttgggcaagccaagtgccctctctgaacctcagtttcctcatctgcaaaatgggaacaatgacgtgcctacctcttagacatgttgtgaggagactatgatataacatgtgtatgtaaatcttcatggtgattgtcatgtaaggcttaacacagtgggtggtgagttctgactaaaggttacctgttgtcgtgatctgaccacgtcccggtgaaagcgtgtgtccagggaagaagtgcacagggtagcccccagtcccaaccttccatccccaacccttagggatgatggaagaatcattttcctcaccctagttccaagtcccaggaaacaccttttaaccacttccttctcatctcccactgtttcccacttctggttccacccaacaccagttcctccgagctaggctggccctgagtcattagcaccttctctgccttcatgaggccactgaactcaagggacctcaccttgcttctatcccagcctctaagaccagagggccgagggggtagtgaagattgggaaacccttgccacctcaactgcccagcttgtgccaagaaacctccctctgacatttaggggaaaatctttggtttgtctgttattaattggctgtgagattttcgtcctgaaaacttgggaggaggaattgtttgattctccctgaaattgggggagggaaggggagttaatacacagaatccaggtaaggctaatagaagcttcagtgtccgctgggtgtggtggctcacgcctgtaatcctagcactttgggaggccgaggaaagcagatcatctgaggtcaggtgttcgagaccagtctggccaaaatggtgaaatcccatctctactgaaaatacaaaaactagccaggcatggtggcaggcacctataatcccatctacttgggaggctgaggcagaagaatcacttgaacccggggggcagaggttgcagtgagccaagattgcaccattgcactccatccagcctggacaaaagagcaaaactccatctcaaaaaaagaagaagtttgagtgtctcagcttatcctgaactttgaagcagtaacataagctagctgaatataggcacaacagaaatttcccattaagcacggggtttttgtttgtttgtttgtcctttcagttaccaatttatggagcatctattatgtgccaggcccagtgctgggtgctggggacatacgtaggggtgatcacaaggtcccccaccctgcagagcccacaggaggttgatgtacaaggtctgagcacacagctcccttccgtggcctctttcccattctgcccccattagcacacgcaggaaatgtcagacaggcgtatcagctgggtttgtcatccaaagaccagaagcgaggtcggtggaaacttgaaaactcgattcattattaaaggcaactcacccgtccctttagtcactccacaatgtttatcgagccacgtcttatgccaggcctcaaagatgaatcagaccaggcactaccctcaaggagctgctagttaggtcagggagacaggccagtcttacattcctgtcattcaggtctccactcaaaagtcacctcctccgggaggccttcctgaattgcccaggctataggagtccacttttggtcatccagtcccgatgctctgttttttgtttgtttgtttttttttttaatagcacctattatacctgaaatt

SEQ ID NO: 131841 - DNA, 3006 bp, Artificial Sequence
  derived and/or modified sequence
acaatctcccttttcaagccagcctctgtccctcctactcaacctgctttatctctaggccttcctccttcctcttccacagtctggcttctcacattgtcactctagcagatcctggccatgagagctccgcacctccacctctccgccgcctctggcgcccgggctctggcgaagctgctgccgctgctgatggcgcaactctgggccgcagaggcggcgctgctcccccaaaacgacacgcgcttggaccccgaagcctatggctccccgtgcgcgcgcggctcgcagccctggcaggtctcgctcttcaacggcctctcgttccactgcgcgggtgtcctggtggaccagagttgggtgctgacggccgcgcactgcggaaacaagccactgtgggctcgagtaggggatgaccacctgctgcttcttcagggagagcagctccgccggaccactcgctctgttgtccatcccaagtaccaccagggctcaggccccatcctgccaaggcgaacggatgagcacgatctcatgttgctgaagctggccaggcccgtagtgctggggccccgcgtccgggccctgcagcttccctaccgctgtgctcagcccggagaccagtgccaggttgctggctggggcaccacggccgcccggagagtgaagtacaacaagggcctgacctgctccagcatcactatcctgagccctaaagagtgtgaggtcttctaccctggcgtggtcaccaacaacatgatatgtgctggactggaccggggccaggacccttgccagagtgactctggaggccccctggtctgtgacgagaccctccaaggcatcctctcgtggggtgtttacccctgtggctctgcccagcatccagctgtctacacccagatctgcaaatacatgtcctggatcaataaagtcatacgctccaactgatccagatgctacgctccagctgatccagatgttatgctcctgctgatccagatgcccagaggctccatcgtccatcctcttcctccccagtcggctgaactctccccttgtctgcactgttcaaacctctgccgccctccacacctctaaacatctcccctctcacctcattcccccacctatccccattctctgcctgtactgaagctgaaatgcaggaagtggtggcaaaggtttattccagagaagccaggaagccggtcatcacccagcctctgagagcagttactggggtcacccaacctgacttcctctgccactccctgctgtgtgactttgggcaagccaagtgccctctctgaacctcagtttcctcatctgcaaaatgggaacaatgacgtgcctacctcttagacatgttgtgaggagactatgatataacatgtgtatgtaaatcttcatggtgattgtcatgtaaggcttaacacagtgggtggtgagttctgactaaaggttacctgttgtcgtgatctgaccacgtcccggtgaaagcgtgtgtccagggaagaagtgcacagggtagcccccagtcccaaccttccatccccaacccttagggatgatggaagaatcattttcctcaccctagttccaagtcccaggaaacaccttttaaccacttccttctcatctcccactgtttcccacttctggttccacccaacaccagttcctccgagctaggctggccctgagtcattagcaccttctctgccttcatgaggccactgaactcaagggacctcaccttgcttctatcccagcctctaagaccagagggccgagggggtagtgaagattgggaaacccttgccacctcaactgcccagcttgtgccaagaaacctccctctgacatttaggggaaaatctttggtttgtctgttattaattggctgtgagattttcgtcctgaaaacttgggaggaggaattgtttgattctccctgaaattgggggagggaaggggagttaatacacagaatccaggtaaggctaatagaagcttcagtgtccgctgggtgtggtggctcacgcctgtaatcctagcactttgggaggccgaggaaagcagatcatctgaggtcaggtgttcgagaccagtctggccaaaatggtgaaatcccatctctactgaaaatacaaaaactagccaggcatggtggcaggcacctataatcccatctacttgggaggctgaggcagaagaatcacttgaacccggggggcagaggttgcagtgagccaagattgcaccattgcactccatccagcctggacaaaagagcaaaactccatctcaaaaaaagaagaagtttgagtgtctcagcttatcctgaactttgaagcagtaacataagctagctgaatataggcacaacagaaatttcccattaagcacggggtttttgtttgtttgtttgtcctttcagttaccaatttatggagcatctattatgtgccaggcccagtgctgggtgctggggacatacgtaggggtgatcacaaggtcccccaccctgcagagcccacaggaggttgatgtacaaggtctgagcacacagctcccttccgtggcctctttcccattctgcccccattagcacacgcaggaaatgtcagacaggcgtatcagctgggtttgtcatccaaagaccagaagcgaggtcggtggaaacttgaaaactcgattcattattaaaggcaactcacccgtccctttagtcactccacaatgtttatcgagccacgtcttatgccaggcctcaaagatgaatcagaccaggcactaccctcaaggagctgctagttaggtcagggagacaggccagtcttacattcctgtcattcaggtctccactcaaaagtcacctcctccgggaggccttcctgaattgcccaggctataggagtccacttttggtcatccagtcccgatgctctgttttttgtttgtttgtttttttttttaatagcacctattatacctgaaatt

SEQ ID NO: 131842 - DNA, 831 bp, Artificial Sequence
  derived and/or modified sequence
atgcgggccccccacctgcacctgagcgccgccagcggcgcccgggccctggccaagcttttgcccctgcttatggctcaactatgggctgccgaagcggctctgttgccccagaatgatactaggctcgatccagaggcatacggttccccatgtgctcgcgggtcacaaccttggcaggtgtctctatttaatggattgtcatttcattgtgccggcgtgctcgtcgaccagtcctgggtactcactgccgcccattgcggtaataaaccgctgtgggctagggtgggtgatgatcatttgctgcttttgcagggtgagcagctgcgacgaactactaggagtgtggttcacccaaagtatcatcagggcagtgggcctatcctgcctcgtcgcactgatgagcacgacctgatgctgttgaaactggcccggcccgtggtgctgggccctcgtgtcagagcattgcagctcccgtacaggtgcgcccagccaggggatcagtgtcaggtggcaggatggggaactaccgcagcaagacgtgtgaagtacaacaaggggctcacttgttcatccataaccattctgtcaccaaaggagtgcgaggtcttctatcccggggtagtaactaacaatatgatttgtgctgggctggatagggggcaggatccatgccaatcagatagcggagggcccctggtgtgtgacgaaaccctgcaaggaatcctgagctggggcgtttacccatgcgggtccgctcagcacccagctgtgtatactcagatctgtaaatatatgtcctggatcaataaggtgatccgctccaactag

SEQ ID NO: 131843 - DNA, 831 bp, Artificial Sequence
  derived and/or modified sequence
atgcgggccccccacctgcacctgagcgccgccagcggcgcccgggcgctggccaaactactgccattgctgatggcacagctgtgggcagcagaggccgcattgctgccacagaacgatacccgactcgaccctgaggcctacgggtcaccatgcgcaagaggctcgcagccgtggcaggtcagcctctttaacgggctgtcatttcattgtgccggagtgctagtcgaccagtcctgggtactaaccgcggcccactgcggtaacaagcccctctgggccagggtcggcgatgatcacctattgctcttacagggcgaacagttgaggcgcacaacaaggagcgtagtgcatccaaagtaccaccaaggtagcggacccatcctgcctaggcgaaccgacgagcacgaccttatgcttttgaagctggccaggcccgtcgtgttggggccacgcgtgcgtgctctgcagctgccctacaggtgcgcccagccaggagaccagtgtcaggtggccggatggggcaccaccgccgcacgccgcgtcaagtacaacaaaggtttgacatgcagcagcatcacgattctgtcccccaaggagtgtgaagtgttctaccccggcgtcgtgaccaataacatgatctgcgccggcctagaccgaggtcaggatccctgtcagagcgatagcggaggcccactggtgtgtgatgagaccctgcagggtatcctgtcttggggtgtttatccctgtggttctgctcagcaccctgccgtgtacacacagatttgtaagtatatgagctggataaacaaagtgatccgatcaaattag

SEQ ID NO: 131844 - DNA, 831 bp, Artificial Sequence
  derived and/or modified sequence
atgcgggccccccacctgcacctgagcgccgccagcggcgcccgggccctggctaaattgttaccgctgctaatggcacaattgtgggcggcggaggccgctttgctgccccaaaacgacacaagattagacccggaggcctacgggagcccctgcgcccgcggctctcagccatggcaggtgagtctgtttaacggactctcctttcattgcgccggtgtgttggtcgaccagagttgggttttgacagccgctcattgcggcaacaaacccctgtgggctagagtcggcgacgaccatcttctccttttacagggggagcaactgcgtcgcaccactcggagcgtcgtgcaccctaagtaccaccagggatccgggcctatcctccctagaagaaccgacgaacacgatctgatgctgttgaaactggctcgccccgttgtccttggaccccgggtgcgtgcgctgcagctgccctacagatgcgcgcagcccggcgaccaatgtcaggtagctggatgggggacgaccgcggcccgccgcgtcaaatacaataagggtctgacctgttcatcgatcacaattctctcccccaaggagtgtgaggtgttttaccccggtgtcgtcaccaacaacatgatttgtgctggtctggacagaggacaggacccttgccagagcgatagtgggggccccttggtatgtgacgagacactccagggtatcctcagctggggtgtgtatccctgtggatccgctcaacaccctgccgtgtacactcagatttgcaagtacatgagctggatcaataaagtgatccgatctaactag

SEQ ID NO: 131845 - DNA, 831 bp, Artificial Sequence
  derived and/or modified sequence
atgagggccccacacctacatttgtccgcagcttccggagcaagagcactcgcgaaactgctgccactgctcatggctcagctgtgggccgctgaggcagctcttttacctcagaatgatacgcgcctggacccagaggcatacggctctccctgcgctcggggtagtcagccctggcaggtcagtcttttcaatggactgtcatttcactgtgctggtgtgttagttgaccagtcatgggtacttacagccgctcactgcggtaacaaacctttgtgggcacgggtaggagacgaccatcttctcttacttcagggggaacagctgaggcgaactaccaggtctgttgtgcaccctaagtaccaccaggggtctggaccaatccttcccaggaggacggatgagcatgacctgatgcttcttaagttggcaaggccagtagttttagggccacgtgtgagggccctgcagctaccatatcgatgtgcccagcccggtgatcagtgtcaagttgccggttgggggacaaccgccgctcgcagggtgaagtacaacaaggggcttacctgttcaagcatcaccatactgtcccccaaagaatgcgaagtgttttaccccggtgtggtcaccaacaacatgatctgtgctggcctggaccgcggtcaagacccctgtcaatctgacagcgggggtcctctggtctgtgatgaaacactacagggaatactgagctggggagtatatccatgcggatccgcccagcaccctgccgtatacactcaaatatgtaagtatatgtcgtggataaacaaagtgatcaggtccaactag

SEQ ID NO: 131846 - DNA, 831 bp, Artificial Sequence
  derived and/or modified sequence
atgagagctcctcatcttcatctttccgctgcttccggcgcaagggcattggctaagctcctccctctgctcatggctcagttgtgggccgctgaggctgccttgttgccgcagaacgatacccgcttggatcctgaggcctatggctcgccctgcgcgcgagggtctcagccctggcaagtctcgcttttcaatggcttgtccttccactgcgcaggcgtgctagttgatcagagttgggtgctgaccgcagcccattgtgggaacaagcccttatgggccagggtgggcgatgaccaccttctgctgttgcaaggagaacaacttaggcgaactacaaggagtgtggtgcatcccaaatatcaccagggctctggcccaatccttcccaggcggaccgatgagcacgacctgatgctgctgaaactggcccgtcccgtagttctgggtccgagagttcgtgctctccagctcccctatcggtgtgcccaacctggggatcagtgtcaagtggccggatggggtactacagccgcaaggagggtgaagtacaataaaggtctaacttgtagtagtattacaatcctttctccgaaagaatgtgaagtcttctaccccggtgtcgttaccaataacatgatctgtgccggtctcgatcgtggacaagacccttgtcagtccgactccgggggaccgctggtctgcgacgaaacgctccaggggattctctcctggggggtatatccgtgcggatcagcacagcatcctgccgtgtacacacagatatgtaaatatatgagctggattaacaaagtgattcgcagtaactag

SEQ ID NO: 131847 - DNA, 831 bp, Artificial Sequence
  derived and/or modified sequence
atgagggcaccccacctccacctgagcgctgctagcggtgcgagagccctggctaagttactgcccctgctaatggcccagttgtgggccgctgaagcagcccttctgccccagaatgatacccggctggacccagaagcctatggcagtccgtgtgctagaggcagccagccatggcaggtgtctcttttcaacggtctcagctttcactgcgctggcgtgctggttgaccaaagttgggtcctgacggccgcacactgcggcaacaagcccctctgggccagggtcggagatgaccatctgctgttactccaaggcgagcagcttcggaggaccacacggtctgtggtgcatcctaaatatcatcagggtagtggccctatcctccctcggaggactgatgaacacgacctgatgttgctgaagctggcacggcctgtggtgcttggcccaagagtccgtgctctccagcttccctacagatgcgcgcagcccggagatcaatgtcaggtcgcaggctggggaactacagccgctcgtcgcgtaaagtataataaagggctgacatgcagcagcattactattctgagtcctaaggagtgcgaagtgttctaccctggggtcgtgactaataacatgatttgtgctggactggatagaggccaggacccttgtcagagtgactcgggaggaccattagtgtgcgatgagacgctccagggaatccttagctggggggtctacccctgcggcagtgcccagcacccagccgtatacacacagatctgcaagtacatgtcttggataaacaaggtgatcaggtcgaactag

SEQ ID NO: 131848 - protein, 20 aa, Artificial Sequence [sequence omitted]

SEQ ID NO: 131849 - protein, 256 aa, Artificial Sequence
  derived and/or modified sequence
MAHRPPSPALASVLLALLLSGAARAAEIVGGHEAQPHSRPYMASLQMRGNPGSHFCGGTLIHPSFVLTAAHCLRDIPQRLVNVVLGAHNVRTQEPTQQHFSVAQVFLNNYDAENKLNDVLLIQLSSPANLSASVATVQLPQQDQPVPHGTQCLAMGWGRVGAHDPPAQVLQELNVTVVTFFCRPHNICTFVPRRKAGICFGDSGGPLICDGIIQGIDSFVIWGCATRLFPDFFTRVALYVDWIRSTLRRVEAKGRP

SEQ ID NO: 131850 - protein, 215 aa, Artificial Sequence
  derived and/or modified sequence
MASLQMRGNPGSHFCGGTLIHPSFVLTAAHCLRDIPQRLVNVVLGAHNVRTQEPTQQHFSVAQVFLNNYDAENKLNDVLLIQLSSPANLSASVATVQLPQQDQPVPHGTQCLAMGWGRVGAHDPPAQVLQELNVTVVTFFCRPHNICTFVPRRKAGICFGDSGGPLICDGIIQGIDSFVIWGCATRLFPDFFTRVALYVDWIRSTLRRVEAKGRP

SEQ ID NO: 131851 - DNA, 771 bp, Artificial Sequence
  derived and/or modified sequence
atggcccacagaccccccagccccgccctggccagcgtgctgctggccctgctgctgagcggcgccgccagagccgccgagatcgtgggcggccacgaggcccagccccacagcagaccctacatggccagcctgcagatgagaggcaaccccggcagccacttctgcggcggcaccctgatccaccccagcttcgtgctgaccgccgcccactgcctgagagacatcccccagagactggtgaacgtggtgctgggcgcccacaacgtgagaacccaggagcccacccagcagcacttcagcgtggcccaggtgttcctgaacaactacgacgccgagaacaagctgaacgacgtgctgctgatccagctgagcagccccgccaacctgagcgccagcgtggccaccgtgcagctgccccagcaggaccagcccgtgccccacggcacccagtgcctggccatgggctggggcagagtgggcgcccacgacccccccgcccaggtgctgcaggagctgaacgtgaccgtggtgaccttcttctgcagaccccacaacatctgcaccttcgtgcccagaagaaaggccggcatctgcttcggcgacagcggcggccccctgatctgcgacggcatcatccagggcatcgacagcttcgtgatctggggctgcgccaccagactgttccccgacttcttcaccagagtggccctgtacgtggactggatcagaagcaccctgagaagagtggaggccaagggcagaccctag

SEQ ID NO: 131852 - DNA, 771 bp, Artificial Sequence
  derived and/or modified sequence
atggcacaccgccccccgtctcctgccctcgccagcgtcttgttggcgctgctcctgtccggagccgctcgggcagcagagattgtagggggtcatgaggcccagcctcactcccgcccttacatggctagtctgcaaatgagaggaaatcctggaagccatttctgcgggggcactctgattcacccaagcttcgtgctgaccgccgctcattgtctgagagacatcccacagcgtcttgtgaatgtggtcctgggcgcacataatgttcggacccaggaaccaacccaacagcatttctccgtcgctcaggtcttcttaaacaattacgatgctgagaacaagctgaacgatgtgctcctcatccagcttagctcccctgctaacctttcagccagcgtggctacagtgcaactcccacagcaggaccagccggtgccgcacggaacgcaatgtcttgctatgggctggggtagggtgggtgctcatgatccgccagctcaggtccttcaggagctcaatgtgaccgtcgtgaccttcttctgtcggccacataatatctgcactttcgttccgagacggaaggctggcatctgtttcggggactctggtggccccctaatctgcgatggcatcatacaaggtattgatagctttgtaatatggggctgcgccactcgcctttttcctgacttctttacacgcgttgccctgtatgtcgactggatccggtctacattaaggagggtggaagccaaggggcgtccctag

SEQ ID NO: 131853 - DNA, 771 bp, Artificial Sequence
  derived and/or modified sequence
atggcccacaggcctcccagccctgccctggcctctgtgctgctggccctgctgctgagcggggccgcccgggctgctgagatcgtgggcggccacgaggcccagccccacagccggccctacatggccagcctgcagatgaggggcaaccctggcagccacttctgtggcggcaccctcatccaccccagctttgtgctgacagctgcccactgcctgcgggacatcccccagaggctggtgaatgtggtgctgggcgcccacaacgtgaggacccaggagcccacccagcagcacttctctgtggcccaggtgttcctgaacaactatgatgctgagaacaagctgaatgatgtgctgctgatccagctgagcagccctgccaacctgagcgcctctgtggccaccgtgcagctgccccagcaggaccagcctgtgccccacggcacccagtgcctggccatgggctggggccgggtgggcgcccatgaccccccagcccaggtgctgcaggagctgaatgtgacagtggtgaccttcttctgccggccccacaacatctgcacctttgtgcccaggaggaaggccggcatctgcttcggggacagcggcggccccctcatctgtgatggcatcatccagggcatcgacagctttgtgatctggggctgtgccaccaggctcttcccagacttcttcaccagggtggccctgtatgtggactggatccgcagcaccctgcggcgggtggaggccaagggccggccctag

SEQ ID NO: 131854 - DNA, 771 bp, Artificial Sequence
  derived and/or modified sequence
atggcccaccggccccccagccccgccctggccagcgtgctgctggccctcttactctctggggcggcaagggctgccgagatcgtagggggccacgaagcacagccccacagccgtccgtatatggctagcttgcagatgcgcggaaaccctggatcacacttctgcggaggcacactgattcacccgtcttttgtgcttactgctgcacactgcctgagggacatccctcagcgcttggtgaacgtcgtcttgggagcacataatgtcagaacccaggaacctacacagcagcacttcagtgtcgctcaggtttttctgaacaattatgatgccgaaaataaacttaatgacgttctactgattcagttgtcctcacctgccaatctgtcagcgtctgtagcaacggtgcagcttccccagcaggaccaaccagtgcctcatggcacccagtgcctagcaatggggtggggccgggtcggagctcatgaccccccggcacaggtattacaggaactcaacgtgaccgtggtgacgtttttttgccggcctcacaacatttgcacttttgttcctcggagaaaagcgggcatatgtttcggcgacagcggcggtcctctgatttgtgatggaatcattcaggggatcgactccttcgttatatggggttgcgccacacgtctgttcccagattttttcacaagagtagccctgtatgtcgattggatccgcagtacgctaaggcgtgtcgaagctaaaggccgcccctag

SEQ ID NO: 131855 - DNA, 771 bp, Artificial Sequence
  derived and/or modified sequence
atggcccacaggccgccttcaccagcactagcaagcgttttgcttgcactgctgctgtccggcgcagcccgtgcggctgagattgtgggtgggcacgaagcacagccccactcacgaccatacatggctagtctgcagatgagaggtaaccctggaagccatttttgtggaggaaccctcatacatccaagttttgttctcacagccgctcactgtctgagggacatccctcagcgcctcgtaaacgtcgttcttggagcccataatgtgcggacgcaggaaccaactcagcagcacttcagcgtcgctcaggtctttcttaacaattatgacgctgagaacaagctcaatgacgtacttttgattcagttgtcatctcccgcaaacctaagtgccagtgtggccactgtgcagctgccgcagcaggatcagcccgtacctcatggcactcagtgtctagcaatgggctggggacgggtcggtgctcatgaccccccagcccaggttctgcaggagttaaacgtaactgtcgtgacttttttttgtaggcctcataatatctgcacattcgtgccgaggaggaaggccggtatttgcttcggagattccggtgggccactcatttgtgatggcattatccagggaattgactcctttgtgatatggggttgcgcgaccagactttttcctgattttttcaccagggtcgctctgtacgttgactggatacggagcacactgagacgcgtagaggcgaaaggtcgtccctag

SEQ ID NO: 131856 - DNA, 648 bp, Artificial Sequence
  derived and/or modified sequence
atggcgtcgctccagatgcggggtaaccctgggagtcatttttgcggcggcacactgatccatcccagctttgttctaacggctgcccattgtctgagggatatcccccagaggcttgtcaatgtagtgctgggcgctcataacgtccgcacccaggagcctactcagcagcatttcagtgttgctcaggtgttcctgaacaactacgatgctgagaacaagttaaacgatgtcttgctgatccaactgagttcccccgccaacctcagcgccagcgtcgcaaccgtgcagctgccacagcaggaccagcccgtgcctcacggcacacagtgccttgctatggggtggggcagagtcggtgctcacgatccccccgcccaggtccttcaggagctgaacgtcacagttgtgaccttcttctgtaggccacataacatctgtacctttgtgccacggcgaaaggctggtatctgtttcggagacagtggaggaccactaatctgcgatgggatcattcaaggcatagactcctttgtgatctggggatgcgccacgagactgtttccagacttttttacccgggtggctctgtatgtcgactggatcagatcaactctgcgacgggtggaggctaaaggcaggccgtag

SEQ ID NO: 131857 - DNA, 648 bp, Artificial Sequence
  derived and/or modified sequence
atggccagcctgcagatgaggggcaaccctggcagccacttctgtggcggcaccctcatccaccccagctttgtgctgacagctgcccactgcctgcgggacatcccccagaggctggtgaatgtggtgctgggcgcccacaacgtgaggacccaggagcccacccagcagcacttctctgtggcccaggtgttcctgaacaactatgatgctgagaacaagctgaatgatgtgctgctgatccagctgagcagccctgccaacctgagcgcctctgtggccaccgtgcagctgccccagcaggaccagcctgtgccccacggcacccagtgcctggccatgggctggggccgggtgggcgcccatgaccccccagcccaggtgctgcaggagctgaatgtgacagtggtgaccttcttctgccggccccacaacatctgcacctttgtgcccaggaggaaggccggcatctgctttggagacagcggcggccccctcatctgtgatggcatcatccagggcatcgacagctttgtgatctggggctgtgccaccaggctcttcccagacttcttcaccagggtggccctgtatgtggactggatccgcagcaccctgcggcgggtggaggccaagggccggccctag

SEQ ID NO: 131858 - DNA, 648 bp, Artificial Sequence
  derived and/or modified sequence
atggccagcctgcagatgcggggcaaccccggcagccacttctgcggcgggaccttgattcacccatcatttgttctgactgcggcgcattgtctgagagatatccctcagaggctggtaaacgtggtattaggggcacacaatgtgcgcacacaagaacccacccagcagcatttctccgtggcacaagtcttcctgaataactacgacgctgagaacaaactgaacgacgtactgctaatccaactcagcagtcctgccaatctgtctgcctccgtggccaccgtacagctgccccaacaggaccagccggttccacatggaactcagtgcctagcaatgggctggggaagagtcggggcccatgaccctcctgctcaggtgctgcaggagctgaatgttacagtggtcacttttttttgtaggccccataacatatgtacatttgtcccgcggcggaaggctggcatctgtttcggcgactccggcggacctcttatttgtgatggaatcattcaggggatcgatagtttcgtaatttggggctgtgcaaccaggttatttcctgactttttcaccagggtggctctgtacgtagactggatcagatcgactttaagacgagtggaggcaaaggggcggccctag

SEQ ID NO: 131859 - DNA, 648 bp, Artificial Sequence
  derived and/or modified sequence
atggcatcacttcagatgcggggtaatccaggtagccacttctgcggcggtacacttatccatcctagctttgttcttaccgccgctcactgtcttagggacatcccgcaacgcttggtgaatgtggtgttgggggctcacaacgttagaacccaggagcctacacagcagcacttttccgtggctcaggttttcctcaacaattatgatgccgagaataagctcaatgatgtcctgttgatacagctctcgtcaccagcaaacctatctgcatccgtcgccacagtgcagctgcctcagcaggaccagcctgtgcctcatggcacacaatgcctagcaatggggtgggggcgagttggagcccacgacccacccgctcaggtgctacaggagctaaacgtcacagtggtgacattcttctgccggccacacaacatctgcacattcgtgccccgtaggaaagccggaatctgttttggagactccggtggcccattgatttgcgacggtatcattcaaggtatcgatagcttcgtgatctggggttgcgccactaggctgtttccagatttttttactagggttgccctgtatgttgattggataaggtctacactcagacgggtggaagccaagggtcgtccttag

SEQ ID NO: 131860 - DNA, 1001 bp, Artificial Sequence
  derived and/or modified sequence
cgtgggtgcaccctggaccccaccatggctcaccggccccccagccctgccctggcgtccgtgctgctggccttgctgctgagcggtgctgcccgagctgcggagatcgtgggcgggcacgaggcgcagccacactcccggccctacatggcctccctgcagatgcgggggaacccgggcagccacttctgcggaggcaccttgatccaccccagcttcgtgctgacggccgcgcactgcctgcgggacataccccagcgcctggtgaacgtggtgctcggagcccacaacgtgcggacgcaggagcccacccagcagcacttctcggtggctcaggtgtttctgaacaactacgacgcggagaacaaactgaacgacgttctcctcatccagctgagcagcccagccaacctcagtgcctccgtcgccacagtccagctgccacagcaggaccagccagtgccccacggcacccagtgcctggccatgggctggggccgcgtgggtgcccacgaccccccagcccaggtcctgcaggagctcaatgtcaccgtggtcaccttcttctgccggccacataacatttgcactttcgtccctcgccgcaaggccggcatctgcttcggagactcaggtggccccctgatctgtgatggcatcatccaaggaatagactccttcgtgatctggggatgtgccacccgccttttccctgacttcttcacgcgggtagccctctacgtggactggatccgttccacgctgcgccgtgtggaggccaagggccgcccctgaaccgcccctcccacagcgctggccgggaccccgagcctggctccaaaccctcgaggcggatctttggacagaagcagctcttccccgaacactgtggcgtccgggacggccccacccgtccccccacactccctcccacggggctccgggagacaggccggccctgcacctcaccccaccgtgacctcaataaacgttgaaactcc

SEQ ID NO: 131861 - DNA, 1041 bp, Artificial Sequence
  derived and/or modified sequence
aggcactgaccgggttgcagatcgggagacggaggctcggagaggcccaggggctgctctgccatcccccctttccctgcagcctgggggctccctgacgcctggactccccccctgcaggtgctgcccgagctgcggagatcgtgggcgggcacgaggcgcagccacactcccggccctacatggcctccctgcagatgcgggggaacccgggcagccacttctgcggaggcaccttgatccaccccagcttcgtgctgacggccgcgcactgcctgcgggacataccccagcgcctggtgaacgtggtgctcggagcccacaacgtgcggacgcaggagcccacccagcagcacttctcggtggctcaggtgtttctgaacaactacgacgcggagaacaaactgaacgacgttctcctcatccagctgagcagcccagccaacctcagtgcctccgtcgccacagtccagctgccacagcaggaccagccagtgccccacggcacccagtgcctggccatgggctggggccgcgtgggtgcccacgaccccccagcccaggtcctgcaggagctcaatgtcaccgtggtcaccttcttctgccggccacataacatttgcactttcgtccctcgccgcaaggccggcatctgcttcggagactcaggtggccccctgatctgtgatggcatcatccaaggaatagactccttcgtgatctggggatgtgccacccgccttttccctgacttcttcacgcgggtagccctctacgtggactggatccgttccacgctgcgccgtgtggaggccaagggccgcccctgaaccgcccctcccacagcgctggccgggaccccgagcctggctccaaaccctcgaggcggatctttggacagaagcagctcttccccgaacactgtggcgtccgggacggccccacccgtccccccacactccctcccacggggctccgggagacaggccggccctgcacctcaccccaccgtgacctcaataaacgttgaaactccccctg

SEQ ID NO: 131862 - DNA, 648 bp, Artificial Sequence
  derived and/or modified sequence
atggccagcctgcagatgagaggcaaccccggcagccacttctgcggcggcaccctgatccaccccagcttcgtgctgaccgccgcccactgcctgagagacatcccccagagactggtgaacgtggtgctgggcgcccacaacgtgagaacccaggagcccacccagcagcacttcagcgtggcccaggtgttcctgaacaactacgacgccgagaacaagctgaacgacgtgctgctgatccagctgagcagccccgccaacctgagcgccagcgtggccaccgtgcagctgccccagcaggaccagcccgtgccccacggcacccagtgcctggccatgggctggggcagagtgggcgcccacgacccccccgcccaggtgctgcaggagctgaacgtgaccgtggtgaccttcttctgcagaccccacaacatctgcaccttcgtgcccagaagaaaggccggcatctgcttcggcgacagcggcggccccctgatctgcgacggcatcatccagggcatcgacagcttcgtgatctggggctgcgccaccagactgttccccgacttcttcaccagagtggccctgtacgtggactggatcagaagcaccctgagaagagtggaggccaagggcagaccctag

SEQ ID NO: 131863 - protein, 77 aa, Artificial Sequence
  derived and/or modified sequence
IPVLCPVCTSLVGKLIDLVLGGAVDKVTDYLETLCAKADGLVETLCTKIVSYGIDKLIEKILEGGSAKLICGLIHAC

SEQ ID NO: 131864 - protein, 559 aa, Artificial Sequence
  derived and/or modified sequence
MYALFLLASLLGAALAGPVLGLKECTRGSAVWCQNVKTASDCGAVKHCLQTVWNKPTVKSLPCDICKDVVTAAGDMLKDNATEEEILVYLEKTCDWLPKPNMSASCKEIVDSYLPVILDIIKGEMSRPGEVCSALNLCESLQKHLAELNHQKQLESNKIPELDMTEVVAPFMANIPLLLYPQDGPRSKPQPKDNGDVCQDCIQMVTDIQTAVRTNSTFVQALVEHVKEECDRLGPGMADICKNYISQYSEIAIQMMMHMQPKEICALVGFCDEVKEMPMQTLVPAKVASKNVIPALELVEPIKKHEVPAKSDVYCEVCEFLVKEVTKLIDNNKTEKEILDAFDKMCSKLPKSLSEECQEVVDTYGSSILSILLEEVSPELVCSMLHLCSGTRLPALTVHVTQPKDGGFCEVCKKLVGYLDRNLEKNSTKQEILAALEKGCSFLPDPYQKQCDQFVAEYEPVLIEILVEVMDPSFVCLKIGACPSAHKPLLGTEKCIWGPSYWCQNTETAAQCNAVEHCKRHVWIGCWGVGVGSCLWPTWAPTLLSTSGCQETASKASRT

SEQ ID NO: 131865 - protein, 524 aa, Artificial Sequence
  derived and/or modified sequence
MYALFLLASLLGAALAGPVLGLKECTRGSAVWCQNVKTASDCGAVKHCLQTVWNKPTVKSLPCDICKDVVTAAGDMLKDNATEEEILVYLEKTCDWLPKPNMSASCKEIVDSYLPVILDIIKGEMSRPGEVCSALNLCESLQKHLAELNHQKQLESNKIPELDMTEVVAPFMANIPLLLYPQDGPRSKPQPKDNGDVCQDCIQMVTDIQTAVRTNSTFVQALVEHVKEECDRLGPGMADICKNYISQYSEIAIQMMMHMQPKEICALVGFCDEVKEMPMQTLVPAKVASKNVIPALELVEPIKKHEVPAKSDVYCEVCEFLVKEVTKLIDNNKTEKEILDAFDKMCSKLPKSLSEECQEVVDTYGSSILSILLEEVSPELVCSMLHLCSGTRLPALTVHVTQPKDGGFCEVCKKLVGYLDRNLEKNSTKQEILAALEKGCSFLPDPYQKQCDQFVAEYEPVLIEILVEVMDPSFVCLKIGACPSAHKPLLGTEKCIWGPSYWCQNTETAAQCNAVEHCKRHVWN

SEQ ID NO: 131866 - DNA, 1680 bp, Artificial Sequence
  derived and/or modified sequence
atgtacgctctgttcctgctggccagtctgctgggggccgccctggcgggacccgttcttggcctaaaagaatgcacaaggggcagcgctgtttggtgtcagaacgtaaagaccgccagcgactgtggagcggttaagcattgcctgcaaaccgtctggaataaacccaccgtgaagagtcttccatgcgatatttgcaaagacgtcgttaccgcagccggcgatatgttgaaagataatgccactgaagaggagattctggtgtatttggagaagacctgtgattggctcccaaaaccaaatatgagcgcctcctgtaaagaaatcgtcgattcgtatttaccggtgattcttgacataatcaagggggaaatgtcgcgccctggcgaggtgtgttcagccctcaatctttgtgaatctctgcagaagcacctcgctgaattgaaccaccagaagcagcttgagtcaaacaagattcctgaactggatatgacagaggtcgtggcaccattcatggcaaacatcccactgctcctgtacccacaggatggcccccggtctaagccccagccaaaagataatggggacgtctgtcaggactgcatacagatggtcaccgacattcagaccgctgtgcgcactaactcaactttcgtacaagctctggttgagcacgttaaggaggaatgcgaccgcctgggccctggcatggccgacatatgtaagaactatataagccagtattcagagatagcaatccagatgatgatgcacatgcagcctaaagagatctgcgccttggttggcttttgcgatgaggtaaaagaaatgccaatgcagaccctcgttcctgccaaagtggccagtaagaacgtgattcctgccctggagctcgtagagcccatcaaaaagcacgaggtccccgcgaagtctgatgtctactgcgaggtctgcgagttcttagttaaggaggtgacaaagctaatcgataataataagacagaaaaggagatcctcgatgcctttgacaaaatgtgctctaagttgcccaagtccctctccgaggaatgccaagaggtggtggacacatacgggagtagcatcctgagcattcttctcgaggaagttagtcccgagcttgtgtgcagcatgctccatctttgctccggcactaggctgccagcactgacagtgcatgtgacccagcccaaagacggaggcttctgtgaggtgtgcaaaaagctcgtcgggtacctggaccggaacctagaaaagaattccacaaaacaagagattctggcagccctagaaaaaggatgtagcttcctgcccgacccctatcaaaagcagtgtgatcagtttgtggcagagtatgagcctgtgctgattgagattctcgttgaagtgatggacccgagtttcgtctgcctgaagatcggcgcctgcccatccgcacacaagcctcttctgggtacagaaaaatgtatatggggtccctcatactggtgtcagaatactgaaacagccgcacagtgtaatgccgtggagcactgtaagaggcatgtgtggatcgggtgttggggagtaggcgtgggatcctgcctgtggcctacctgggctccaacattactgtcgacctcaggttgccaggagaccgcaagcaaggcctccaggacctag

SEQ ID NO: 131867 - DNA, 723 bp, Artificial Sequence
  derived and/or modified sequence
atgtacgccctgttcctgttggcatcccttcttggcgcagcgctagcgggacccgtcctgggcctcaaggagtgcacacggggatcagcagtgtggtgccaaaatgttaagacagcgtctgactgtggggccgtcaagcactgtcttcaaacggtctggaataagcctacagttaagtcactgccgtgtgacatctgcaaagatgtggtgaccgcggccggtgatatgttgaaagataacgccaccgaggaggagatccttgtgtatctcgaggtgtcacctgagttagtctgcagcatgttgcatctttgctctggcactcggcttcctgctttgaccgtgcacgttacacaacccaaagacggaggcttctgcgaggtgtgcaagaagctggtgggataccttgacagaaacctcgagaagaattctaccaagcaggagatcctggccgctttggagaaagggtgcagtttcctacctgacccatatcagaagcagtgcgaccagtttgtggcagagtatgagcctgtgttgattgagatccttgtagaggttatggatccaagctttgtgtgcttaaaaatcggagcttgcccatctgcgcataaacccttattgggaactgagaaatgcatttggggaccctcttattggtgtcagaatactgagacggccgcccagtgcaatgccgtggaacactgtaagcggcacgtgtggaattag

SEQ ID NO: 131868 - DNA, 1575 bp, Artificial Sequence
  derived and/or modified sequence
atgtatgccctgtttctcctggcttcactgctgggggccgctctcgcaggacctgtgcttggtctgaaagagtgcacaagggggagcgctgtatggtgtcagaacgttaagacagccagcgattgtggagccgtgaagcattgcctccagactgtgtggaataagccaacagtgaagtcattgccctgtgacatttgcaaagacgttgtcacggcagccggcgatatgctcaaagacaatgcaacagaggaggagattctggtctacttagaaaaaacgtgcgattggctgccaaagcccaacatgagtgcctcctgtaaagagattgtggactcctacctgcccgtcattctagacattatcaagggagagatgagccggcccggtgaagtgtgttccgcattaaacttatgtgaaagtcttcaaaagcatttggccgagctcaaccatcagaaacagctggagtcaaacaaaatacccgaactagacatgactgaagtagtggcgcctttcatggcaaatatcccacttctgttataccctcaggatggccctcgcagcaaaccccagcctaaggataacggtgacgtttgccaggattgcattcagatggtgactgacatccagacggcagttagaactaacagcacctttgtgcaggcactggtagaacacgtgaaggaagagtgcgatagactaggccccggcatggccgacatctgcaagaactatatctcgcagtactctgaaatcgctatccagatgatgatgcacatgcaacccaaggagatatgcgctctggtgggcttctgtgatgaggtgaaagagatgccaatgcagacgttggtgccggcgaaggtcgcctcaaagaatgtgattcctgccctggaacttgtggagcctataaagaaacacgaggtgccagccaagtctgatgtctactgtgaagtgtgtgagtttctggtgaaagaggtgaccaagctgatcgacaacaacaagacggagaaagaaattctcgatgctttcgataaaatgtgctctaagctccccaagtcactcagtgaagagtgtcaggaggtggtggacacctacggctctagtatcctatccattctcctggaggaagttagcccggaactggtgtgtagtatgctgcatctgtgctctggcactaggctcccagctctgaccgtgcacgtgactcagcccaaggatggggggttttgcgaggtgtgtaagaaactcgttggctatctggatcggaacctggagaagaacagcaccaagcaggagatcttggctgcactcgaaaagggctgttcgtttctgccagacccttatcagaagcagtgcgaccaattcgtcgcagagtacgaaccagtcctgatagagatattggtcgaggttatggacccctcttttgtgtgtctcaaaattggtgcttgtccttccgctcataagcccctgctggggactgagaaatgcatatggggccctagctattggtgtcaaaatacggagaccgcagcgcagtgcaatgcagtggagcattgtaaaagacatgtctggaattag

SEQ ID NO: 131869 - DNA, 1680 bp, Artificial Sequence
  derived and/or modified sequence
atgtatgccctcttcctgctggccagcctgctgggcgccgccctggccggccctgtgctgggcctgaaggagtgcacccggggcagcgctgtgtggtgccagaatgtgaagacagccagtgactgtggggctgtgaagcactgcctgcagacagtgtggaacaagcccaccgtgaagagcctgccctgtgacatctgcaaggatgtggtgacagctgctggggacatgctgaaggacaatgccacagaggaggagatcctggtgtacctggagaagacctgtgactggctgcccaagcccaacatgtctgccagctgcaaggagatcgtggacagctacctgcctgtgatcctggacatcatcaagggggagatgagcaggcctggagaggtgtgcagcgccctgaacctgtgtgagagcctgcagaagcacctggccgagctgaaccaccagaagcagctggagagcaacaagatccctgagctggacatgacagaggtggtggcccccttcatggccaacatccccctgctgctgtacccccaggacggccccaggagcaagccccagcccaaggacaatggagatgtgtgccaggactgcatccagatggtgacagacatccagacagctgtgaggaccaacagcacctttgtgcaggccctggtggagcacgtgaaggaggagtgtgaccggctgggccctggcatggctgacatctgcaagaactacatcagccagtacagcgagatcgccatccagatgatgatgcacatgcagcccaaggagatctgtgccctggtgggcttctgtgatgaggtgaaggagatgcccatgcagaccctggtgcctgccaaggtggccagcaagaatgtcatcccagccctggagctggtggagcccatcaagaagcatgaggtgcctgccaagagtgatgtgtactgtgaggtgtgtgagttcctggtgaaggaggtgaccaagctgattgacaacaacaagacagagaaggagatcctggatgcctttgacaagatgtgcagcaagctgcccaagagcctgtctgaggagtgccaggaggtggtggacacctacggcagcagcatcctgagcatcctgctggaggaggtgtccccagagctggtgtgcagcatgctgcacctgtgcagcggcacccggctgcctgccctgactgtgcacgtgacccagcccaaggatggcggcttctgtgaggtgtgcaagaagctggtgggctacctggacaggaacctggagaagaacagcaccaagcaggagatcctggccgccctggagaagggctgcagcttcctgcctgacccctaccagaagcagtgtgaccagtttgtggccgagtatgagcctgtgctgattgagatcctggtggaggtgatggaccccagctttgtgtgcctgaagattggagcctgccccagcgcccacaagcccctgctgggcacagagaagtgcatctggggccccagctactggtgccagaacacagaaacagctgcccagtgcaatgctgtggagcactgcaagagacatgtgtggattggctgctggggcgtgggcgtgggcagctgcctgtggcccacctgggcccccaccctgctgagcaccagcggctgccaggagacagccagcaaggccagcaggacatag

SEQ ID NO: 131870 - DNA, 723 bp, Artificial Sequence
  derived and/or modified sequence
atgtatgccctcttcctgctggccagcctgctgggcgccgccctggccggccctgtgctgggcctgaaggagtgcacccggggcagcgctgtgtggtgccagaatgtgaagacagccagtgactgtggggctgtgaagcactgcctgcagacagtgtggaacaagcccaccgtgaagagcctgccctgtgacatctgcaaggatgtggtgacagctgctggggacatgctgaaggacaatgccacagaggaggagatcctggtgtacctggaggtgtccccagagctggtgtgcagcatgctgcacctgtgcagcggcacccggctgcctgccctgactgtgcacgtgacccagcccaaggatggcggcttctgtgaggtgtgcaagaagctggtgggctacctggacaggaacctggagaagaacagcaccaagcaggagatcctggccgccctggagaagggctgcagcttcctgcctgacccctaccagaagcagtgtgaccagtttgtggccgagtatgagcctgtgctgattgagatcctggtggaggtgatggaccccagctttgtgtgcctgaagattggagcctgccccagcgcccacaagcccctgctgggcacagagaagtgcatctggggccccagctactggtgccagaacacagaaacagctgcccagtgcaatgctgtggagcactgcaagagacatgtgtggaactag

SEQ ID NO: 131871 - DNA, 1575 bp, Artificial Sequence
  derived and/or modified sequence
atgtatgccctcttcctgctggccagcctgctgggcgccgccctggccggccctgtgctgggcctgaaggagtgcacccggggcagcgctgtgtggtgccagaatgtgaagacagccagtgactgtggggctgtgaagcactgcctgcagacagtgtggaacaagcccaccgtgaagagcctgccctgtgacatctgcaaggatgtggtgacagctgctggggacatgctgaaggacaatgccacagaggaggagatcctggtgtacctggagaagacctgtgactggctgcccaagcccaacatgtctgccagctgcaaggagatcgtggacagctacctgcctgtgatcctggacatcatcaagggggagatgagcaggcctggagaggtgtgcagcgccctgaacctgtgtgagagcctgcagaagcacctggccgagctgaaccaccagaagcagctggagagcaacaagatccctgagctggacatgacagaggtggtggcccccttcatggccaacatccccctgctgctgtacccccaggacggccccaggagcaagccccagcccaaggacaatggagatgtgtgccaggactgcatccagatggtgacagacatccagacagctgtgaggaccaacagcacctttgtgcaggccctggtggagcacgtgaaggaggagtgtgaccggctgggccctggcatggctgacatctgcaagaactacatcagccagtacagcgagatcgccatccagatgatgatgcacatgcagcccaaggagatctgtgccctggtgggcttctgtgatgaggtgaaggagatgcccatgcagaccctggtgcctgccaaggtggccagcaagaatgtcatcccagccctggagctggtggagcccatcaagaagcatgaggtgcctgccaagagtgatgtgtactgtgaggtgtgtgagttcctggtgaaggaggtgaccaagctgattgacaacaacaagacagagaaggagatcctggatgcctttgacaagatgtgcagcaagctgcccaagagcctgtctgaggagtgccaggaggtggtggacacctacggcagcagcatcctgagcatcctgctggaggaggtgtccccagagctggtgtgcagcatgctgcacctgtgcagcggcacccggctgcctgccctgactgtgcacgtgacccagcccaaggatggcggcttctgtgaggtgtgcaagaagctggtgggctacctggacaggaacctggagaagaacagcaccaagcaggagatcctggccgccctggagaagggctgcagcttcctgcctgacccctaccagaagcagtgtgaccagtttgtggccgagtatgagcctgtgctgattgagatcctggtggaggtgatggaccccagctttgtgtgcctgaagattggagcctgccccagcgcccacaagcccctgctgggcacagagaagtgcatctggggccccagctactggtgccagaacacagaaacagctgcccagtgcaatgctgtggagcactgcaagagacatgtgtggaactag

SEQ ID NO: 131872 - DNA, 1680 bp, Artificial Sequence
  derived and/or modified sequence
atgtacgccctgttcctgctggccagcctgctgggcgccgccctggccggaccggtgcttgggctgaaggaatgcactagggggagtgctgtatggtgccagaacgtaaaaactgcctccgactgcggcgccgtgaagcactgcctgcagacggtgtggaacaaaccaaccgtcaaatctcttccatgcgatatctgtaaggacgtcgtcacagccgctggggacatgctgaaagacaatgccacagaggaagaaattctggtttacctcgagaagacatgcgactggttaccaaagcccaatatgtccgcgagctgtaaggagatagtagatagctacttgcctgttattctggacatcatcaaaggcgaaatgtctcgacccggggaggtctgttctgctcttaacctgtgtgagtctttgcagaagcatttggctgagctgaatcaccagaagcagcttgagtctaacaagatccctgagttagacatgacagaagtcgtcgccccatttatggcaaacatccccctgttactgtacccgcaagacggtcctaggtcaaagccccagcccaaggataatggcgatgtctgtcaggactgtattcagatggtgaccgatatacagaccgccgtgcggaccaattcaacattcgtgcaggctctagtagaacacgtgaaggaagaatgcgatagacttggccctggtatggcggacatttgcaaaaattacatctctcagtattctgagattgctatccagatgatgatgcatatgcagcctaaggagatatgtgcgctggttgggttctgcgacgaggtgaaagagatgcccatgcagaccttggtgcccgctaaagtcgcttctaagaacgtgataccagcattagaactagtagagcctataaagaagcacgaggtgccagcaaagtcagacgtctactgcgaggtttgcgaatttcttgtcaaggaagtcaccaaactcatcgacaataacaagaccgaaaaagagattctggacgcatttgataagatgtgctcaaaattacctaaatctctctcagaggagtgccaagaggtagtggacacttacggctccagcatcttgagcattctgttagaagaggtctctccagagctcgtgtgttcgatgctccacttatgcagcgggacaaggctgcccgccttgaccgtccacgtaacgcagcctaaggacggaggcttctgtgaagtgtgtaagaagctggtaggctatctagaccgcaatctagaaaaaaactcaaccaagcaggagatcctggccgccctggagaaaggctgttcatttctgcctgatccataccagaaacaatgcgatcaatttgtggctgagtacgaaccggtgctgattgagattctggtggaggtgatggatcccagcttcgtatgtctgaagattggagcctgtccctcagctcacaaacccctgctcggaacggaaaaatgtatctgggggccttcctactggtgccaaaacaccgaaactgccgcccagtgtaatgctgtggaacactgcaagagacacgtgtggattggatgttggggagtaggggtgggcagttgtctttggcctacatgggctcccactctcctctctaccagcgggtgtcaggagactgcatcaaaggcatcccgaacttag

SEQ ID NO: 131873 - DNA, 723 bp, Artificial Sequence
  derived and/or modified sequence
atgtacgccctgttcctgctggccagcctgctgggcgccgccctggccggaccagtacttggcctgaaagagtgtacacgaggaagcgccgtgtggtgtcaaaacgtaaagacagccagcgactgtggtgccgtgaagcactgcctccagactgtgtggaacaagccaaccgtcaagtctttgccctgcgatatctgcaaggatgtagtcacagcagccggcgatatgctcaaagataatgctaccgaagaagaaatccttgtgtatttggaggtgagcccggagctggtgtgctccatgctccacctgtgttccggtactcggttacccgcgctgactgtgcatgtgacacaaccgaaagacggtggattttgcgaggtatgtaagaagctggtcggatatctggacaggaatttggagaagaacagtactaagcaggagattctcgccgctctggaaaagggatgcagctttctgccagatccctaccagaagcagtgtgatcagttcgtggctgagtacgagcctgtgctgatagaaatcctggtcgaggtgatggacccgtctttcgtatgtctgaagattggtgcatgcccaagcgcccacaagccgcttctcggcactgagaagtgcatttggggacccagttactggtgtcagaatacagaaaccgcggctcaatgcaatgctgtggaacactgtaaacggcatgtgtggaattag

SEQ ID NO: 131874 - DNA, 1575 bp, Artificial Sequence
  derived and/or modified sequence
atgtacgccctgttcctgctggccagcctgctgggcgccgccctggctgggcccgtgctgggtctcaaagagtgtacaagagggtccgccgtgtggtgccagaatgtgaagaccgcctcagactgtggcgccgtcaagcattgcctgcaaaccgtttggaacaagcccaccgttaagtccctaccgtgtgacatttgcaaagacgtggttacggctgcaggcgacatgctgaaagacaacgctacggaggaggaaatactagtgtaccttgaaaagacctgtgattggctcccaaaacccaacatgtcagcttcatgtaaggaaatcgttgatagctacctccctgttatcctggacataataaaaggggaaatgtcccggcctggtgaggtatgctcagctctgaatttgtgtgagagtctgcagaaacacctggctgaattaaatcatcagaagcagctcgagagcaacaaaataccggaactggatatgacagaggtcgtggcaccatttatggccaacatcccactcctgctgtatcctcaggatggcccccggagcaagccgcagccaaaagataatggtgacgtgtgccaagattgcatccagatggtgaccgacatacagaccgccgtcaggaccaattctactttcgtacaggctctggtagaacacgttaaggaggagtgcgacaggctgggccctggaatggctgacatctgcaagaactatatttcccagtattctgagattgcaattcagatgatgatgcacatgcagcccaaagagatctgcgcgttagttggtttctgtgacgaagtgaaagagatgcctatgcagaccctggttccggccaaagtggcttctaaaaacgtgattccagccctggagctggttgaacctataaagaaacatgaggttcccgcaaaaagcgatgtgtattgtgaggtgtgcgagttccttgtcaaggaggtaaccaaacttattgacaataataaaacggaaaaagagatacttgatgcgtttgataaaatgtgttccaagcttccgaaaagtctgtctgaggaatgccaggaagtggtggacacttacggctcctcgatattgagtatactgctcgaagaagttagtcctgagctggtttgttcgatgcttcacctttgctcaggaacgcgtttacccgctctcaccgtgcatgttacccagccgaaagacggtggattctgcgaagtctgtaagaagctcgttggttatttggacagaaaccttgagaaaaatagcactaaacaggagatcctggcagccttggagaaaggatgctcattcctgcctgatccgtaccagaagcagtgcgaccaatttgttgccgaatacgagcctgtgctgatcgaaatcttggtcgaggtaatggacccttcctttgtgtgcttgaagattggagcctgtccaagcgcccataagcctctgcttgggacagagaaatgcatatggggccctagttactggtgccagaacacagagacggctgcccaatgcaacgccgtggagcattgtaaacgccacgtttggaattag

SEQ ID NO: 131875 - DNA, 1680 bp, Artificial Sequence
  derived and/or modified sequence
atgtatgccctctttttattagcatccctgttaggtgcagcactggctgggccagtcctgggcctgaaggagtgtactcgcggatcagctgtgtggtgccaaaacgtaaaaaccgcttctgactgtggtgcagtgaagcattgcttgcagactgtctggaacaagcccactgtcaagtcccttccttgcgatatctgcaaagatgtggtgactgctgccggtgatatgctaaaagacaatgctactgaagaagaaatcctggtgtatcttgagaaaacgtgtgactggttgccaaaacctaacatgagtgcatcgtgtaaagaaatcgtggactcatatctacccgttatactggacattatcaaaggagaaatgagcagacccggagaggtttgttccgccttaaacctgtgcgagtcacttcaaaagcatctcgcagagttaaaccaccagaaacagctggaaagcaacaagatccccgagctggatatgactgaagtcgtagcacctttcatggctaacatccccctgttgctgtaccctcaggacggacccagatccaagccgcagcctaaggataatggagacgtctgtcaagattgcatccagatggttacggatatccagaccgctgtacgtaccaatagcactttcgtacaggccctggttgagcacgtcaaagaggaatgcgatcggctgggccctggtatggccgacatttgcaaaaactacatcagccaatacagtgagatcgcgattcaaatgatgatgcatatgcagcctaaggagatatgcgcgctggtgggattttgcgacgaagtgaaggaaatgccgatgcaaactcttgtccccgcaaaagttgctagcaagaatgtcatcccagccctggaactggtggagcccatcaagaaacacgaagtcccagcaaaatcggatgtctactgcgaggtatgtgaattcctcgtaaaagaggtgacaaaactgatcgacaacaataaaaccgagaaggagatcctcgatgctttcgacaaaatgtgtagcaaattgccaaagagtttgagtgaggaatgccaggaagtggttgatacgtatggatcctctatactcagtatcctgctggaggaagtgtcacctgaactggtctgtagcatgctgcacctgtgctccgggacccggcttccagcactcacagtgcacgtaacacagcccaaggatggtggattctgcgaggtgtgcaaaaaactggtgggttatctggacagaaacctggaaaagaattctaccaagcaagagatcctggctgccctcgagaagggctgctcattccttccagacccatatcagaagcagtgtgatcagtttgtagctgaatacgagcctgtgctgatcgaaatacttgtggaagtgatggacccttcttttgtgtgcctgaaaatcggagcctgtccttcagctcacaaaccactgctgggtaccgaaaagtgcatatggggtccatcatactggtgccagaatacggaaactgcggcacaatgtaatgccgtggagcattgcaaacggcacgtgtggatcgggtgttggggtgtaggggtcgggagctgcctgtggcctacctgggccccaacgctcttgtctaccagtggatgccaggagaccgccagcaaggcatctcggacatag

SEQ ID NO: 131876 - DNA, 723 bp, Artificial Sequence
  derived and/or modified sequence
atgtacgctctctttttgctagcttctctcttaggcgctgccctggccggacccgtactgggtctaaaagagtgtacacggggaagcgccgtctggtgccagaacgtgaaaacagcttcggactgcggcgctgtgaaacactgtttacagacggtatggaataaacccaccgtgaaatcattaccatgtgacatatgtaaagatgttgtgacagctgctggggacatgcttaaggacaatgcgactgaggaggagatccttgtctatctggaggttagtccggagttggtctgttcgatgctccatctctgctccggaacaagactccctgctcttaccgtgcatgtgacccagccaaaagacgggggattttgtgaagtgtgcaagaagctggtggggtaccttgatcgtaacctagaaaagaactctacaaagcaggagattctcgcagctctggagaagggctgctccttcctgcctgacccgtatcagaaacagtgcgatcagttcgttgcagagtatgaacctgtgctgattgagatcctggtcgaggtgatggaccccagttttgtgtgtctcaaaataggagcctgcccctccgctcacaaacccctcctcgggactgaaaaatgcatatggggcccttcatattggtgtcagaataccgagacagccgcacagtgcaacgccgtggaacactgcaaacgtcacgtgtggaactag

SEQ ID NO: 131877 - DNA, 1575 bp, Artificial Sequence
  derived and/or modified sequence
atgtatgccctattccttttggcaagcctcctcggggcagcactcgctggacccgtcctcggattgaaagaatgtacccgcggatctgctgtctggtgtcagaacgtgaagaccgcttcagactgcggggctgtgaagcactgtctccaaacagtgtggaacaagcccacagtaaaaagtctgccttgtgacatatgtaaagatgtggttacagccgctggggatatgctgaaggataacgcaaccgaagaagaaattttagtgtaccttgagaaaacctgtgattggttgcctaaacctaatatgagtgcaagctgtaaggaaattgttgatagttacctccctgtgattctggacataattaagggcgaaatgtcccgcccaggcgaggtgtgctccgcactgaacttatgtgaatccttgcagaaacatttggctgagctcaatcaccagaagcagcttgagtccaacaagattccagaattggacatgactgaagttgtcgcaccattcatggccaacatacctcttctgctgtaccctcaggatggccctcgctcaaaaccgcagccgaaagataatggcgatgtgtgtcaggattgtatccagatggtcactgatatccagaccgcagtcaggaccaactctacgttcgtccaggctttggtggagcacgtaaaggaggagtgcgatcggttgggcccaggaatggctgacatctgcaagaactatatctcccaatatagcgagattgccatacagatgatgatgcacatgcagcccaaagagatatgcgctctggtggggttctgtgacgaggtcaaagagatgccaatgcagaccctggtgccagcaaaggtggccagcaaaaacgtaatccctgctcttgaactagtggagccaataaaaaaacacgaggtccccgcaaaatctgatgtctactgtgaggtctgcgagttcctcgtgaaggaggtgacaaagctgatcgacaataacaagaccgagaaagagatcctggatgcattcgataagatgtgcagtaagctcccaaagagcctaagtgaagaatgccaggaggtggtggacacttatggtagctccatattgtctattttattggaggaggtgagcccagagctggtatgcagcatgctccacctgtgttctggaacgcggctgcctgcattgacagttcacgtgacccagcccaaagacggtgggttttgtgaggtgtgcaagaaactagtggggtatcttgacagaaatctggagaaaaactctaccaaacaggaaattctcgccgcactcgaaaagggctgttcttttctcccagatccttaccagaaacagtgtgatcaattcgtcgcagagtacgaacccgtcctaattgaaatcttggttgaggtgatggacccatcatttgtttgtctaaagataggtgcttgcccatcggcacacaagcctctcctcgggaccgagaagtgtatatgggggcctagctattggtgccagaacacagagactgcagcacaatgtaatgccgtcgagcattgcaaaaggcatgtttggaattag

SEQ ID NO: 131878 - DNA, 1809 bp, Artificial Sequence
  derived and/or modified sequence
gggggatcagctgacgctccgcattgcagactgcggagtcagacggcgctatgtacgccctcttcctcctggccagcctcctgggcgcggctctagccggcccggtccttggactgaaagaatgcaccaggggctcggcagtgtggtgccagaatgtgaagacggcgtccgactgcggggcagtgaagcactgcctgcagaccgtttggaacaagccaacagtgaaatcccttccctgcgacatatgcaaagacgttgtcaccgcagctggtgatatgctgaaggacaatgccactgaggaggagatccttgtttacttggagaagacctgtgactggcttccgaaaccgaacatgtctgcttcatgcaaggagatagtggactcctacctccctgtcatcctggacatcattaaaggagaaatgagccgtcctggggaggtgtgctctgctctcaacctctgcgagtctctccagaagcacctagcagagctgaatcaccagaagcagctggagtccaataagatcccagagctggacatgactgaggtggtggcccccttcatggccaacatccctctcctcctctaccctcaggacggcccccgcagcaagccccagccaaaggataatggggacgtttgccaggactgcattcagatggtgactgacatccagactgctgtacggaccaactccacctttgtccaggccttggtggaacatgtcaaggaggagtgtgaccgcctgggccctggcatggccgacatatgcaagaactatatcagccagtattctgaaattgctatccagatgatgatgcacatgcaacccaaggagatctgtgcgctggttgggttctgtgatgaggtgaaagagatgcccatgcagactctggtccccgccaaagtggcctccaagaatgtcatccctgccctggaactggtggagcccattaagaagcacgaggtcccagcaaagtctgatgtttactgtgaggtgtgtgaattcctggtgaaggaggtgaccaagctgattgacaacaacaagactgagaaagaaatactcgacgcttttgacaaaatgtgctcgaagctgccgaagtccctgtcggaagagtgccaggaggtggtggacacgtacggcagctccatcctgtccatcctgctggaggaggtcagccctgagctggtgtgcagcatgctgcacctctgctctggcacgcggctgcctgcactgaccgttcacgtgactcagccaaaggacggtggcttctgcgaagtgtgcaagaagctggtgggttatttggatcgcaacctggagaaaaacagcaccaagcaggagatcctggctgctcttgagaaaggctgcagcttcctgccagacccttaccagaagcagtgtgatcagtttgtggcagagtacgagcccgtgctgatcgagatcctggtggaggtgatggatccttccttcgtgtgcttgaaaattggagcctgcccctcggcccataagcccttgttgggaactgagaagtgtatatggggcccaagctactggtgccagaacacagagacagcagcccagtgcaatgctgtcgagcattgcaaacgccatgtgtggattggatgctggggtgtgggggttggaagctgtctgtggcccacttgggcacccacgcttctgtccacttctggttgccaggagacagcaagcaaagccagcaggacatgaagttgctattaaatggacttcgtgatttttgttttgcactaaagtttctgtgatttaacaataaaattctgttagccag

SEQ ID NO: 131879 - DNA, 1915 bp, Artificial Sequence
  derived and/or modified sequence
gcgggggatcagctgacgctccgcattgcagactgcggagtcagacggcgctatgtacgccctcttcctcctggccagcctcctgggcgcggctctagccggcccggtccttggactgaaagaatgcaccaggggctcggcagtgtggtgccagaatgtgaagacggcgtccgactgcggggcagtgaagcactgcctgcagaccgtttggaacaagccaacagtgaaatcccttccctgcgacatatgcaaagacgttgtcaccgcagctggtgatatgctgaaggacaatgccactgaggaggagatccttgtttacttggaggtcagccctgagctggtgtgcagcatgctgcacctctgctctggcacgcggctgcctgcactgaccgttcacgtgactcagccaaaggacggtggcttctgcgaagtgtgcaagaagctggtgggttatttggatcgcaacctggagaaaaacagcaccaagcaggagatcctggctgctcttgagaaaggctgcagcttcctgccagacccttaccagaagcagtgtgatcagtttgtggcagagtacgagcccgtgctgatcgagatcctggtggaggtgatggatccttccttcgtgtgcttgaaaattggagcctgcccctcggcccataagcccttgttgggaactgagaagtgtatatggggcccaagctactggtgccagaacacagagacagcagcccagtgcaatgctgtcgagcattgcaaacgccatgtgtggaactaggaggaggaatattccatcttggcagaaaccacagcattggtttttttctacttgtgtgtctgggggaatgaacgcacagatctgtttgactttgttataaaaatagggctcccccacctcccccatttctgtgtcctttattgtagcattgctgtctgcaagggagcccctagcccctggcagacatagctgcttcagtgccccttttctctctgctagatggatgttgatgcactggaggtcttttagcctgcccttgcatggcgcctgctggaggaggagagagctctgctggcatgagccacagtttcttgactggaggccatcaaccctcttggttgaggccttgttctgagccctgacatgtgcttgggcactggtgggcctgggcttctgaggtggcctcctgccctgatcagggaccctccccgctttcctgggcctctcagttgaacaaagcagcaaaacaaaggcagttttatatgaaagattagaagcctggaataatcaggctttttaaatgatgtaattcccactgtaatagcatagggattttggaagcagctgctggtggcttgggacatcagtggggccaagggttctctgtccctggttcaactgtgatttggctttcccgtgtctttcctggtgatgccttgtttggggttctgtgggtttgggtgggaagagggccatctgcctgaatgtaacctgctagctctccgaaggccctgcgggcctggcttgtgtgagcgtgtggacagtggtggccgcgctgtgcctgctcgtgttgcctacatgtccctggctgttgaggcgctgcttcagcctgcacccctcccttgtctcatagatgctccttttgaccttttcaaataaatatggatggcgagctcctaggcctctggcttcctggtagagggcggcatgccgaagggtctgctgggtgtggattggatgctggggtgtgggggttggaagctgtctgtggcccacttgggcacccacgcttctgtccacttctggttgccaggagacagcaagcaaagccagcaggacatgaagttgctattaaatggacttcgtgatttttgttttgcactaaagtttctgtgatttaacaataaaattctgttagcc

SEQ ID NO: 131880 - DNA, 2866 bp, Artificial Sequence
  derived and/or modified sequence
gctgagtcagggcgctgttgagctcgggcaggcccggatggggcggggttagcgcctgcgctctggacggctttggggcagggcagatttatatctgcgggggatcagctgacgctccgcattgcagactgcggagtcagacggcgctatgtacgccctcttcctcctggccagcctcctgggcgcggctctagccggcccggtccttggactgaaagaatgcaccaggggctcggcagtgtggtgccagaatgtgaagacggcgtccgactgcggggcagtgaagcactgcctgcagaccgtttggaacaagccaacagtgaaatcccttccctgcgacatatgcaaagacgttgtcaccgcagctggtgatatgctgaaggacaatgccactgaggaggagatccttgtttacttggagaagacctgtgactggcttccgaaaccgaacatgtctgcttcatgcaaggagatagtggactcctacctccctgtcatcctggacatcattaaaggagaaatgagccgtcctggggaggtgtgctctgctctcaacctctgcgagtctctccagaagcacctagcagagctgaatcaccagaagcagctggagtccaataagatcccagagctggacatgactgaggtggtggcccccttcatggccaacatccctctcctcctctaccctcaggacggcccccgcagcaagccccagccaaaggataatggggacgtttgccaggactgcattcagatggtgactgacatccagactgctgtacggaccaactccacctttgtccaggccttggtggaacatgtcaaggaggagtgtgaccgcctgggccctggcatggccgacatatgcaagaactatatcagccagtattctgaaattgctatccagatgatgatgcacatgcaacccaaggagatctgtgcgctggttgggttctgtgatgaggtgaaagagatgcccatgcagactctggtccccgccaaagtggcctccaagaatgtcatccctgccctggaactggtggagcccattaagaagcacgaggtcccagcaaagtctgatgtttactgtgaggtgtgtgaattcctggtgaaggaggtgaccaagctgattgacaacaacaagactgagaaagaaatactcgacgcttttgacaaaatgtgctcgaagctgccgaagtccctgtcggaagagtgccaggaggtggtggacacgtacggcagctccatcctgtccatcctgctggaggaggtcagccctgagctggtgtgcagcatgctgcacctctgctctggcacgcggctgcctgcactgaccgttcacgtgactcagccaaaggacggtggcttctgcgaagtgtgcaagaagctggtgggttatttggatcgcaacctggagaaaaacagcaccaagcaggagatcctggctgctcttgagaaaggctgcagcttcctgccagacccttaccagaagcagtgtgatcagtttgtggcagagtacgagcccgtgctgatcgagatcctggtggaggtgatggatccttccttcgtgtgcttgaaaattggagcctgcccctcggcccataagcccttgttgggaactgagaagtgtatatggggcccaagctactggtgccagaacacagagacagcagcccagtgcaatgctgtcgagcattgcaaacgccatgtgtggaactaggaggaggaatattccatcttggcagaaaccacagcattggtttttttctacttgtgtgtctgggggaatgaacgcacagatctgtttgactttgttataaaaatagggctcccccacctcccccatttctgtgtcctttattgtagcattgctgtctgcaagggagcccctagcccctggcagacatagctgcttcagtgccccttttctctctgctagatggatgttgatgcactggaggtcttttagcctgcccttgcatggcgcctgctggaggaggagagagctctgctggcatgagccacagtttcttgactggaggccatcaaccctcttggttgaggccttgttctgagccctgacatgtgcttgggcactggtgggcctgggcttctgaggtggcctcctgccctgatcagggaccctccccgctttcctgggcctctcagttgaacaaagcagcaaaacaaaggcagttttatatgaaagattagaagcctggaataatcaggctttttaaatgatgtaattcccactgtaatagcatagggattttggaagcagctgctggtggcttgggacatcagtggggccaagggttctctgtccctggttcaactgtgatttggctttcccgtgtctttcctggtgatgccttgtttggggttctgtgggtttgggtgggaagagggccatctgcctgaatgtaacctgctagctctccgaaggccctgcgggcctggcttgtgtgagcgtgtggacagtggtggccgcgctgtgcctgctcgtgttgcctacatgtccctggctgttgaggcgctgcttcagcctgcacccctcccttgtctcatagatgctccttttgaccttttcaaataaatatggatggcgagctcctaggcctctggcttcctggtagagggcggcatgccgaagggtctgctgggtgtggattggatgctggggtgtgggggttggaagctgtctgtggcccacttgggcacccacgcttctgtccacttctggttgccaggagacagcaagcaaagccagcaggacatgaagttgctattaaatggacttcgtgatttttgttttgcactaaagtttctgtgatttaacaataaaattctgttagccaga

SEQ ID NO: 131881 - DNA, 1680 bp, Artificial Sequence
  derived and/or modified sequence
atgtacgccctgttcctgctggccagcctgctgggcgccgccctggccggccccgtgctgggcctgaaggagtgcaccagaggcagcgccgtgtggtgccagaacgtgaagaccgccagcgactgcggcgccgtgaagcactgcctgcagaccgtgtggaacaagcccaccgtgaagagcctgccctgcgacatctgcaaggacgtggtgaccgccgccggcgacatgctgaaggacaacgccaccgaggaggagatcctggtgtacctggagaagacctgcgactggctgcccaagcccaacatgagcgccagctgcaaggagatcgtggacagctacctgcccgtgatcctggacatcatcaagggcgagatgagcagacccggcgaggtgtgcagcgccctgaacctgtgcgagagcctgcagaagcacctggccgagctgaaccaccagaagcagctggagagcaacaagatccccgagctggacatgaccgaggtggtggcccccttcatggccaacatccccctgctgctgtacccccaggacggccccagaagcaagccccagcccaaggacaacggcgacgtgtgccaggactgcatccagatggtgaccgacatccagaccgccgtgagaaccaacagcaccttcgtgcaggccctggtggagcacgtgaaggaggagtgcgacagactgggccccggcatggccgacatctgcaagaactacatcagccagtacagcgagatcgccatccagatgatgatgcacatgcagcccaaggagatctgcgccctggtgggcttctgcgacgaggtgaaggagatgcccatgcagaccctggtgcccgccaaggtggccagcaagaacgtgatccccgccctggagctggtggagcccatcaagaagcacgaggtgcccgccaagagcgacgtgtactgcgaggtgtgcgagttcctggtgaaggaggtgaccaagctgatcgacaacaacaagaccgagaaggagatcctggacgccttcgacaagatgtgcagcaagctgcccaagagcctgagcgaggagtgccaggaggtggtggacacctacggcagcagcatcctgagcatcctgctggaggaggtgagccccgagctggtgtgcagcatgctgcacctgtgcagcggcaccagactgcccgccctgaccgtgcacgtgacccagcccaaggacggcggcttctgcgaggtgtgcaagaagctggtgggctacctggacagaaacctggagaagaacagcaccaagcaggagatcctggccgccctggagaagggctgcagcttcctgcccgacccctaccagaagcagtgcgaccagttcgtggccgagtacgagcccgtgctgatcgagatcctggtggaggtgatggaccccagcttcgtgtgcctgaagatcggcgcctgccccagcgcccacaagcccctgctgggcaccgagaagtgcatctggggccccagctactggtgccagaacaccgagaccgccgcccagtgcaacgccgtggagcactgcaagagacacgtgtggatcggctgctggggcgtgggcgtgggcagctgcctgtggcccacctgggcccccaccctgctgagcaccagcggctgccaggagaccgccagcaaggccagcagaacctag

SEQ ID NO: 131882 - DNA, 723 bp, Artificial Sequence
  derived and/or modified sequence
atgtacgccctgttcctgctggccagcctgctgggcgccgccctggccggccccgtgctgggcctgaaggagtgcaccagaggcagcgccgtgtggtgccagaacgtgaagaccgccagcgactgcggcgccgtgaagcactgcctgcagaccgtgtggaacaagcccaccgtgaagagcctgccctgcgacatctgcaaggacgtggtgaccgccgccggcgacatgctgaaggacaacgccaccgaggaggagatcctggtgtacctggaggtgagccccgagctggtgtgcagcatgctgcacctgtgcagcggcaccagactgcccgccctgaccgtgcacgtgacccagcccaaggacggcggcttctgcgaggtgtgcaagaagctggtgggctacctggacagaaacctggagaagaacagcaccaagcaggagatcctggccgccctggagaagggctgcagcttcctgcccgacccctaccagaagcagtgcgaccagttcgtggccgagtacgagcccgtgctgatcgagatcctggtggaggtgatggaccccagcttcgtgtgcctgaagatcggcgcctgccccagcgcccacaagcccctgctgggcaccgagaagtgcatctggggccccagctactggtgccagaacaccgagaccgccgcccagtgcaacgccgtggagcactgcaagagacacgtgtggaactag

SEQ ID NO: 131883 - DNA, 1575 bp, Artificial Sequence
  derived and/or modified sequence
atgtacgccctgttcctgctggccagcctgctgggcgccgccctggccggccccgtgctgggcctgaaggagtgcaccagaggcagcgccgtgtggtgccagaacgtgaagaccgccagcgactgcggcgccgtgaagcactgcctgcagaccgtgtggaacaagcccaccgtgaagagcctgccctgcgacatctgcaaggacgtggtgaccgccgccggcgacatgctgaaggacaacgccaccgaggaggagatcctggtgtacctggagaagacctgcgactggctgcccaagcccaacatgagcgccagctgcaaggagatcgtggacagctacctgcccgtgatcctggacatcatcaagggcgagatgagcagacccggcgaggtgtgcagcgccctgaacctgtgcgagagcctgcagaagcacctggccgagctgaaccaccagaagcagctggagagcaacaagatccccgagctggacatgaccgaggtggtggcccccttcatggccaacatccccctgctgctgtacccccaggacggccccagaagcaagccccagcccaaggacaacggcgacgtgtgccaggactgcatccagatggtgaccgacatccagaccgccgtgagaaccaacagcaccttcgtgcaggccctggtggagcacgtgaaggaggagtgcgacagactgggccccggcatggccgacatctgcaagaactacatcagccagtacagcgagatcgccatccagatgatgatgcacatgcagcccaaggagatctgcgccctggtgggcttctgcgacgaggtgaaggagatgcccatgcagaccctggtgcccgccaaggtggccagcaagaacgtgatccccgccctggagctggtggagcccatcaagaagcacgaggtgcccgccaagagcgacgtgtactgcgaggtgtgcgagttcctggtgaaggaggtgaccaagctgatcgacaacaacaagaccgagaaggagatcctggacgccttcgacaagatgtgcagcaagctgcccaagagcctgagcgaggagtgccaggaggtggtggacacctacggcagcagcatcctgagcatcctgctggaggaggtgagccccgagctggtgtgcagcatgctgcacctgtgcagcggcaccagactgcccgccctgaccgtgcacgtgacccagcccaaggacggcggcttctgcgaggtgtgcaagaagctggtgggctacctggacagaaacctggagaagaacagcaccaagcaggagatcctggccgccctggagaagggctgcagcttcctgcccgacccctaccagaagcagtgcgaccagttcgtggccgagtacgagcccgtgctgatcgagatcctggtggaggtgatggaccccagcttcgtgtgcctgaagatcggcgcctgccccagcgcccacaagcccctgctgggcaccgagaagtgcatctggggccccagctactggtgccagaacaccgagaccgccgcccagtgcaacgccgtggagcactgcaagagacacgtgtggaactag

SEQ ID NO: 131884 - protein, 1024 aa, Artificial Sequence
  derived and/or modified sequence
MAQGAMRFCSEGDCAISPPRCPRRWLPEGPVPQSPPASMYGSTGSLLRRVAGPGPRGRELGRVTAPCTPLRGPPSPRVAPSPWAPSSPTGQPPPGAQSSVVIFRFVEKASVRPLNGLPAPGGLSRSWDLGGVSPPRPTPALGPGSNRKLRLEASTSDPLPARGGSALPGSRNLVHGPPAPPQVGADGLYSSLPNGLGGPPERLATLFGGPADTGFLNQGDTWSSPREVSSHAQRIARAKWEFFYGSLDPPSSGAKPPEQAPPSPPGVGSRQGSGVAVGRAAKYSETDLDTVPLRCYRETDIDEVLAEREEADSAIESQPSSEGPPGTAYPPAPRPGPLPGPHPSLGSGNEDEDDDEAGGEEDVDDEVFEASEGARPGSRMPLKSPVPFLPGTSPSADGPDSFSCVFEAILESHRAKGTSYTSLASLEALASPGPTQSPFFTFELPPQPPAPRPDPPAPAPLAPLEPDSGTSSAADGPWTQRGEEEEAEARAKLAPGREPPSPCHSEDSLGLGAAPLGSEPPLSQLVSDSDSELDSTERLALGSTDTLSNGQKADLEAAQRLAKRLYRLDGFRKADVARHLGKNNDFSKLVAGEYLKFFVFTGMTLDQALRVFLKELALMGETQERERVLAHFSQRYFQCNPEALSSEDGAHTLTCALMLLNTDLHGHNIGKRMTCGDFIGNLEGLNDGGDFPRELLKALYSSIKNEKLQWAIDEEELRRSLSELADPNPKVIKRISGGSGSGSSPFLDLTPEPGAAVYKHGALVRKVHADPDCRKTPRGKRGWKSFHGILKGMILYLQKEEYKPGKALSETELKNAISIHHALATRASDYSKRPHVFYLRTADWRVFLFQAPSLEQMQSWITRINVVAAMFSAPPFPAAVSSQKKFSRPLLPSAATRLSQEEQVRTHEAKLKAMASELREHRAAQLGKKGRGKEAEEQRQKEAYLEFEKSRYSTYAALLRVKLKAGSEELDAVEAALAQAGSTEDGLPPSHSSPSLQPKPSSQPRAQRHSSEPRPGAGSGRRKP

SEQ ID NO: 131885 - protein, 927 aa, Artificial Sequence
  derived and/or modified sequence
QIWRCPLQHHAESAPPLPALSWAQPLLCLSSVSALGEQRPTPALGPGSNRKLRLEASTSDPLPARGGSALPGSRNLVHGPPAPPQVGADGLYSSLPNGLGGPPERLATLFGGPADTGFLNQGDTWSSPREVSSHAQRIARAKWEFFYGSLDPPSSGAKPPEQAPPSPPGVGSRQGSGVAVGRAAKYSETDLDTVPLRCYRETDIDEVLAEREEADSAIESQPSSEGPPGTAYPPAPRPGPLPGPHPSLGSGNEDEDDDEAGGEEDVDDEVFEASEGARPGSRMPLKSPVPFLPGTSPSADGPDSFSCVFEAILESHRAKGTSYTSLASLEALASPGPTQSPFFTFELPPQPPAPRPDPPAPAPLAPLEPDSGTSSAADGPWTQRGEEEEAEARAKLAPGREPPSPCHSEDSLGLGAAPLGSEPPLSQLVSDSDSELDSTERLALGSTDTLSNGQKADLEAAQRLAKRLYRLDGFRKADVARHLGKNNDFSKLVAGEYLKFFVFTGMTLDQALRVFLKELALMGETQERERVLAHFSQRYFQCNPEALSSEDGAHTLTCALMLLNTDLHGHNIGKRMTCGDFIGNLEGLNDGGDFPRELLKALYSSIKNEKLQWAIDEEELRRSLSELADPNPKVIKRISGGSGSGSSPFLDLTPEPGAAVYKHGALVRKVHADPDCRKTPRGKRGWKSFHGILKGMILYLQKEEYKPGKALSETELKNAISIHHALATRASDYSKRPHVFYLRTADWRVFLFQAPSLEQMQSWITRINVVAAMFSAPPFPAAVSSQKKFSRPLLPSAATRLSQEEQVRTHEAKLKAMASELREHRAAQLGKKGRGKEAEEQRQKEAYLEFEKSRYSTYAALLRVKLKAGSEELDAVEAALAQAGSTEDGLPPSHSSPSLQPKPSSQPRAQRHSSEPRPGAGSGRRKP

SEQ ID NO: 131886 - DNA, 1768 bp, Artificial Sequence
  derived and/or modified sequence
attttcgcaccacagcactgcacggaaagtcagcgtgacggggacgaggagccccgcggagggatccgcgcgcagttcagtcgctacggccgacggacggagcgccgcgcccggcccgagatgcctccgccggccttaaagggggcccataaagacgcactgccaagggctccgtgtgccccggggccgcgggaatgcggatcgcagccggcagggaggggccgcggcggagccttagacttgggggagccaaggaggccactcccaggaggctgcggagcaaatgactgcctccccgagcccctggctgcaaaagcagaggttgcccgtggcttttgcagctctggacacgcgggtgcagcccagggaacgtggacaagaggtgttgacggaccggaccgtgcatttgagttggggcatatcgaagtggtttaattaaaagccgcgagtgtggccccagatcctggcgttatcaaagcaaatcaaagcctttcttttccagccgagcgggccctgtggaaatgagatgtacatttacccttgacgcaccgcaagcctggccgaggctctcaggttaattgatatttaatggaaatcatgcccatgaatatagtttccatcatttcacccttgatagacgtcagccctgggcgcagggggaggctgaagaatgcaggagggggcattaggcttgctgagagagtaaatagaagagcggacagaaacgttctgaggcgggaaaaagggctcgcgctggggagggtgacatttcctcgggcaggacgcggctcccgggtctcagccccggcgcgcagcgaaccagggccggctgcggttcccggaggagtgcggagggcagacgaccgcaagttccccccaggagcctcccagccggcgttcagatcgcgccggttccaggcagctgcaggcggcccatcttatgctaacgatcctacttcctccgccaagcctgtgaaattactgccgagagagcgcgcaggcctcaaagttacgaatttttcccaaagcagagaaagagaaggctcagcctagtttgtgagcagagatgaagaaaagttgcccgagtcatgtggcccagtcgagtgtgaatcgacaaaatattcccgactgagccccgtttccttcgggataggtacaatgtcgtgagggcgccaggcccacagccttggaaatagacctccaaggcgcccctgctcaagctaaacgcaccacgccggctttccacaccaaatgcaaatttccgaaaaccccagacggcctcagagatgctgcaggctggcgagcgatttcagctacccctagctccttgtgggttggcccagcctgcgagcgcgatcctgacttgtgtccgggtggactgaaatatcatttttacaaatggagaaaatgagatcgagatggacagacatagcaaggtgataatgtccgactcaattatttctactgggaatgactgaaaggtaaaggaatcgttaatgaatctggagatgacagaggcatgctttatttaatttttaaattagtaaggagtgcagacttggggtggtggagagcaagggtttttttgttgttgttgctgtttgtttttgtggggttttttttctgctggttattgccaagtataatgactttctttaaatccgaaggcgaacgaattgattctgacaattaaggatttgtccttcaatcttgcaaatgcccaattaaaagattattattgtcaataaagccttggagctacctttgt

SEQ ID NO: 131887 - DNA, 3075 bp, Artificial Sequence
  derived and/or modified sequence
atggcacaaggagccatgagattttgctctgagggtgattgtgcgatctccccaccaagatgcccacgcagatggctgcctgaggggccagtgccacaatcacccccagccagcatgtacgggtccacgggctcccttttgaggagagtggcagggccagggccccgcggccgggaactagggagggtgacagcaccatgcacgccccttaggggaccgccttccccccgcgtggccccttctccgtgggccccatcgtcacccaccggccaacctccccctggggcacagagctcagtggtgatcttccgcttcgtcgagaaagctagcgtgcgccctctgaatgggctccctgctcctgggggcctgtcaagatcttgggatcttggcggggtctcccctcctagaccaactccggccttagggcccggttcaaacagaaagctacgcctcgaagccagcacgagtgacccactgcccgcccggggaggctcagcactccctgggtcgcgcaatctcgttcacggccctcctgcaccgcctcaggtcggggccgacggcctgtattcttctctcccgaatgggctggggggtccccctgagagactcgctactctcttcggtggccctgcagacactggcttcctcaatcagggcgatacttggtctagcccaagagaagtttcttcccacgctcagaggattgccagagcaaagtgggaatttttctatgggtcactggaccccccgagcagcggcgcaaagccccccgaacaggcgcctcctagcccccccggggtgggatcccggcagggaagcggggtggccgtgggacgcgccgccaaatacagtgagaccgacctcgacactgtacctttaaggtgttatagagaaaccgacatagacgaagttctcgccgagagggaagaggctgacagtgcaatagagagccagccatcttctgaagggccacccggcacggcctaccctccagctccacgcccggggcccctgcccggtccgcatccaagtcttggctcgggcaatgaagatgaggatgatgatgaggctggaggtgaggaggatgtcgatgacgaagtgttcgaagcctcagaaggcgccagaccggggtcacgcatgccccttaagtctcccgtccctttcctgccaggtacatcaccttccgctgatggtccagactccttttcttgtgtctttgaggctatcctggagtcacaccgcgccaaagggacctcttacaccagcctagctagccttgaggctctggccagccctggtccaacacaaagcccattcttcaccttcgaacttcctccccagccaccagccccaagaccagacccgccagctcccgcccccttagccccgctagaaccagactccggtacctcgtctgccgccgatgggccctggacccagcgcggcgaagaagaagaggcagaagctagagcgaagctcgcacctggcagggagcctccttccccctgtcacagtgaagactcgttaggtttgggagctgcacctctcggctctgagcccccactgagccagttagtgtccgacagcgacagcgaactggattccacggaaagactggccttagggagtactgacacattatccaacgggcagaaggccgatctggaggctgcgcaacggctggcgaaacgcctctatcggctagatggttttcgaaaggcggatgtggcccgccatctcggcaagaataatgactttagcaaactcgtggccggtgaatacctcaaattttttgtttttacaggtatgaccctggaccaagccctgcgcgtgttcctgaaggagcttgctttaatgggggagacgcaggaacgggaacgcgtgctagcccatttcagtcagcggtacttccaatgcaatcccgaagctctgtcctcagaagatggcgcccacacgttaacgtgcgctctaatgcttttgaatactgatttgcacggacacaacatcggtaagcggatgacttgtggagacttcatcggaaacttagaaggactgaacgatggcggggacttcccaagggagctgctcaaggcgctgtattcttctatcaagaacgagaagctccaatgggctattgacgaagaagaactgaggcgatcactgtctgagctggccgaccccaatccaaaagtgatcaagagaatttccgggggctcaggatccggatcaagtccttttttggacctgactcctgaaccaggcgccgctgtatataaacatggcgctctcgttcgcaaagtgcatgccgatcccgattgccgaaagactccacgggggaaaaggggatggaaaagcttccatggaatcctaaagggaatgattctgtacttgcagaaagaggaatacaaacctgggaaggctctgtcggagacagaattgaagaacgcaataagcatccatcatgccctggccacccgggccagtgactattccaaacggccccatgtcttttacctgcgaacagcagactggcgggtctttctgtttcaggcccctagcctggagcaaatgcagtcttggattactcggattaatgtagtggctgcaatgttcagtgcccccccctttcccgccgctgtgtctagccagaaaaaattttctcgacctttactcccgtcagccgccaccagactttcacaagaggaacaggttcggacacacgaagccaagctcaaggccatggccagtgaactgcgtgaacacagagcagctcagctgggcaaaaagggcagaggaaaggaggcagaagaacagaggcagaaggaagcatatctggagtttgagaaatcccggtattcaacttacgcagctctgcttagggttaagctgaaggcgggtagtgaggagctggatgccgttgaggctgcactggcgcaggcgggttctaccgaggatggtttaccaccatcacacagttccccctcgttacagccaaagccctctagtcagcctcgcgctcagagacactcaagcgagcccagaccaggggccggatccgggcgacggaaaccgtag

SEQ ID NO: 131888 - DNA, 3075 bp, Artificial Sequence
  derived and/or modified sequence
atggcccagggggccatgcgattctgcagcgagggagactgcgccatcagtccaccacggtgccctcggagatggcttcctgaaggacctgttccacagtccccgccagcctctatgtatggctcgaccggaagcctgctcaggagggtggccgggccagggccacgtggcagggagctggggcgggtgactgctccttgcacccctctgcggggtcctccttctccccgggtggcacctagcccatgggcgcctagttctccaactggccagccccctcccggagctcagagcagcgttgtgattttccgctttgtcgaaaaggcctcagtacggcctctgaatgggcttcctgcccccggcgggctcagccgctcatgggatctcgggggcgtcagtcctcctcgccccacgcctgctctgggacctggcagcaatagaaagttgcggctcgaggcctccacatccgatccactgcctgcacggggaggaagcgcccttcccggatctaggaacctcgttcatggccccccagcgcccccacaggtgggggccgatggcttatacagttccctacccaatggattgggaggcccacccgaacgcctggccacccttttcggaggcccggcggatacaggctttcttaatcagggagatacttggtcttctccccgcgaggtaagttcccatgcacagagaatcgcacgcgcaaagtgggagtttttctatggttccctggacccccctagctctggagcgaaaccccctgaacaggctccccccagtcctcctggagttggcagccgccaaggatccggggtggcggtgggtcgcgcagcgaagtacagtgagactgacctggacaccgtccccctaagatgttaccgtgaaacagatatcgacgaggtgcttgctgagcgcgaagaggccgactccgctatcgaatctcagccctcttcggagggccctcctgggaccgcctatcctcctgctcctagacccgggcctttaccaggcccacatccgtctctgggctctggaaatgaggatgaagacgacgacgaagcggggggcgaagaagacgtggacgacgaggtgttcgaggcatctgagggtgctcgaccaggtagccggatgccgttgaaatctcccgtgccttttctgcccgggacctccccatcggccgacggccctgactcttttagttgtgtgtttgaggccatcctcgagtctcatagagctaagggaacgagctacacgagtcttgcgagccttgaagccctcgcttcgcctggtccaacacagtctcctttttttacattcgaactccctccccagccccccgcacctagacccgaccctcctgcacctgcccctctggccccgctggaacctgactccggcacttcctccgccgctgatggcccgtggactcagcgaggggaagaggaagaggccgaagcaagagctaaactggccccaggcagagagccacccagcccctgccatagcgaagactccctgggccttggtgcagctccccttgggtctgaacccccgctcagccaactcgtttctgactcagactctgaactagacagtacggaacgactggcactgggctccactgacacactatctaatggccaaaaagccgacctcgaggccgcacagcggttagccaagaggctgtatcggctggatgggtttagaaaggccgatgtcgcaagacaccttggaaaaaacaatgactttagtaaactggtcgcaggggagtatctgaagtttttcgtgtttaccgggatgaccctggaccaggccctaagagtcttcctgaaggagctggcactgatgggtgagacacaagaaagagagagggtactggcccatttctctcaacgatatttccagtgtaaccctgaagcactctcctctgaggacggcgcacacaccctcacctgtgcgcttatgctacttaatactgacctgcatggacataatatcgggaaaaggatgacatgcggggactttataggaaacttggagggacttaatgacggaggcgacttccccagggaactactcaaggctctttattcttctatcaagaacgagaagttgcagtgggctattgacgaagaagagttgagaagaagtctgtccgaattggctgaccccaacccgaaggtgatcaagcggatatcaggcgggtccgggagcggttccagcccattcctggatctcactcctgagcctggagccgccgtctataagcacggggccctggtccgaaaagtacacgcagatcccgactgcaggaagaccccgcgcggcaaacgcggctggaagtcctttcatggcatcctgaaggggatgatcctgtacctgcagaaagaggagtacaagccggggaaggccctgtccgagaccgagctgaaaaacgcaatttctattcaccacgccctcgctaccagagccagtgattattctaagcgacctcacgtgttctacctccgaaccgctgactggcgtgtctttttattccaggctccctcccttgagcagatgcagagctggatcacacgcataaatgtagtcgcagcgatgtttagtgcaccaccattccctgcagcagtctcgtctcaaaagaaatttagccgtcctctcctaccaagcgcggccacaaggttgagccaggaggaacaggttcgtacacatgaggccaagcttaaagctatggcgagtgagctgcgcgaacatagggctgcccagcttggcaaaaaaggccggggaaaggaggccgaggaacaacgacagaaagaagcttacttagaattcgaaaagagccgttactctacctacgccgccctactaagagtcaagctgaaggctgggagtgaggagctggatgcagtggaggccgcattggctcaagccgggagcacagaagatggcctcccaccaagccactcatccccttccctacaacccaagccttctagtcagccaagagctcagcggcacagttcagagcccagaccaggagccggctcaggcagacgcaaaccttag

SEQ ID NO: 131889 - DNA, 2784 bp, Artificial Sequence
  derived and/or modified sequence
caaatctggcgctgtcctctacagcatcacgcagagagcgcaccacctctacctgcacttagttgggctcagcccctgctgtgccttagctcagtcagtgccctgggagaacagagacccacaccagccctcgggccaggtagtaatcggaagttgcggctcgaggcctccacatcagaccccctgcctgcacgggggggcagcgcgttacctggctcccggaaccttgtgcatggccccccagctcccccacaagtaggcgctgatggcctttatagcagtctgccgaatgggttaggtggacctccagaaagactagcaacgttgtttggtggccccgccgacacggggttcttaaatcagggagatacttggtcctccccccgggaggtttcatcccatgctcagcgcatcgctagagctaagtgggagtttttttatgggtctctggaccccccatcctcaggcgcgaaaccccctgaacaagcccccccatcaccacccggagtcggttctaggcagggcagtggcgtggcagtgggaagagccgcaaaatatagcgaaactgatctggacacagtccctctgcgatgctatcgagaaacggatatagatgaggtgctggccgagagagaagaagctgattcagccattgaatcccagccttccagtgaaggaccacctggcacagcctatccgcccgcgccaaggcccgggccactgccagggccccatccatctctgggatccggcaatgaggacgaggatgatgatgaggctggaggcgaggaagacgtcgacgatgaagtgttcgaagcttctgaaggcgcacgccccggctccaggatgcccttaaaatccccggtaccttttctcccagggacttccccctcagctgatggccccgactccttttcctgcgttttcgaggccatcctcgagagtcatcgcgctaagggtactagctacacctctctggcttccttagaggcacttgccagtcctgggccaacacaatcacccttttttacctttgagctcccccctcaacctccagccccacgcccagatccacccgcacctgcacccctagcaccactggaacctgattccggtacatcctccgcggccgacgggccttggacccaaagaggagaagaggaggaggcagaggccagggctaagctggctcccgggcgggaacctccctctccctgtcacagtgaagactccttagggttaggggctgcacccctaggctctgaaccccccttgagccaactggtctctgatagcgacagtgaattggacagtacagaacgactggctttagggtcgaccgatactctgtctaatggccagaaagcagacttagaagcggcacagcgtctagccaagaggttgtacaggttggacggtttccgcaaagccgacgtcgctcgccaccttgggaagaacaacgacttctccaagctggtcgccggagagtacctgaagttctttgtatttactggaatgacactcgaccaggccctcagggtgttcttaaaagagctcgctctcatgggcgaaacacaggagcgcgagcgagttttggctcactttagccaaaggtactttcagtgcaatcccgaggccctgtccagtgaagatggtgctcataccctcacgtgtgccttgatgctattgaacacggaccttcacgggcacaatattgggaagcgaatgacgtgcggagacttcatagggaacctcgaaggcctcaatgatggcggtgattttccccgggagcttctgaaggccctgtacagttctattaaaaatgaaaaattacaatgggccattgatgaggaagagctccgacgtagcctgtctgagctcgccgatcccaatcctaaggtcataaagcgcatatccggcggatctggatcggggtcttccccattcctagacctgacaccagagccgggcgccgctgtctataaacacggtgccctggtgcgaaaggtgcatgcagacccagattgtcgtaagaccccacgcggaaagaggggctggaaaagtttccacggaattcttaaaggcatgatcctgtacctgcagaaggaggaatacaaacccggaaaagcactatcagagacagaactgaaaaacgccatttcaatccaccatgcactggccactcgggcatctgattactcaaaaagacctcatgtcttctacctccggaccgctgactggagggtgttcttatttcaggctccctcgctcgaacaaatgcaatcctggatcactaggatcaatgtggtcgctgctatgttcagcgcccctccatttcctgctgctgtgtcttcacaaaaaaagttttcgcggcctcttctgccctccgcagctacacgactgtcacaggaggagcaggtgcgaacccacgaagctaaactcaaggctatggcaagtgagctgcgagaacacagagcagcacagctgggaaagaagggccgcggaaaagaagccgaggagcagagacagaaggaagcatacctggagttcgagaagagcaggtattcaacttatgccgccctcctaagggtgaagctgaaggcaggttccgaggaactcgacgctgtcgaggccgctctcgctcaggccggctctactgaggacgggctccccccttctcacagttccccttctcttcaacccaagccttcttcccagcctagggcacagcgacattcatccgaacccagacctggtgccggctcgggaaggaggaagccttag

SEQ ID NO: 131890 - DNA, 3075 bp, Artificial Sequence
  derived and/or modified sequence
atggcccagggcgccatgaggttctgcagcgagggggactgtgccatcagccccccacgctgcccccggcgctggctgcctgagggccctgtgccccagagccccccagcctccatgtatggcagcacaggcagcctgctgcggcgggtggccggccctggcccccggggccgggagctgggccgggtgacagccccctgcacccccctgcggggcccccccagcccccgggtggcccccagcccctgggcccccagcagccccaccggccagcccccacctggggcccagagctctgtggtgatcttccgctttgtggagaaggcctctgtgcggcccctgaatggcctgcctgcccctgggggcctgagccgctcctgggacctgggcggcgtgagccccccccggcccaccccagccctgggccctggcagcaacaggaagctgcggctggaggccagcaccagtgaccccctgcctgcccggggcggcagcgccctgcccggcagcaggaacctggtgcacggccccccagccccaccccaggtgggcgcagatggcctgtacagcagcctgcccaacggcctgggcggccccccagagcggctggccaccctgtttggaggccctgctgacaccggcttcctgaaccagggcgacacctggagcagcccccgggaggtgagcagccacgcccagagaattgcccgggccaagtgggagttcttctacggcagcctggacccccccagcagcggggccaagcccccagagcaggccccacccagccccccaggagtgggcagccggcagggcagcggcgtggccgtgggccgggccgccaagtacagcgagacagacctggacacagtgcccctgcgctgctaccgggagacagacattgatgaggtgctggccgagcgggaggaggccgacagcgccatcgagagccagcccagcagcgagggccccccaggcacagcctaccccccagcccccaggcctggccccctgcccggcccccaccccagcctgggcagcggaaatgaagatgaagatgatgatgaagctggaggagaagaagatgtggatgatgaggtgtttgaggccagcgagggcgcccggcccggcagcaggatgcccctgaagagccctgtgcccttcctgcccggcaccagccccagcgcagatggccctgacagcttcagctgtgtgtttgaggccatcctggagagccaccgggccaagggcaccagctacaccagcctggccagcctggaggccctggccagccctggccccacccagagccccttcttcacctttgagctgcccccccagcccccagcccccaggccagaccccccagccccagcccccctggcccccctggagccagacagcggcaccagcagcgctgctgatggcccctggacccagagaggagaggaggaggaggccgaggcccgggccaagctggcccctggccgggagccccccagcccctgccacagcgaggacagcctgggcctgggcgccgcccccctgggcagcgagccccccctgagccagctggtgtctgacagcgacagcgagctggacagcacagagcggctggccctgggcagcacagacaccctgagcaatggccagaaggctgacctggaggccgcccagaggctggccaagaggctgtaccgcctggatggcttcaggaaggcagatgtggcccggcacctgggcaagaacaatgacttcagcaagctggtggccggggagtacctgaagttctttgtgttcaccggcatgaccctggaccaggccctgcgggtcttcctgaaggagctggccctgatgggagagacccaggagcgggagcgggtgctggcccacttcagccagcgctacttccagtgcaaccctgaggccctgagcagtgaagatggagcccacaccctgacctgtgccctgatgctgctgaacacagacctgcacggccacaacatcggcaagaggatgacctgtggggacttcatcggcaacctggagggcctgaatgatggaggagacttcccccgggagctgctgaaggccctgtacagcagcatcaagaatgagaagctgcagtgggccattgatgaggaggagctgcggcgcagcctgtctgagctggccgaccccaaccccaaggtgatcaagaggatcagcggcggcagcggcagcggcagcagccccttcctggacctgaccccagagcctggagctgctgtgtacaagcacggggccctggtgaggaaggtgcatgctgaccctgactgcaggaagaccccccggggcaagaggggctggaagagcttccacggcatcctgaagggcatgatcctgtacctgcagaaggaggagtacaagccaggcaaggccctgtctgaaacagagctgaagaatgccatcagcatccaccacgccctggccacccgggccagtgactacagcaagaggcctcatgtgttctacctgaggacagctgactggagggtcttcctgttccaggcccccagcctggagcagatgcagagctggatcacccgcatcaacgtggtggccgccatgttcagcgccccacccttccctgctgctgtgagcagccagaagaagttcagccggcccctgctgcccagcgctgccacccggctgagccaggaggagcaggtgaggacccatgaggccaagctgaaggccatggccagcgagctgcgggagcacagagctgcccagctgggcaagaagggccggggcaaggaggccgaggagcagaggcagaaggaggcctacctggagtttgagaagagccgctacagcacctacgccgccctgctgcgggtgaagctgaaggccggcagcgaggagctggatgctgtggaggccgccctggcccaggccggcagcacagaagatggcctgccccccagccacagcagccccagcctgcagcccaagcccagcagccagccccgggcccagaggcacagcagcgagcccaggcctggagctggcagcggccgcaggaagccctag

SEQ ID NO: 131891 - DNA, 2784 bp, Artificial Sequence
  derived and/or modified sequence
cagatctggcgctgccccctgcagcaccacgccgagagcgccccacccctgcctgccctgtcctgggcccagcccctgctgtgcctgagctctgtgtctgccctgggggagcagaggcccaccccagccctgggccctggcagcaacaggaagctgcggctggaggccagcaccagtgaccccctgcctgcccggggcggcagcgccctgcccggcagcaggaacctggtgcacggccccccagccccaccccaggtgggcgcagatggcctgtacagcagcctgcccaacggcctgggcggccccccagagcggctggccaccctgtttggaggccctgctgacaccggcttcctgaaccagggcgacacctggagcagcccccgggaggtgagcagccacgcccagagaattgcccgggccaagtgggagttcttctacggcagcctggacccccccagcagcggggccaagcccccagagcaggccccacccagccccccaggagtgggcagccggcagggcagcggcgtggccgtgggccgggccgccaagtacagcgagacagacctggacacagtgcccctgcgctgctaccgggagacagacattgatgaggtgctggccgagcgggaggaggccgacagcgccatcgagagccagcccagcagcgagggccccccaggcacagcctaccccccagccccccggcccggccccctgcccggcccccaccccagcctgggcagcggaaatgaagatgaagatgatgatgaggccggcggggaggaggatgtggatgatgaggtgtttgaggccagcgagggcgcccggcccggcagcaggatgcccctgaagagccctgtgcccttcctgcccggcaccagccccagcgcagatggccctgacagcttcagctgtgtgtttgaggccatcctggagagccaccgggccaagggcaccagctacaccagcctggccagcctggaggccctggccagccctggccccacccagagccccttcttcacctttgagctgcccccccagcccccagcccccaggccagaccccccagccccagcccccctggcccccctggagccagattctggcaccagcagcgctgctgatggcccctggacccagagaggagaggaggaggaggccgaggcccgggccaagctggcccctggccgggagccccccagcccctgccacagcgaggacagcctgggcctgggcgccgcccccctgggcagcgagccccccctgagccagctggtgtctgacagcgacagcgagctggacagcacagagcggctggccctgggcagcacagacaccctgagcaatggccagaaggctgacctggaggccgcccagaggctggccaagaggctgtaccgcctggatggcttcaggaaggcagatgtggcccggcacctgggcaagaacaatgacttcagcaagctggtggccggggagtacctgaagttctttgtgttcaccggcatgaccctggaccaggccctgcgggtcttcctgaaggagctggccctgatgggagagacccaggagcgggagcgggtgctggcccacttcagccagcgctacttccagtgcaaccctgaggccctgagcagtgaagatggagcccacaccctgacctgtgccctgatgctgctgaacacagacctgcacggccacaacatcggcaagaggatgacctgtggggacttcatcggcaacctggagggcctgaatgatggaggagacttcccccgggagctgctgaaggccctgtacagcagcatcaagaatgagaagctgcagtgggccattgatgaggaggagctgcggcgcagcctgtctgagctggccgaccccaaccccaaggtgatcaagaggatcagcggcggcagcggcagcggcagcagccccttcctggacctgaccccagagcccggggctgctgtgtacaagcatggagccctggtgaggaaggtgcacgccgaccctgactgcaggaagaccccccggggcaagaggggctggaagagcttccacggcatcctgaagggcatgatcctgtacctgcagaaggaggagtacaagccaggcaaggccctgtctgaaacagagctgaagaatgccatcagcatccaccacgccctggccacccgggccagtgactacagcaagaggccccacgtgttctacctgaggacagctgactggagggtcttcctgttccaggcccccagcctggagcagatgcagagctggatcacccgcatcaacgtggtggccgccatgttttctgccccacccttccctgctgctgtgagcagccagaagaagttcagccggcccctgctgcccagcgctgccacccggctgagccaggaggagcaggtgaggacccatgaggccaagctgaaggccatggccagcgagctgcgggagcaccgggccgcccagctgggcaagaagggccggggcaaggaggccgaggagcagaggcagaaggaggcctacctggagtttgagaagagccgctacagcacctatgctgccctgctgcgggtgaagctgaaggccggcagcgaggagctggatgctgtggaggccgccctggcccaggccggcagcacagaagatggcctgccccccagccacagcagccccagcctgcagcccaagcccagcagccagccccgggcccagaggcacagcagcgagcccaggcctggggccggcagcggccgcaggaagccctag

SEQ ID NO: 131892 - DNA, 582 bp, Artificial Sequence
  derived and/or modified sequence
atgaccctgtgcccccaggcctggctgcctgagggcagcgaggagcagctgcgctgtgccgaccaccccagctgtggggtgctgtctgctggcccctggggcggcggccaggccagccacctgcagaggagccctgtgggctgcaccctgcccagcatccccatcggccctgtgccctggagcgtgtctgagcccagaggagagtgcagccccccaggggcccctggccccccagcccggcacatggtgtggcccagcctgagcccctacccctgcccagcccccaagggcaggaagctgcagggccccctgcccccaacagcccagcccctgcaggccccctggcagctgcccctgctggagcagaaggtgcccctgagccagcccagcgctgactgctggccagatgctggcaccggctggaatgaaggaggagtcttcatcagcctgcccagccccagccacgccaccccagcccccaccggcctgcaggtgctgctgatgcgctgggacctgattgaggacaagaaggagggggagatgacccccacccccagcagccccagctttgagaaggtgtag

SEQ ID NO: 131893 - DNA, 3075 bp, Artificial Sequence
  derived and/or modified sequence
atggcccagggcgccatgcggttctgcagcgagggcgactgcgccattagtccacctcgctgcccccggagatggctcccagaaggccctgtgccccagtcgcctcctgcatctatgtacgggtctacaggaagtctattgcggagagttgccggtcccggcccacgtggacgggaactcggtcgcgttactgccccgtgtacgcccttaagaggccctccaagtcccagggtggccccaagtccttgggctccctcctctccaacgggccagccgccacctggcgcccagagctctgtggtaattttccggttcgtggagaaggctagcgttagacccctgaacggcctgccagccccaggcggcctgtcacggtcgtgggatctcggcggcgtttctccgcctagacctaccccagccctggggcccgggagcaacagaaagctgaggcttgaggccagcacttccgaccccttgccagctcgagggggctccgcactgccaggctctaggaatctcgtgcacgggccacctgccccgcctcaggtgggggcagatggactgtactcttcactcccgaatgggctggggggtccaccggagcgcctcgctacgctgtttgggggtcccgccgacactggattccttaaccaaggagacacctggagcagtccacgggaggtcagtagccacgctcagagaatcgccagagccaaatgggaatttttctacggcagcctggatcccccgagctccggtgcaaagcctcccgaacaggcccccccatcccccccaggtgtcggctccagacaagggtccggcgttgccgtggggcgcgcagcaaaatactccgagaccgacctcgacacagtgcctttaagatgctatagggagaccgacatcgatgaggtgttggccgaaagagaggaggcagactctgctattgagtctcagccctccagtgagggaccgcccggaacggcctatccgcctgccccacggcctggacctctgcctgggcctcatccaagcctcggctctggcaatgaggacgaagatgacgacgaggcaggcggggaagaagacgtggacgatgaggtgtttgaggcctctgagggggcaagaccagggtctcgcatgcccttaaagagtcccgtgccatttctgcctggcacaagcccgtcggctgatggccccgactcttttagttgtgtgttcgaagcaattctggaatctcacagggccaaagggacctcttatacgtcactggctagcctggaggctcttgccagccctggacctacccagtcccccttttttaccttcgagctgcccccacagccccccgccccgagacctgaccctcctgcgcctgctcctctcgccccacttgaaccagattcaggaaccagttccgccgcagacggaccatggactcaaaggggcgaagaggaggaggcagaagcccgtgctaagctggcccctggtcgtgaaccaccgtccccttgtcacagtgaagactcacttgggctaggggcagccccactaggctcagaacctcctctttcccagctggtgtctgacagcgattcggaattggatagtactgagaggctggcactcggcagtaccgatacattaagcaacggtcaaaaagccgacctggaagcagcccagcgactggccaagcgactctatcggctcgacggatttaggaaagccgatgtggccagacacctgggtaagaacaatgacttttcaaagctcgtcgctggcgagtacctgaaattctttgtgtttacaggcatgaccctggatcaggcactgcgcgtatttttgaaggagctcgccctgatgggtgaaacccaggaaagagaacgcgttctcgctcactttagccagaggtacttccagtgtaatccagaggcgttgagcagcgaggacggcgctcacacactgacatgcgccctgatgctgctgaacaccgaccttcacgggcataacatcggaaaacggatgacatgtggagactttattgggaatctagagggcctcaatgatggcggggacttccctagagaactcctgaaggctttatactcatctatcaagaatgagaagctacagtgggcaatcgacgaagaggagctgaggagatcattgtccgaactcgccgatcctaatccgaaagtcatcaaacgaattagtgggggaagtggctccggcagctctccctttctcgatctcaccccagagcccggcgctgccgtgtacaagcacggcgccctggtcagaaaggtacacgctgaccccgattgtcgcaaaacacctcgcgggaaacggggctggaagagctttcacggcattctcaagggcatgatcctgtatcttcagaaagaggagtataaacccggcaaagcactctctgagaccgagctcaagaacgccatatctatccaccatgctctggccacccgggcctccgattactcgaagcgccctcacgttttttacctgcggaccgccgattggagggtgttcctcttccaagcaccgagcctagagcagatgcagtcctggatcacacgaatcaatgtggttgctgccatgttctctgcaccacctttccccgctgctgtatcctcccagaagaagtttagcaggcctttgctgcccagtgccgctacgcgcttgtcccaagaggagcaggttcgcactcacgaagctaagctgaaggctatggcaagtgaactgagagaacacagagcagctcagctgggaaagaagggaagaggtaaagaggcggaggagcagaggcaaaaggaagcatacctggagtttgagaagtccagatactctacctatgccgctttgctccgcgttaagctgaaagccggatcagaggagctggatgcggtagaagcggccttagcccaggccgggtctacagaggacggtctgcctcctagccatagcagcccttcactgcagcccaaaccatcttctcagcctagggcacagcggcattcctcagagccccggccaggcgcgggatccggccggcgcaagccttag

SEQ ID NO: 131894 - DNA, 3075 bp, Artificial Sequence
  derived and/or modified sequence
atggcccagggcgccatgcggttctgcagcgagggcgactgcgccatttctccacctagatgtccacggagatggctgcccgaggggccggtgccccagtctccaccggcttccatgtacggatcaaccgggtctctgctgcggcgtgtcgcaggacctggtccaagaggccgggagttggggagggtaaccgccccatgcacaccccttcgcgggcctccatctcccagagttgcaccatcaccttgggctccatcctcccctaccggacagccacctcccggggcccagagtagtgtcgtgatatttagattcgtggagaaagcctctgtacgcccgctgaatggcttgcctgcgcccgggggactaagcaggagctgggacctcggtggggtatccccgcctcggcctacacccgcgctaggtcctggctccaaccgaaaactcagactcgaagccagcacgagcgacccgctccccgcaagaggcggcagcgcgctcccaggctctaggaacttggtacatggtccgccggcccctccacaagtgggtgctgatggcctatactcctccctacctaatgggcttgggggcccacctgagcgtctggcaacactcttcggcggcccagctgatacgggctttctaaaccagggtgatacttggtcatcgcctagagaagtaagctctcatgcacagcgtatcgcaagagccaaatgggagttcttctacggaagtctggaccccccctcatctggggcaaagcctccagagcaggctccgccaagccctcctggtgtgggatcgagacaaggcagcggggtggcagtggggcgggccgccaagtacagcgagaccgacctggacaccgtcccattgagatgctaccgcgaaactgacattgacgaggtgttggccgagagagaagaagctgacagtgctatcgagagtcagccttcaagtgaaggcccgccagggacggcttaccccccagcccccaggcctggcccactgcccggtcctcatccatctttgggctccggcaacgaggatgaggatgatgatgaagcagggggggaagaagacgtcgacgacgaagtatttgaggcgagtgaaggcgcccggcccggctcgcgcatgcctttgaaatccccagttcccttcttgccaggtacatctccctcagcggacgggccagatagcttttcatgtgtatttgaagccatcttggagagccaccgtgctaaaggcaccagctatacaagcttggcaagcctggaagctctggctagtccaggaccaactcagagtcccttcttcactttcgaactgcctccacagcctcccgccccgcggcctgaccccccggcaccagccccgctggctccattggagcccgacagcggcacgtccagcgctgcagatggaccttggacccagcggggtgaagaagaggaggcggaggccagagctaagctggccccaggaagggaacccccttccccgtgccactccgaagatagcttaggcctgggcgcagctcccttgggctccgagcctccgttgtcccagctcgtgtccgattccgatagcgagctggacagtactgagcggctggccctgggctccacagacactctgagtaatggtcagaaggccgacttagaggccgcccaacgcctggctaagcggctttatagacttgatgggttccgcaaggcggatgtggccaggcacctgggtaagaacaacgacttctccaaacttgtggctggggaatatctcaaattcttcgtatttaccggtatgactctggaccaggcgcttcgtgtgtttttgaaggagctggccctcatgggagagacccaggagagagagagagtgttagcacacttcagccaaaggtattttcagtgtaacccagaagctctaagctccgaggacggcgcgcacacgctgacgtgcgccttgatgctgctgaacaccgacctgcacgggcataatatcggtaagcggatgacttgcggagacttcattggtaacctggaagggctcaatgacggtggagactttcccagggaacttctcaaagccctttatagttcgataaaaaatgaaaaattacagtgggccatcgatgaagaggaactgcgccgaagtctgtctgagctagcagatcctaatcctaaggtgatcaaacgtatctctggtggctccgggtccgggagctcgccgtttctggacttgacacccgaacctggagctgctgtatataagcacggagcgctcgtgagaaaagttcatgccgaccctgactgtcggaagacacctagaggcaagcgaggctggaaatcctttcacggcattctgaaggggatgatactgtatctgcagaaggaagagtataagccggggaaagccctttctgaaactgaactcaaaaacgctatcagcattcaccatgccctggccaccagagcctccgactactccaagcgcccccacgtgttctacctccgaacagcagactggcgagtgtttttattccaggccccctcccttgagcagatgcaaagttggattactaggattaacgtcgtagcggccatgttttccgcccccccttttcccgctgccgtctccagccagaagaaatttagtcgaccactcctgcctagcgctgcaactcgactgtcacaggaagaacaggttcgcacccacgaggctaaactcaaagctatggcgagcgaattacgggagcatagagctgcacagctggggaaaaaaggtcgaggtaaggaggctgaggagcagcgacagaaagaggcttacctggaatttgaaaagagcaggtacagtacatatgcggcgctgttgcgcgttaaattaaaagccgggagcgaggaactcgacgcagtagaagctgctctggctcaggctggctctacagaggacggcctgccaccttcgcactccagcccctctttgcagcccaaaccgtcttcccagccccgtgcccagaggcactctagcgagcctcgacccggtgctggctccggccggcggaagccatag

SEQ ID NO: 131895 - DNA, 2784 bp, Artificial Sequence
  derived and/or modified sequence
cagatctggcggtgccccctgcagcaccacgccgagagcgcccccccactacctgcactcagctgggcacagcccctgctctgtctttcatccgtttccgcattaggagagcagaggcctactcccgctctagggcccgggagtaacaggaaactgcggctggaagcctccaccagcgaccccctgccggctagaggagggtcggctctgcccggatcccgcaacctggttcatggcccaccagctccaccccaggttggcgctgacggcctgtattcatccctgcccaatggtctggggggcccccctgaaaggctggcaacacttttcgggggccccgccgatacgggcttcctgaatcagggtgacacttggtccagtccgcgggaagtgagttcgcacgcccagagaatcgcccgggcaaagtgggagttcttctatggaagccttgatccaccatccagcggagccaaaccaccagagcaagccccccccagccctcctggtgtgggctcacggcagggctcaggggtggccgtgggaagggccgccaagtacagtgagacggatttggatacagtcccactgcgctgttacagggagactgatatcgacgaggtgctggccgagagggaagaagcagatagcgcgattgagtctcaaccttccagcgaaggtccgccaggaaccgcgtatcctcctgcaccaaggcctggaccactaccaggcccacatccgtcgctcgggtctggcaacgaggacgaggacgatgacgaggcgggcggtgaggaggatgtggatgatgaggtgttcgaggcgtccgagggtgctcggcccggctcaagaatgccactgaagagccccgttcctttcttaccaggcactagcccatccgccgatgggccagattccttttcctgtgtttttgaagccatacttgaaagtcatagggccaagggcacaagttacaccagtttagcaagcctggaggctctcgcctctcccggccccacccagtctcctttcttcacattcgaactgcccccccagcctccagctccacgaccggatccccctgcccctgctcccctcgcgccactcgagcctgactccggcacatcatcggccgccgatggcccttggacgcagaggggagaggaggaggaggcggaggcacgggctaagttagccccaggaagggagcctccctcaccttgccacagcgaagatagcctggggctcggtgctgccccactgggtagcgaacctccgctgtctcagttggtgtccgattcagactccgaattggatagcactgaacgcctcgctttgggatcgacagataccctcagtaatggccagaaggctgacctcgaagccgcacagcgcctggccaagcggctctacaggctggacggtttccgcaaagcagatgttgcgcgtcacctgggaaagaacaacgattttagcaagcttgtcgccggtgagtatctgaagtttttcgtgttcaccggaatgaccttagaccaggcactgagagtgtttctgaaggagctcgccctaatgggagaaactcaggagagagaacgcgtgctggcccacttttcccagcgctacttccaatgcaatcctgaagccttgagcagtgaggacggcgcccataccttgacatgcgctctgatgctcttgaatacggacttgcacggccacaacattggcaagcgcatgacctgcggtgattttatcggcaaccttgaggggctaaacgacggcggagattttcctcgagagctgctcaaggccctctactcttcaatcaaaaacgagaagttgcaatgggccattgacgaagaagagctgagacggtctcttagtgaacttgcggaccctaatccaaaagtgattaagagaatttccggcgggagcggttccggcagtagcccctttctcgatttgacaccagagcccggggcagcggtgtataaacatggcgctctggtccggaaggtgcacgcagaccccgattgtcgaaagacccctagggggaagcgggggtggaaatccttccatggaatcctcaagggaatgatactgtatctgcagaaggaagagtacaagcccggaaaggcgctgtctgagaccgaactgaaaaacgctatatccatccatcacgctcttgctacccgtgcctcagactactccaaacgccctcatgtgttctatttgaggacagcagattggcgtgtgtttctgttccaggccccttcgctggagcagatgcagtcttggattactcgtataaatgtcgtagccgccatgttctctgcacctccgttcccagctgctgtctctagccagaagaaattttcccgtccgttgctacccagtgcggcaacccgtctgtcacaggaagagcaggtgaggacgcatgaggcgaaactgaaagcaatggcgagtgagttgcgcgagcatagggctgcccagcttggcaagaagggcagggggaaggaggctgaagaacaaagacagaaggaggcgtacctagaattcgagaagagccgttatagtacctacgccgctctgctacgcgtcaagctgaaggccggctcagaggaactggatgctgtggaggcagctctggcacaagctggaagtacagaggacggcctcccaccgagccattcctcaccgtctctgcagccaaaaccatcctctcagcctcgcgcacagagacacagctctgaacccagacccggagcgggtagtggtcggaggaaaccctag

SEQ ID NO: 131896 - DNA, 582 bp, Artificial Sequence
  derived and/or modified sequence
atgaccctgtgcccccaggcctggctgcccgagggcagcgaggagcagctacgctgtgcagaccatccttcgtgtggcgtgctgtctgctgggccctgggggggcggccaggcaagccacttgcaacggtcccccgtgggatgtactcttccttctatcccaattgggccggtgccgtggtctgttagcgagccccgaggggagtgttcacctcctggagcccccggcccccccgccagacacatggtctggccttccctttccccctacccttgtcccgctccaaagggcagaaaattacagggcccactgcccccaactgcacagccactgcaggccccttggcagctcccactccttgaacagaaagttcccctgtcccaaccaagcgccgattgttggccggatgccggaactggctggaatgaaggcggggtgtttatatcccttcccagcccaagtcacgcaaccccagctcctaccggcctccaggtcctccttatgagatgggacctaatcgaggacaaaaaggagggggaaatgacacccaccccgagctcacccagcttcgaaaaagtgtag

SEQ ID NO: 131897 - DNA, 4183 bp, Artificial Sequence
  derived and/or modified sequence
atgtaacaggtcatgtggcagcctcctagggacacgcgtggggtctggagcgggacacgcgtgtgcagccgggccttacgtgtggctcaaggggcggtgggcgagagagacgtggacacaagtggggtggggcacgtgagggtctggggaatagaaccaggggttccatgcgccctcctccttgtctggggcgggtcttaggttggcgggagagcccagcggggacctagcgacaaggggggctggcagcctccggggctctgggccctgggagagggcggggggtgggggggattagcgttgcctgagcggcgcgtagggggtagggggagggactgagaggcgggcgggcctggagcaaacgggagccgcgctgccttcacagctcagctgggcccagcctctcctctgtctctcctcggtctcagctctgggcgagcagcggcctgtctgaagagcatgcagcccccttactccccgcctggcctcgccatccctgcccccccagcctgacccccggccccagcatggcccagggtgccatgcgcttctgctcggaaggcgactgtgccatctccccaccacgatgcccacgccgctggctccccgaaggcccggtgccccagagccccccagccagcatgtatggcagcacaggctccttgctacggcgagtggcaggtccaggtcctcgaggccgggaactgggacgtgtgacagcaccctgtacacctctgcgtggccccccctcaccccgtgttgctccctcaccctgggcaccctcttcacccactgggcagcccccacccggggcccagagctctgtggtcatcttccgctttgtggagaaggccagtgtgaggccactgaatgggctacctgctccagggggcttgagtcggagctgggatctgggtggggtttctcctcccaggcccaccccagcccttgggcctggctccaaccggaagttacggctggaagcatccacatcagacccactccccgccagaggaggctcggccctacctggcagccggaaccttgtacatgggccgccagccccaccccaggttggagcagatggcctttactcctctctccccaatgggctggggggcccccctgagcgcctggccacactcttcggaggacctgctgacactggattcctgaaccagggggatacctggtcctccccccgggaagtctcctctcatgcccagagaatcgctagagccaaatgggaattcttctatggctccttggacccccccagctcaggtgctaagcccccagagcaggcccccccatctccacctggggtgggctcaaggcagggctctggggtggctgtggggcgagcagccaagtactccgagacagacctggacacggtgcccctgaggtgctaccgcgagactgacatcgatgaggtgctggctgagcgggaggaggccgactcggccatcgaaagtcagcccagctctgagggcccaccaggcactgcctacccacctgccccacggcccggcccactccctggccctcatcccagcctcggcagtggcaatgaggatgaggacgacgatgaggcaggtggggaagaagatgtggacgacgaggtgtttgaggcctctgaaggggcccggccagggagccggatgcctctcaagtcacctgtgccctttctacctgggacgagcccctcggctgatgggcctgactctttcagttgtgtgttcgaagccatcctggagtcacaccgggccaaaggcacctcctataccagcctcgcctcgctggaggccttggcctcacctggcccaacccagagccccttcttcacctttgagctgcctccccaaccccctgcaccccggcccgacccaccagctcccgccccacttgcccctcttgaaccggattctggtaccagctctgctgctgatggtccttggacacagagaggggaggaggaggaggcagaggccagagccaagctggccccagggagggagccccctagtccctgccactcagaggacagccttgggctgggggcagcaccccttggcagcgaaccacccctgagccagctggtgtccgactcagactcagagctggacagcacagagcggctggccctgggaagcacagacaccttgtccaatgggcagaaagcggacctggaggctgcgcagcgcctggccaagaggctgtaccgactagatggcttcaggaaggccgatgtggcccggcacctgggcaagaacaatgacttcagcaaactggtggctggggagtacctcaagttctttgtcttcacgggcatgactctggaccaagctctcagggtgtttctgaaggagctggccttaatgggtgagacccaggaacgagagcgcgtgctggcccacttctcccagcgatacttccagtgcaatcctgaagccctgtcctcagaggacggcgcccacacgctgacctgtgcgctcatgctgctcaacacggatctccacggccataacatcgggaagcgcatgacctgcggggacttcatcgggaacctggagggcctcaatgatggcggcgacttccctagggagctgctcaaggccttgtacagctccatcaagaatgagaagctgcagtgggccatagacgaggaggagctgagacgctctctgtctgagttggccgaccccaaccccaaggtcatcaagcggatcagcgggggcagtggcagtggctccagccctttcctggacctgactcccgagcctggggctgccgtctacaagcacggggccctggtgcgaaaggtgcacgcagaccctgactgcaggaagacacctcggggcaagcggggctggaagagcttccacgggatcctcaagggcatgatcctctacctgcagaaggaggagtacaagcctgggaaggccctttcagagacggagctcaagaatgccatcagcatccaccatgccctggccactcgtgccagtgactacagcaagaggccccacgtcttctacctgcgcacagctgactggcgggtcttcctcttccaggccccgagcctggagcagatgcagtcctggatcactcgcatcaatgtagtagccgctatgttctctgcgccccccttcccagctgctgttagctcccaaaagaagttcagccgccctctcctgcccagcgctgccacccgcctctcccaggaggagcaggtgcggacccacgaggccaagctgaaggccatggcaagtgagctgcgggagcaccgggccgcccagctgggcaagaagggccggggcaaggaggctgaagagcagcggcagaaggaggcctacctggagtttgagaaatcccgctacagcacctatgcagcgctgcttcgggtcaagctgaaggcaggcagtgaggagctggatgcagtggaggcagcactggcccaggccgggagcacagaggatggactccctccttctcactccagtccctccctgcagcccaaaccctccagccagccccgggctcagcgtcacagctcagagcctcggccaggggcaggcagtgggcggcggaagccctgagatgaggtttagggtggggagtgcctgctgggcacctgaaggatgacatggccctgcctgagcccgggccggcctcgggccacccacgagggcctcccggcctagggcccgaccgcgccggacgcggtgtccggggcagggcagggctggggcctgggcctcaggagcctaggctaggggcacctccgagagcccctttttgtgataatgttttgcactttttcgtacagggtgggcgggggcgggaggggctagcgcccctgaacttttgatgctttttttttgtgtgggagaggcctgatgccgtttctgctttctgctgagaccacccccaccctgacaccatcagtccccctctgtcctggggcctggcttggacagagaccaggatttggggctgagctggtttcccctccttcctccccaagggcttactctttctcttgctggaggtggaggaagggcgtccatgccaaggccccatacctgggccgggggcagcacggcctggctttcccccgcttcagtgggccttgccctttgtacagcctccacccccattaaaactgctctggacttgc

SEQ ID NO: 131898 - DNA, 3859 bp, Artificial Sequence
  derived and/or modified sequence
cgcaaggcagcgagaagggagaagctagcagcggggagagacaagaaaggggtcaagttagctcagctgggcccagcctctcctctgtctctcctcggtctcagctctgggcgagcagcggcctgtctgaagagcatgcagcccccttactccccgcctggcctcgccatccctgcccccccagcctgacccccggccccagcatggcccagggtgccatgcgcttctgctcggaaggcgactgtgccatctccccaccacgatgcccacgccgctggctccccgaaggcccggtgccccagagccccccagccagcatgtatggcagcacaggctccttgctacggcgagtggcaggtccaggtcctcgaggccgggaactgggacgtgtgacagcaccctgtacacctctgcgtggccccccctcaccccgtgttgctccctcaccctgggcaccctcttcacccactgggcagcccccacccggggcccagagctctgtggtcatcttccgctttgtggagaaggccagtgtgaggccactgaatgggctacctgctccagggggcttgagtcggagctgggatctgggtggggtttctcctcccaggcccaccccagcccttgggcctggctccaaccggaagttacggctggaagcatccacatcagacccactccccgccagaggaggctcggccctacctggcagccggaaccttgtacatgggccgccagccccaccccaggttggagcagatggcctttactcctctctccccaatgggctggggggcccccctgagcgcctggccacactcttcggaggacctgctgacactggattcctgaaccagggggatacctggtcctccccccgggaagtctcctctcatgcccagagaatcgctagagccaaatgggaattcttctatggctccttggacccccccagctcaggtgctaagcccccagagcaggcccccccatctccacctggggtgggctcaaggcagggctctggggtggctgtggggcgagcagccaagtactccgagacagacctggacacggtgcccctgaggtgctaccgcgagactgacatcgatgaggtgctggctgagcgggaggaggccgactcggccatcgaaagtcagcccagctctgagggcccaccaggcactgcctacccacctgccccacggcccggcccactccctggccctcatcccagcctcggcagtggcaatgaggatgaggacgacgatgaggcaggtggggaagaagatgtggacgacgaggtgtttgaggcctctgaaggggcccggccagggagccggatgcctctcaagtcacctgtgccctttctacctgggacgagcccctcggctgatgggcctgactctttcagttgtgtgttcgaagccatcctggagtcacaccgggccaaaggcacctcctataccagcctcgcctcgctggaggccttggcctcacctggcccaacccagagccccttcttcacctttgagctgcctccccaaccccctgcaccccggcccgacccaccagctcccgccccacttgcccctcttgaaccggattctggtaccagctctgctgctgatggtccttggacacagagaggggaggaggaggaggcagaggccagagccaagctggccccagggagggagccccctagtccctgccactcagaggacagccttgggctgggggcagcaccccttggcagcgaaccacccctgagccagctggtgtccgactcagactcagagctggacagcacagagcggctggccctgggaagcacagacaccttgtccaatgggcagaaagcggacctggaggctgcgcagcgcctggccaagaggctgtaccgactagatggcttcaggaaggccgatgtggcccggcacctgggcaagaacaatgacttcagcaaactggtggctggggagtacctcaagttctttgtcttcacgggcatgactctggaccaagctctcagggtgtttctgaaggagctggccttaatgggtgagacccaggaacgagagcgcgtgctggcccacttctcccagcgatacttccagtgcaatcctgaagccctgtcctcagaggacggcgcccacacgctgacctgtgcgctcatgctgctcaacacggatctccacggccataacatcgggaagcgcatgacctgcggggacttcatcgggaacctggagggcctcaatgatggcggcgacttccctagggagctgctcaaggccttgtacagctccatcaagaatgagaagctgcagtgggccatagacgaggaggagctgagacgctctctgtctgagttggccgaccccaaccccaaggtcatcaagcggatcagcgggggcagtggcagtggctccagccctttcctggacctgactcccgagcctggggctgccgtctacaagcacggggccctggtgcgaaaggtgcacgcagaccctgactgcaggaagacacctcggggcaagcggggctggaagagcttccacgggatcctcaagggcatgatcctctacctgcagaaggaggagtacaagcctgggaaggccctttcagagacggagctcaagaatgccatcagcatccaccatgccctggccactcgtgccagtgactacagcaagaggccccacgtcttctacctgcgcacagctgactggcgggtcttcctcttccaggccccgagcctggagcagatgcagtcctggatcactcgcatcaatgtagtagccgctatgttctctgcgccccccttcccagctgctgttagctcccaaaagaagttcagccgccctctcctgcccagcgctgccacccgcctctcccaggaggagcaggtgcggacccacgaggccaagctgaaggccatggcaagtgagctgcgggagcaccgggccgcccagctgggcaagaagggccggggcaaggaggctgaagagcagcggcagaaggaggcctacctggagtttgagaaatcccgctacagcacctatgcagcgctgcttcgggtcaagctgaaggcaggcagtgaggagctggatgcagtggaggcagcactggcccaggccgggagcacagaggatggactccctccttctcactccagtccctccctgcagcccaaaccctccagccagccccgggctcagcgtcacagctcagagcctcggccaggggcaggcagtgggcggcggaagccctgagatgaggtttagggtggggagtgcctgctgggcacctgaaggatgacatggccctgcctgagcccgggccggcctcgggccacccacgagggcctcccggcctagggcccgaccgcgccggacgcggtgtccggggcagggcagggctggggcctgggcctcaggagcctaggctaggggcacctccgagagcccctttttgtgataatgttttgcactttttcgtacagggtgggcgggggcgggaggggctagcgcccctgaacttttgatgctttttttttgtgtgggagaggcctgatgccgtttctgctttctgctgagaccacccccaccctgacaccatcagtccccctctgtcctggggcctggcttggacagagaccaggatttggggctgagctggtttcccctccttcctccccaagggcttactctttctcttgctggaggtggaggaagggcgtccatgccaaggccccatacctgggccgggggcagcacggcctggctttcccccgcttcagtgggccttgccctttgtacagcctccacccccattaaaactgctctggacttgc

SEQ ID NO: 131899 - DNA, 3365 bp, Artificial Sequence
  derived and/or modified sequence
caaatctggcgctgtccccttcagcaccacgcggagtccgcgccgcccctccccgcgctcagctgggcccagcctctcctctgtctctcctcggtctcagctctgggcgagcagcggcccaccccagcccttgggcctggctccaaccggaagttacggctggaagcatccacatcagacccactccccgccagaggaggctcggccctacctggcagccggaaccttgtacatgggccgccagccccaccccaggttggagcagatggcctttactcctctctccccaatgggctggggggcccccctgagcgcctggccacactcttcggaggacctgctgacactggattcctgaaccagggggatacctggtcctccccccgggaagtctcctctcatgcccagagaatcgctagagccaaatgggaattcttctatggctccttggacccccccagctcaggtgctaagcccccagagcaggcccccccatctccacctggggtgggctcaaggcagggctctggggtggctgtggggcgagcagccaagtactccgagacagacctggacacggtgcccctgaggtgctaccgcgagactgacatcgatgaggtgctggctgagcgggaggaggccgactcggccatcgaaagtcagcccagctctgagggcccaccaggcactgcctacccacctgccccacggcccggcccactccctggccctcatcccagcctcggcagtggcaatgaggatgaggacgacgatgaggcaggtggggaagaagatgtggacgacgaggtgtttgaggcctctgaaggggcccggccagggagccggatgcctctcaagtcacctgtgccctttctacctgggacgagcccctcggctgatgggcctgactctttcagttgtgtgttcgaagccatcctggagtcacaccgggccaaaggcacctcctataccagcctcgcctcgctggaggccttggcctcacctggcccaacccagagccccttcttcacctttgagctgcctccccaaccccctgcaccccggcccgacccaccagctcccgccccacttgcccctcttgaaccggattctggtaccagctctgctgctgatggtccttggacacagagaggggaggaggaggaggcagaggccagagccaagctggccccagggagggagccccctagtccctgccactcagaggacagccttgggctgggggcagcaccccttggcagcgaaccacccctgagccagctggtgtccgactcagactcagagctggacagcacagagcggctggccctgggaagcacagacaccttgtccaatgggcagaaagcggacctggaggctgcgcagcgcctggccaagaggctgtaccgactagatggcttcaggaaggccgatgtggcccggcacctgggcaagaacaatgacttcagcaaactggtggctggggagtacctcaagttctttgtcttcacgggcatgactctggaccaagctctcagggtgtttctgaaggagctggccttaatgggtgagacccaggaacgagagcgcgtgctggcccacttctcccagcgatacttccagtgcaatcctgaagccctgtcctcagaggacggcgcccacacgctgacctgtgcgctcatgctgctcaacacggatctccacggccataacatcgggaagcgcatgacctgcggggacttcatcgggaacctggagggcctcaatgatggcggcgacttccctagggagctgctcaaggccttgtacagctccatcaagaatgagaagctgcagtgggccatagacgaggaggagctgagacgctctctgtctgagttggccgaccccaaccccaaggtcatcaagcggatcagcgggggcagtggcagtggctccagccctttcctggacctgactcccgagcctggggctgccgtctacaagcacggggccctggtgcgaaaggtgcacgcagaccctgactgcaggaagacacctcggggcaagcggggctggaagagcttccacgggatcctcaagggcatgatcctctacctgcagaaggaggagtacaagcctgggaaggccctttcagagacggagctcaagaatgccatcagcatccaccatgccctggccactcgtgccagtgactacagcaagaggccccacgtcttctacctgcgcacagctgactggcgggtcttcctcttccaggccccgagcctggagcagatgcagtcctggatcactcgcatcaatgtagtagccgctatgttctctgcgccccccttcccagctgctgttagctcccaaaagaagttcagccgccctctcctgcccagcgctgccacccgcctctcccaggaggagcaggtgcggacccacgaggccaagctgaaggccatggcaagtgagctgcgggagcaccgggccgcccagctgggcaagaagggccggggcaaggaggctgaagagcagcggcagaaggaggcctacctggagtttgagaaatcccgctacagcacctatgcagcgctgcttcgggtcaagctgaaggcaggcagtgaggagctggatgcagtggaggcagcactggcccaggccgggagcacagaggatggactccctccttctcactccagtccctccctgcagcccaaaccctccagccagccccgggctcagcgtcacagctcagagcctcggccaggggcaggcagtgggcggcggaagccctgagatgaggtttagggtggggagtgcctgctgggcacctgaaggatgacatggccctgcctgagcccgggccggcctcgggccacccacgagggcctcccggcctagggcccgaccgcgccggacgcggtgtccggggcagggcagggctggggcctgggcctcaggagcctaggctaggggcacctccgagagcccctttttgtgataatgttttgcactttttcgtacagggtgggcgggggcgggaggggctagcgcccctgaacttttgatgctttttttttgtgtgggagaggcctgatgccgtttctgctttctgctgagaccacccccaccctgacaccatcagtccccctctgtcctggggcctggcttggacagagaccaggatttggggctgagctggtttcccctccttcctccccaagggcttactctttctcttgctggaggtggaggaagggcgtccatgccaaggccccatacctgggccgggggcagcacggcctggctttcccccgcttcagtgggccttgccctttgtacagcctccacccccattaaaactgctctggacttgc

SEQ ID NO: 131900 - DNA, 3075 bp, Artificial Sequence
  derived and/or modified sequence
atggcgcaaggggcaatgcggttctgctcggagggtgactgcgccatcagcccccctcggtgtccaaggagatggctgcctgagggccctgtgccccaaagtccccctgcttccatgtatggctcgaccggcagtctcttaagacgcgtggctggccctggcccacggggacgcgagctcggtagggtgaccgcaccgtgcactcctctgcgcggtccacctagtccaagggtggctcctagcccttgggctccaagctcccccacggggcagccccctcccggtgcccaaagcagcgtagttatttttagatttgtggagaaagcctctgttaggcccttgaatggccttccagcacccggaggactgtccagatcctgggatctcggcggagtgtctccccctaggccgacccccgcactcggacccggtagcaatcggaaacttcgactcgaagcaagcacgagtgacccactgccagctaggggcggaagcgccttgcccggttcccggaatctcgttcacgggccacccgcaccacctcaggttggcgcagacggcctgtactcatccctgcccaacggcctgggcggtcctccagaaaggctggctacattgttcgggggtcccgctgatacaggcttcctgaatcagggcgacacctggtcatcaccccgtgaagtgtcctcccatgcccagaggatcgcaagggcgaagtgggagtttttttatggtagcctggatcctcctagttctggcgctaagccccctgagcaagcgccaccgagcccaccaggagtggggagtcggcagggctccggggtcgcggtggggagggccgctaaatattctgaaacagacctggatacagtgcctttaaggtgttatcgcgagactgatatcgacgaagtgctcgccgagcgcgaagaagccgactctgcaattgagtcacaacctagcagcgagggtcctcctggaaccgcctaccccccagcaccccgaccagggcctctcccaggaccacatcccagcttagggtccggcaacgaggacgaggacgatgacgaggcgggaggcgaagaagacgtcgatgatgaagtttttgaggcctctgaaggcgcacgaccaggatcccgcatgcctctgaagtcccctgttcctttcctccctgggacaagcccttcagccgacgggccagattctttcagctgtgtctttgaggccatattggaatcccatagggcaaagggcacctcttatacttcgctagcaagcctggaggccctcgcctcccctggcccaactcaatctccctttttcacgttcgaactccctcctcagccccctgctccacggccagacccaccagccccagcgccactggcgcctttggaacccgactcaggcacgtcctcagctgccgatgggccatggactcagcgcggagaagaggaagaggctgaagcacgcgcaaagctcgccccaggtagagaacctccttcaccttgtcacagcgaagactcgctgggcctgggcgctgccccattaggatctgagccacccctgagccaattagtgtcggacagcgactctgaactagactcaaccgagcggttggccttaggatccacagacacgctgagcaacggccaaaaagcagacctggaggctgctcagaggttggccaaacggctctatcggttggacgggttccgaaaggccgacgttgccagacatctggggaagaacaacgattttagtaaactggtagccggtgaatacttgaaattttttgtctttactggtatgacccttgatcaggccctccgagtgttcctgaaggagctggctttgatgggagagactcaagagagggagcgggtcttagctcacttttctcagcggtacttccagtgcaatcctgaggccctgagttcagaggatggcgcacataccttgacatgtgctctgatgttgctgaatactgacttacatggccacaacattggcaagaggatgacttgtggtgacttcatcggaaacctcgagggcttaaacgacggtggagattttcccagggaactgctgaaggctctgtactcgtccatcaaaaacgagaaattgcagtgggcgatcgacgaggaagagctcaggagatccttatccgagttagctgaccccaacccgaaggtgattaaaagaataagcgggggaagcggctcgggatcctccccattcctcgatctgacaccggagccgggtgctgcggtgtacaagcatggggcactggtgcgaaaagtacatgccgatcctgactgccgtaaaactccacgtggaaagcggggatggaagtctttccatggcatcctcaagggcatgattctgtatctgcaaaaggaagagtacaaacccggtaaagccctgtccgagacagagctcaaaaatgcaatatctatccaccacgcgctcgccacaagggcaagcgactattccaagaggcctcatgtgttctacctccgcacagccgactggcgcgtgttcctattccaggctccatctctcgagcagatgcagtcgtggataactcggattaatgttgtggctgctatgttttctgcccctccattcccggctgcggtgagctctcagaagaaattttcacgccctttactgccttctgcagccacaagacttagtcaggaagaacaggtcaggactcacgaagccaaactgaaggctatggcgtcagaattacgcgagcatcgtgctgcccaacttggtaaaaaaggccgaggaaaagaagctgaggaacaaagacagaaagaggcttacctagaatttgagaaatccagatattcaacgtatgcggcattgctacgcgtcaaactaaaagccggtagcgaagaacttgatgctgttgaggctgcactcgcccaagcagggtcgaccgaggacgggctgcctccctcacactccagcccaagtctgcagcctaaaccgtcatcacagcctagagcgcagcggcacagcagtgagccacggccaggagcaggctctgggagacggaagccttag

SEQ ID NO: 131901 - DNA, 3075 bp, Artificial Sequence
  derived and/or modified sequence
atggcccagggggcaatgagattttgctccgagggcgattgcgcaatctccccacctcgctgccctagacgatggctgcccgagggacccgtacctcagtctcctcccgcaagcatgtacggcagtacggggtcactgctgagaagggtggccggacccggaccacggggaagggagcttggcagagtgacggctccgtgtacacctctaagggggcctcccagtcctagggtggcaccctcaccatgggcaccaagttctcctactggacagccacccccaggggcacaatctagtgttgttattttccggtttgttgagaaagccagtgtgagaccgctcaacggcttgcccgctccaggtggactatccaggagttgggacctcggaggggtttcacctccccgacctaccccggcactgggcccaggctcaaacaggaaactccggctggaggcctctacatcagaccctctaccagcaaggggtgggagtgcactgcctggaagccggaatctggtgcacggccctcccgcacctcctcaagtgggggctgacggactgtattctagcttgcccaatggactgggtggccctcccgagagactggctaccctgttcggagggcctgcagacacaggattcctcaaccagggagacacgtggagttcccctcgagaggtttcatcccacgctcagagaattgctagggcgaagtgggagttcttctacggcagcctcgatcctccatcatctggcgcaaaaccccctgagcaggctcccccttcacctccaggagtgggctccagacaggggagcggcgttgctgtgggcagagcagcgaagtactccgaaactgatctggacactgtccctctgcggtgttatcgagagactgacatcgacgaggtcctcgcagagcgcgaggaggccgactcagcgattgaatcccagccgtccagtgagggtccacctggcactgcatacccccctgctcccaggccgggtcctctgccaggccctcacccaagcctgggctctggcaatgaggacgaagacgacgatgaagctggcggtgaggaagacgtggacgacgaggtgtttgaagcaagcgaaggagcaagacccggtagccggatgccactaaaatctccagtgcccttcctgccaggaacatcgcctagcgccgacggcccagattctttttcatgtgtgttcgaggctatcctggagagccatcgggctaagggaaccagctataccagccttgctagcttggaggcgctcgcctcaccagggccaacccaaagccccttcttcacatttgagctccccccacagccacccgctcccagaccagatccacctgcacccgcacctttagctccactggagccagacagcggcacttcttccgccgctgacggaccctggacacagagaggtgaagaggaggaagctgaggcacgcgctaaactggcgccagggagagaaccccctagcccatgccactcagaggatagcctgggtcttggagcagctcctctgggtagtgaaccgcctctttctcagctcgtgagcgatagcgactctgaactggattccactgaacgtctggccctgggtagcaccgatactctgagcaatggacaaaaggccgacctcgaggctgctcagagactagccaagcggctctatagactcgacgggttcagaaaagccgacgttgcacgtcatctgggtaaaaacaatgacttctcaaaactggtggccggagagtacctcaagtttttcgtttttaccggcatgactctagatcaggctctcagggtcttcctcaaggagcttgcccttatgggcgagacgcaggagagagaacgagtgttggcccatttttcacaacgatactttcagtgcaaccctgaggcattgagttccgaggatggggctcataccctgacctgcgcccttatgctgctcaacactgaccttcacgggcacaatatcggaaaaaggatgacatgtggagactttattgggaacctggagggtctcaatgatgggggagattttcctagagaactcctaaaggccctgtactcgtcaattaagaacgaaaagttacagtgggccatagacgaagaggaactgcggcgaagtctttccgaacttgcggacccgaatccaaaagtaattaagaggatttcaggcggatccggttcagggtcatcacccttccttgatctaacgccagaacctggagccgctgtctacaagcatggtgcactggttcgaaaagtgcatgccgatccagattgcaggaaaacaccgagggggaagcggggatggaaaagctttcatgggatactgaaaggtatgatcctatatctccaaaaggaggaatataaacccggaaaggccctgtccgaaaccgagcttaagaatgccatcagcattcaccacgctttagcgactagggccagtgattattcaaagcggcctcatgtgttctatctcaggaccgcagattggagggtcttcttgttccaggcaccgagccttgaacaaatgcaatcttggatcacacgcatcaacgtggtcgctgctatgttctctgcacctccattcccggcagccgtgtctagccaaaaaaagttttcaagaccattgctgccgagtgccgcaacgagactctctcaggaggaacaggtccggactcatgaagctaagcttaaagctatggcttcagaactccgagagcaccgggcagcccaactcggcaaaaagggcagagggaaagaggctgaagaacagcggcaaaaagaggcatacctggaatttgaaaaaagtcggtactccacatacgctgcattgctccgtgtcaagctgaaggccggaagcgaagagttagacgcagttgaagcagcactcgctcaggccggttcaacagaggatggtctgcccccttcccatagcagcccaagtttgcagccaaagcctagcagccagccgagagctcaacggcatagctcagagccgaggccaggagctgggtccgggcgaaggaaaccttag

SEQ ID NO: 131902 - DNA, 2784 bp, Artificial Sequence
  derived and/or modified sequence
cagatctggaggtgtccgctgcagcatcatgcggagagtgcaccccctctcccagccctcagctgggcacagcccctgttgtgtttgagctcagtgtcagcgctgggcgagcagcggcctactccagctttgggccctggctctaacaggaaactgaggctggaagccagcacctcagacccattgccagctaggggaggatctgcgctgcctggcagccgcaacctggtgcacgggcctcctgcgccacctcaggtgggagctgacggtctctactcctctctcccgaacgggcttggcggtccccctgagcgcctggcgacactgtttgggggtcctgccgatactgggttcctgaatcagggggatacatggtcctcaccacgagaggtgagctcccacgctcagcgcatagccagggcaaaatgggagttcttctatggttcactggatcctccctcctccggggctaagccccctgaacaggcccctccttcccctcccggagtcggaagtcggcagggtagcggagtagcagtggggcgagcagctaagtactcagaaaccgatctggacacagtgcctcttcggtgttacagggagacagacatcgacgaagtactggctgaaagggaagaggctgattcagcaatcgagagtcagccctcttcagagggcccaccgggaaccgcatatccccctgcaccgaggcctggtccactcccaggcccacacccaagcttggggagcggtaacgaagatgaagatgacgatgaggccggtggggaggaggacgtagatgacgaggttttcgaggcttcagaaggcgctcgtccaggctccagaatgcccctgaagagtccagtcccctttctgcctggcacttcaccctcagcagatggccctgactctttttcatgtgtcttcgaggccatactggaatctcacagagcaaaagggacatcttacacctccttggcaagtctcgaggccctcgcatcccctggccctacccagtcacctttttttaccttcgaattgcctccccagcccccagcccctcggcctgatccccctgctcctgctcccttggccccactggaaccagattcagggacaagtagtgccgctgatgggccttggacacagagaggcgaggaggaagaggcagaggcacgtgctaaactcgccccagggagggagccacctagtccctgccactcagaggattcgctgggcctgggggctgcacctcttggctcggaaccacctcttagtcagctcgtgtctgatagcgattcggaactggattctacagagagactggctttgggctcaactgacacccttagcaacgggcaaaaggcagatctggaggcagcccagaggctagccaaaagactgtaccgcttagacggctttcgcaaggccgacgtcgcgaggcatttgggcaaaaataatgattttagcaagctagttgcgggtgaatatctgaaatttttcgtgtttactggcatgaccctggatcaggcacttcgcgtgttcctcaaagagctcgctctgatgggcgagacccaggagcgagagcgggttttagcccatttttcacagcgatacttccagtgtaatccggaagcactgagtagtgaggatggtgcacacacactaacgtgcgccctgatgcttctcaatacagacctgcacggccataacatcggcaaaagaatgacttgcggagacttcataggcaacctcgaagggttgaacgacggcggagatttccctcgagaattgctgaaagccctttacagtagcattaaaaatgaaaagctccagtgggcgattgacgaggaggagttgcgaagatctctgagtgaactggccgacccaaatccgaaggtcatcaaacgcatcagcggcggatcgggtagcggaagctcccccttcttggatctgacaccagaaccaggcgcagcagtgtataagcacggagctcttgtgagaaaggtgcacgcggatccagactgccgcaagactcctaggggaaaaagaggatggaagtctttccatggaatactaaagggcatgatcctgtacctgcaaaaggaggaatacaaacccggaaaggctttgtctgagacggaactcaaaaatgccatctcaattcaccacgccctggcaactcgtgctagcgattacagtaagcggcctcacgtcttctacctgcgcactgcagactggcgtgtctttttatttcaggctccatccctggagcagatgcagtcctggatcacaagaataaacgtcgtggccgctatgtttagcgcccctcctttccccgcagcagtgtcatcccagaaaaaatttagtcggcctttgttgccatccgctgctacccggctgtcccaggaggaacaggtgcgcacccacgaggccaagctgaaagccatggcctctgagctacgcgagcatagggcagcccagcttgggaaaaaagggagagggaaagaggctgaagaacagcggcaaaaggaggcatacctggaattcgagaaatctcggtactccacatatgccgcactcctaagggtcaagctcaaagcaggatcggaggaactggacgccgttgaagcggcactggctcaggctggctccactgaagatgggctgcctcctagccactcctcacccagccttcagcccaaacccagcagccagccccgtgcccagcgacactctagcgagccccgaccgggtgccggttctggacgaagaaagccgtag

SEQ ID NO: 131903 - DNA, 582 bp, Artificial Sequence
  derived and/or modified sequence
atgaccctgtgtcctcaggcctggctgcctgagggtagcgaagagcagctccggtgcgctgaccacccaagttgtggggtgctgagcgccggaccctggggaggaggacaggcttcgcatcttcagcgaagccccgtaggatgtaccttgccgtcgattccgatcggacccgtgccctggtctgtgagcgagcccagaggcgaatgttccccaccaggagcacccggacctcccgcaaggcacatggtatggcctagtctgtctccctatccctgccccgcacctaagggtcgcaagctgcagggccctttacccccaaccgcacagcctctccaggctccatggcaattgcctctgctagaacaaaaggtgcccttaagtcaaccctctgcagactgctggccagatgccggaacgggatggaacgagggtggtgtcttcatctctcttccttctccctctcacgccacgccagcacctaccggcctgcaggtgctgctcatgcgctgggatcttatcgaagacaaaaaggaaggggagatgacacccacccccagctcaccatcattcgagaaggtctag

SEQ ID NO: 131904 - DNA, 3075 bp, Artificial Sequence
  derived and/or modified sequence
atggcgcagggcgcaatgcggttctgttcggaaggagactgtgcgatttccccacccagatgcccacgccgatggctccctgaaggaccagtcccacaatctccgccagccagcatgtacggatctacgggctcactcctcaggcgcgtggccggtcctggcccgagagggcgcgagcttggcagagtgacagccccctgcaccccattgcgcgggcctccaagcccaagggtggcccctagcccgtgggccccatcctctcctaccggccaacccccaccgggcgcacagtcctccgttgtaatttttagattcgttgagaaggccagcgtgaggcccctcaacgggcttcccgctcctggaggcctgtcaagatcctgggaccttggcggagtttctccgccccggcctaccccagctctgggacctgggagtaatagaaagctgcggctggaagcaagtacctccgatcctcttccagcgcgtggagggtcagcactgccgggaagccgcaacctagtgcacggacctcctgctccaccacaggtcggcgctgacgggctgtactcctctctccctaatgggttaggcggcccacccgaaagactggccactttgtttggaggccccgctgataccggctttctaaatcagggagatacctggtcatctcctcgtgaggtgtcatcccacgcacaacggattgctagggcaaagtgggagtttttttacggatccctagatcctccctccagcggcgccaaacccccagaacaagctcctccaagccccccaggtgtgggctcccgccagggctctggggttgcagtgggccgggctgctaaatactctgagaccgatcttgacaccgtgccactgagatgttacagggagactgacatcgatgaagttctcgccgagcgcgaggaggcagacagcgccatagaatcccagccctcaagtgagggacctcccggcacggcgtatcctccagctccacgccccgggcccctaccgggacctcacccttccttaggatccggaaatgaagatgaggacgatgatgaagcggggggagaagaggacgtagacgatgaggtgttcgaagcttccgaaggcgccaggccggggtcgagaatgccacttaagagtccagtgccttttctgcctggcacatctccatcagccgacggacctgatagcttctcatgcgtttttgaggccattctggagtcacaccgtgcgaagggtacgagctacactagcctggccagcctggaggcactagcctcaccggggccaacacaaagtccattttttacattcgagctcccaccccagccacctgcaccacggccagacccacctgcccccgcacccctcgcccctctggagcctgatagcggcacaagttctgcagcagacggcccctggactcagcgaggcgaagaagaggaggccgaggccagggccaaattggctccaggaagggaaccccctagcccatgtcactctgaagatagcttaggtctgggggctgcccccctggggtcagagcctccactgtctcaactcgtctctgacagtgatagcgagctcgacagcaccgagaggttggcattaggcagcaccgacactttgtcaaacggacagaaagccgacttagaggctgcccagcgacttgccaagagactgtatcgccttgatggattcaggaaagccgacgtcgcccgccatctgggcaagaataacgacttcagcaagttggtggccggcgaatatttaaaatttttcgtcttcacaggaatgaccctcgaccaagcactgcgggtgtttcttaaagaattggccttgatgggcgaaacccaggaacgagagcgcgtcctggcacacttttctcagagatactttcaatgtaatcccgaagccctcagttctgaggacggagcacacaccctgacatgcgccctcatgttactgaatacagacttgcatggtcacaacatcgggaagcgcatgacatgcggcgacttcattggaaacctggaggggctcaatgacggcggggattttccacgagagctgttaaaggccctgtactcgtccataaaaaatgagaaactgcagtgggcgatagatgaggaggaattgagaagatccctgtccgagttggcagacccaaatcctaaagtaatcaaaaggatttctggcgggtctggatcaggcagctctcccttcctggatctcacaccagagcctggggccgccgtctataaacatggtgccttggtgaggaaggtgcatgccgaccccgactgcagaaagacccctagaggtaaaaggggctggaagtctttccatgggatcctaaaagggatgatactgtacctgcaaaaggaggagtacaagccagggaaagccctttcagagaccgaactcaagaacgccatttctatacaccatgcactggctacccgagccagcgactattccaaacggcctcatgttttctacctgcggacagccgactggcgcgtgttcttatttcaagcaccaagtctggaacagatgcagtcttggatcacacgtatcaacgtcgtggcagcaatgtttagtgccccaccttttccagccgctgtctcctcccagaagaaattcagtagaccactgttgccatcggctgccacacggttgagccaggaggagcaggtccggactcacgaggcaaaattgaaagccatggctagcgagcttcgcgagcacagagcagcccagttaggaaaaaaggggcgcgggaaagaagctgaggagcagcggcagaaggaagcctacctcgagtttgagaaaagcagatacagcacatacgctgccctgctaagagtcaagttaaaggcaggaagcgaggagcttgacgctgtggaagccgccctagcccaagctgggtcaaccgaggatgggttacccccatcacacagtagtccttctctccagcccaaaccaagcagccaacctcgcgcccaaagacactccagcgaacctcggccgggtgcggggagcggtcggaggaaaccgtag

SEQ ID NO: 131905 - DNA, 3075 bp, Artificial Sequence
  derived and/or modified sequence
atggcacagggggccatgcgtttctgttcagaaggggactgcgcaatcagcccccctaggtgtcctagaagatggctccccgagggcccagtacctcagtcccccccagcttccatgtacggatctaccggtagcttgctgagaagagtcgcaggtcctggccctagggggcgagaactcggccgcgttaccgccccatgtactcccttaaggggacctccttccccgagagtggcaccatcaccatgggctccctcaagcccaaccggacaaccaccccccggagcgcaaagcagtgtggttatttttagatttgttgagaaggcctcagtaaggcctttaaatggactgccggcacccggtggcctgtctcgcagctgggatctcggtggtgtctcccctcctagaccgacacctgctctcggaccgggctctaatcgcaagttacgcctggaagcttcaacaagtgacccactgccagcaagaggagggtccgccctgcccggaagcagaaatctggtacatggtccacccgcccctccacaggttggagcagatggtctatacagctccttaccaaacggactcggagggccccccgaaagactggccactttgtttggaggccccgctgataccggctttctaaatcagggagatacctggtcatctcctcgtgaggtgtcatcccacgcacaacggattgctagggcaaagtgggagtttttttacggatccctagatcctccctccagcggcgccaaacccccagaacaagctcctccaagccccccaggtgtgggctcccgccagggctctggggttgcagtgggccgggctgctaaatactctgagaccgatcttgacaccgtgccactgagatgttacagggagactgacatcgacgaggtgctggctgagagagaggaggcagattctgcgatcgagagtcagccctcatccgaaggccctcccggcacagcctatccaccggctcccaggcccgggcctttaccaggaccccatccctccctcggaagcggtaacgaagatgaagatgatgatgaagccggcggcgaggaagacgtcgacgatgaagttttcgaggctagtgaaggtgccagacccggctctaggatgccactgaagtctccagtccctttcctgcctggaacaagtccaagtgccgacggacccgatagcttctcatgcgtgttcgaggccatcctggaatctcatcgtgccaagggcacatcatacacctctctagcgtcccttgaggccttggccagtcccggaccgacccagagccccttctttacatttgagttaccgccgcagccccccgcccctagaccagatccccccgctcccgcacccctcgcacctttggaacctgactctgggacctcatctgccgccgatggcccgtggacacagagaggggaagaagaagaagccgaagcccgcgctaagctcgctcctgggcgagaaccacctagcccttgtcattccgaggactccctggggctgggagccgcacctttgggatctgaaccgcccctttcacagctcgtgtctgacagcgattccgagcttgattctaccgaaagactggcccttggcagcacagataccctctcaaacggtcagaaggcagatctggaagccgcccagagactggctaagcgattatatcgacttgacggattcaggaaagccgacgttgctcgtcacctgggaaaaaataacgatttttctaagctggtggctggagagtacctcaaattctttgtgttcactggcatgaccctcgatcaggcactcagagtcttcttaaaagagctggcactgatgggcgaaacacaggagcgagaacgagtgctggcccacttttcacaacgttattttcagtgtaatcccgaggctctgagtagcgaagatggagctcatacactcacttgcgctctgatgctccttaacaccgacctccatggacacaatattggtaaaagaatgacttgtggcgattttataggtaatttagagggcctcaatgatgggggcgacttcccgagggaattacttaaggcgttatattcgagcatcaagaacgagaagctgcagtgggctatcgatgaagaagaacttcggcgatctttaagtgagctggccgatcctaaccctaaggttataaaaaggattagtgggggaagtggttctggatcctccccattcttagacttaactcctgaaccgggggcagccgtttacaaacatggtgcactcgttagaaaggtgcacgcagatcctgattgcagaaaaactcctcgaggcaagagagggtggaagtcattccatggcatcctcaagggtatgattttgtacctgcagaaagaggaatacaaaccaggtaaagccctcagcgagaccgaactgaaaaatgcaatcagtattcaccatgccctcgccaccagagcgtctgattacagcaagcgcccacacgtcttttacctcagaaccgcagactggagagtattcctttttcaagctccgagtttagagcagatgcagtcctggataacaagaattaatgtcgtagcagccatgttcagcgctccaccgttccccgccgccgtgtcttcacagaaaaaattttctcgacctcttttacctagtgccgcgactcgactgagtcaagaagagcaagtgaggacccacgaggcgaagttaaaagctatggcatccgaattgagggagcacagagctgcgcaactgggtaagaaaggtaggggaaaggaagccgaggaacagagacagaaggaagcttacttagaattcgaaaaatcccggtactccacatacgcagctctgctgagggtgaagttgaaagctgggagcgaggagttggacgctgtggaagccgctctggctcaggccggatctactgaagatggtctgcctccatctcattcctctccaagtctgcagcctaagccgagcagtcagccaagggcacagagacatagcagcgagccgagaccaggagctgggagtgggagaagaaagccgtag

SEQ ID NO: 131906 - DNA, 3075 bp, Artificial Sequence
  derived and/or modified sequence
atggcccagggcgccatgagattctgcagcgagggcgactgcgccatcagcccccccagatgccccagaagatggctgcccgagggccccgtgccccagagcccccccgccagcatgtacggcagcaccggcagcctgctgagaagagtggccggccccggccccagaggcagagagctgggcagagtgaccgccccctgcacccccctgagaggcccccccagccccagagtggcccccagcccctgggcccccagcagccccaccggccagcccccccccggcgcccagagcagcgtggtgatcttcagattcgtggagaaggccagcgtgagacccctgaacggcctgcccgcccccggcggcctgagcagaagctgggacctgggcggcgtgagcccccccagacccacccccgccctgggccccggcagcaacagaaagctgagactggaggccagcaccagcgaccccctgcccgccagaggcggcagcgccctgcccggcagcagaaacctggtgcacggcccccccgcccccccccaggtgggcgccgacggcctgtacagcagcctgcccaacggcctgggcggcccccccgagagactggccaccctgttcggcggccccgccgacaccggcttcctgaaccagggcgacacctggagcagccccagagaggtgagcagccacgcccagagaatcgccagagccaagtgggagttcttctacggcagcctggacccccccagcagcggcgccaagccccccgagcaggccccccccagcccccccggcgtgggcagcagacagggcagcggcgtggccgtgggcagagccgccaagtacagcgagaccgacctggacaccgtgcccctgagatgctacagagagaccgacatcgacgaggtgctggccgagagagaggaggccgacagcgccatcgagagccagcccagcagcgagggcccccccggcaccgcctacccccccgcccccagacccggccccctgcccggcccccaccccagcctgggcagcggcaacgaggacgaggacgacgacgaggccggcggcgaggaggacgtggacgacgaggtgttcgaggccagcgagggcgccagacccggcagcagaatgcccctgaagagccccgtgcccttcctgcccggcaccagccccagcgccgacggccccgacagcttcagctgcgtgttcgaggccatcctggagagccacagagccaagggcaccagctacaccagcctggccagcctggaggccctggccagccccggccccacccagagccccttcttcaccttcgagctgcccccccagccccccgcccccagacccgacccccccgcccccgcccccctggcccccctggagcccgacagcggcaccagcagcgccgccgacggcccctggacccagagaggcgaggaggaggaggccgaggccagagccaagctggcccccggcagagagccccccagcccctgccacagcgaggacagcctgggcctgggcgccgcccccctgggcagcgagccccccctgagccagctggtgagcgacagcgacagcgagctggacagcaccgagagactggccctgggcagcaccgacaccctgagcaacggccagaaggccgacctggaggccgcccagagactggccaagagactgtacagactggacggcttcagaaaggccgacgtggccagacacctgggcaagaacaacgacttcagcaagctggtggccggcgagtacctgaagttcttcgtgttcaccggcatgaccctggaccaggccctgagagtgttcctgaaggagctggccctgatgggcgagacccaggagagagagagagtgctggcccacttcagccagagatacttccagtgcaaccccgaggccctgagcagcgaggacggcgcccacaccctgacctgcgccctgatgctgctgaacaccgacctgcacggccacaacatcggcaagagaatgacctgcggcgacttcatcggcaacctggagggcctgaacgacggcggcgacttccccagagagctgctgaaggccctgtacagcagcatcaagaacgagaagctgcagtgggccatcgacgaggaggagctgagaagaagcctgagcgagctggccgaccccaaccccaaggtgatcaagagaatcagcggcggcagcggcagcggcagcagccccttcctggacctgacccccgagcccggcgccgccgtgtacaagcacggcgccctggtgagaaaggtgcacgccgaccccgactgcagaaagacccccagaggcaagagaggctggaagagcttccacggcatcctgaagggcatgatcctgtacctgcagaaggaggagtacaagcccggcaaggccctgagcgagaccgagctgaagaacgccatcagcatccaccacgccctggccaccagagccagcgactacagcaagagaccccacgtgttctacctgagaaccgccgactggagagtgttcctgttccaggcccccagcctggagcagatgcagagctggatcaccagaatcaacgtggtggccgccatgttcagcgccccccccttccccgccgccgtgagcagccagaagaagttcagcagacccctgctgcccagcgccgccaccagactgagccaggaggagcaggtgagaacccacgaggccaagctgaaggccatggccagcgagctgagagagcacagagccgcccagctgggcaagaagggcagaggcaaggaggccgaggagcagagacagaaggaggcctacctggagttcgagaagagcagatacagcacctacgccgccctgctgagagtgaagctgaaggccggcagcgaggagctggacgccgtggaggccgccctggcccaggccggcagcaccgaggacggcctgccccccagccacagcagccccagcctgcagcccaagcccagcagccagcccagagcccagagacacagcagcgagcccagacccggcgccggcagcggcagaagaaagccctag

SEQ ID NO: 131907 - DNA, 2784 bp, Artificial Sequence
  derived and/or modified sequence
cagatctggagatgccccctgcagcaccacgccgagagcgccccccccctgcccgccctgagctgggcccagcccctgctgtgcctgagcagcgtgagcgccctgggcgagcagagacccacccccgccctgggccccggcagcaacagaaagctgagactggaggccagcaccagcgaccccctgcccgccagaggcggcagcgccctgcccggcagcagaaacctggtgcacggcccccccgcccccccccaggtgggcgccgacggcctgtacagcagcctgcccaacggcctgggcggcccccccgagagactggccaccctgttcggcggccccgccgacaccggcttcctgaaccagggcgacacctggagcagccccagagaggtgagcagccacgcccagagaatcgccagagccaagtgggagttcttctacggcagcctggacccccccagcagcggcgccaagccccccgagcaggccccccccagcccccccggcgtgggcagcagacagggcagcggcgtggccgtgggcagagccgccaagtacagcgagaccgacctggacaccgtgcccctgagatgctacagagagaccgacatcgacgaggtgctggccgagagagaggaggccgacagcgccatcgagagccagcccagcagcgagggcccccccggcaccgcctacccccccgcccccagacccggccccctgcccggcccccaccccagcctgggcagcggcaacgaggacgaggacgacgacgaggccggcggcgaggaggacgtggacgacgaggtgttcgaggccagcgagggcgccagacccggcagcagaatgcccctgaagagccccgtgcccttcctgcccggcaccagccccagcgccgacggccccgacagcttcagctgcgtgttcgaggccatcctggagagccacagagccaagggcaccagctacaccagcctggccagcctggaggccctggccagccccggccccacccagagccccttcttcaccttcgagctgcccccccagccccccgcccccagacccgacccccccgcccccgcccccctggcccccctggagcccgacagcggcaccagcagcgccgccgacggcccctggacccagagaggcgaggaggaggaggccgaggccagagccaagctggcccccggcagagagccccccagcccctgccacagcgaggacagcctgggcctgggcgccgcccccctgggcagcgagccccccctgagccagctggtgagcgacagcgacagcgagctggacagcaccgagagactggccctgggcagcaccgacaccctgagcaacggccagaaggccgacctggaggccgcccagagactggccaagagactgtacagactggacggcttcagaaaggccgacgtggccagacacctgggcaagaacaacgacttcagcaagctggtggccggcgagtacctgaagttcttcgtgttcaccggcatgaccctggaccaggccctgagagtgttcctgaaggagctggccctgatgggcgagacccaggagagagagagagtgctggcccacttcagccagagatacttccagtgcaaccccgaggccctgagcagcgaggacggcgcccacaccctgacctgcgccctgatgctgctgaacaccgacctgcacggccacaacatcggcaagagaatgacctgcggcgacttcatcggcaacctggagggcctgaacgacggcggcgacttccccagagagctgctgaaggccctgtacagcagcatcaagaacgagaagctgcagtgggccatcgacgaggaggagctgagaagaagcctgagcgagctggccgaccccaaccccaaggtgatcaagagaatcagcggcggcagcggcagcggcagcagccccttcctggacctgacccccgagcccggcgccgccgtgtacaagcacggcgccctggtgagaaaggtgcacgccgaccccgactgcagaaagacccccagaggcaagagaggctggaagagcttccacggcatcctgaagggcatgatcctgtacctgcagaaggaggagtacaagcccggcaaggccctgagcgagaccgagctgaagaacgccatcagcatccaccacgccctggccaccagagccagcgactacagcaagagaccccacgtgttctacctgagaaccgccgactggagagtgttcctgttccaggcccccagcctggagcagatgcagagctggatcaccagaatcaacgtggtggccgccatgttcagcgccccccccttccccgccgccgtgagcagccagaagaagttcagcagacccctgctgcccagcgccgccaccagactgagccaggaggagcaggtgagaacccacgaggccaagctgaaggccatggccagcgagctgagagagcacagagccgcccagctgggcaagaagggcagaggcaaggaggccgaggagcagagacagaaggaggcctacctggagttcgagaagagcagatacagcacctacgccgccctgctgagagtgaagctgaaggccggcagcgaggagctggacgccgtggaggccgccctggcccaggccggcagcaccgaggacggcctgccccccagccacagcagccccagcctgcagcccaagcccagcagccagcccagagcccagagacacagcagcgagcccagacccggcgccggcagcggcagaagaaagccctag

SEQ ID NO: 131908 - DNA, 582 bp, Artificial Sequence
  derived and/or modified sequence
atgaccctgtgcccccaggcctggctgcccgagggcagcgaggagcagctgagatgcgccgaccaccccagctgcggcgtgctgagcgccggcccctggggcggcggccaggccagccacctgcagagaagccccgtgggctgcaccctgcccagcatccccatcggccccgtgccctggagcgtgagcgagcccagaggcgagtgcagcccccccggcgcccccggcccccccgccagacacatggtgtggcccagcctgagcccctacccctgccccgcccccaagggcagaaagctgcagggccccctgccccccaccgcccagcccctgcaggccccctggcagctgcccctgctggagcagaaggtgcccctgagccagcccagcgccgactgctggcccgacgccggcaccggctggaacgagggcggcgtgttcatcagcctgcccagccccagccacgccacccccgcccccaccggcctgcaggtgctgctgatgagatgggacctgatcgaggacaagaaggagggcgagatgacccccacccccagcagccccagcttcgagaaggtgtag

SEQ ID NO: 131909 - protein, 435 aa, Artificial Sequence
  derived and/or modified sequence
MGPLSAPPCTQHITWKGLLLTASLLNFWNLPTTAQVIIEAKPPKVSEGKDVLLLVHNLPQNLTGYIWYKGQMTDLYHYITSYVVHGQIIYGPAYSGRETVYSNASLLIQNVTQEDAGSYTLHIIKRGDGTGGVTGYFTVTLYSETPKPSISSSNLNPREVMEAVRLICDPETPDASYLWLLNGQNLPMTHRLQLSKTNRTLYLFGVTKYIAGPYECEIRNPVSASRSDPVTLNLLPKLPMPYITINNLNPREKKDVLAFTCEPKSRNYTYIWWLNGQSLPVSPRVKRPIENRILILPSVTRNETGPYQCEIRDRYGGIRSNPVTLNVLYGPDLPRIYPSFTYYRSGENLDLSCFADSNPPAEYSWTINGKFQLSGQKLFIPQITTNHSGLYACSVRNSATGKEISKSMIVKVSETASPQVTYAGPNTWFQEILLL

SEQ ID NO: 131910 - DNA, 1308 bp, Artificial Sequence
  derived and/or modified sequence
atgggtcccctgtctgcgccgccttgcacacagcacatcacatggaaaggactgctccttactgcctccctgcttaatttctggaatcttcccaccacggcccaagtgattattgaggccaaacctcccaaggtctcagagggcaaggacgtgctgttgctcgtccataatttgccacagaaccttaccggatacatctggtataaaggtcagatgactgacctgtatcactacattacatcatacgtggttcacgggcaaatcatctacggccctgcatactcgggtcgggagaccgtgtatagcaatgcatccctgctgatccagaacgtgacccaagaggatgctggctcatatacgcttcacattattaagagaggggatgggacaggcggtgtcactgggtatttcacggtgaccctctatagcgaaactccgaagccctccatatcgtcctccaatctcaacccccgcgaagtgatggaggccgtgaggctcatatgcgaccctgaaacacccgatgcatcatacctttggcttctcaatggacaaaatctgcctatgacccatcgcctgcagttgtctaaaaccaatcgaacactatatctgttcggtgtcacaaaatatattgccggcccttacgagtgtgaaattcgcaaccctgtgagcgcatcacgttctgaccccgtgacacttaatctcttgcctaaactgccaatgccttatataaccattaataacctgaaccctagagagaaaaaggatgttctggccttcacttgcgagccgaagtccagaaactacacgtatatatggtggctcaacggccagagtcttcccgtgtcacccagagtcaaaaggcctattgagaatcgcatacttattttgccaagcgtaacaaggaatgaaaccggaccttaccagtgcgaaatcagagacaggtacggcggaattagatccaacccagttacactgaatgtgctctatggaccagatctccctcgtatctaccctagttttacctattatcgctctggggagaacctcgatttatcatgctttgcagactcaaatccgccagcagaatactcttggaccatcaacggtaagtttcagctttctggtcagaaactgtttattccgcagatcactaccaaccactccgggctgtatgcatgctcagtgagaaattctgccacaggaaaggaaatctctaagagtatgatcgtgaaggtgtctgaaaccgcctctccgcaagtaacatatgctggccctaacacatggttccaggagattctgctcctgtag

SEQ ID NO: 131911 - DNA, 1308 bp, Artificial Sequence
  derived and/or modified sequence
atgggccccctgagcgccccaccctgcacccagcacatcacctggaagggcctgctgctgacagccagcctgctgaacttctggaacctgcccaccacagcccaggtgatcatcgaggccaagccacccaaggtgtctgagggcaaggatgtgctgctgctggtgcacaacctgccccagaacctgaccggctacatctggtacaagggccagatgacagacctgtaccactacatcaccagctatgtggtgcacggccagatcatctacggccctgcctacagcggccgggagaccgtgtacagcaatgccagcctgctgatccagaatgtgacccaggaggatgctggcagctacaccctgcacatcatcaagagaggagatggcaccggcggcgtgacaggctacttcaccgtgaccctgtacagcgagacccccaagcccagcatcagcagcagcaacctgaacccccgggaggtgatggaggccgtgcggctcatctgtgaccctgagaccccagatgccagctacctgtggctgctgaatggccagaacctgcccatgacccaccggctgcagctgagcaagaccaacagaaccctgtacctgtttggagtgaccaagtacatcgccggcccctatgaatgtgagatcagaaatcctgtgtctgccagcagaagtgaccctgtgaccctgaacctgctgcccaagctgcccatgccctacatcaccatcaacaacctgaacccccgggagaagaaggatgtgctggccttcacctgtgagcccaagagcaggaactacacctacatctggtggctgaatggccagagcctgcctgtgagcccccgggtgaagaggcccatcgagaaccgcatcctgatcctgcccagcgtgaccagaaatgagaccggcccctaccagtgtgagatccgggacagatatggaggcatccgcagcaaccctgtgaccctgaatgtgctgtatggccctgacctgccccgcatctaccccagcttcacctactacagaagtggagagaacctggacctgagctgctttgctgacagcaaccccccagctgagtacagctggaccatcaacgggaagttccagctgagcggccagaagctgttcatcccccagatcaccaccaaccacagcggcctgtatgcctgcagcgtgaggaacagcgccaccgggaaggagatcagcaagtccatgattgtgaaggtgtctgaaacagccagcccccaggtgacctacgccggccccaacacctggttccaggagatcctgctgctgtag

SEQ ID NO: 131912 - DNA, 1308 bp, Artificial Sequence
  derived and/or modified sequence
atgggccccctgagcgcccccccctgcacccagcacatcacctggaagggcctactcttgactgcaagtttgctgaatttctggaacctgcctacaacagcgcaggtcatcatcgaagccaagcctcccaaagtctccgaaggaaaagacgtcttgctgctcgtccataacctgccacagaatctcaccggctacatctggtataagggccagatgacagacttgtaccactatatcacatcatatgtggtgcacggtcaaatcatttacggccccgcgtatagcgggcgggaaactgtgtactccaacgccagtcttttgattcagaacgtgacccaggaggacgctggctcctacacacttcatattattaagagaggggatggtacaggaggtgtcaccgggtactttacagtcacactgtactctgagacgcccaaaccgtccatttcctcatctaatctgaaccccagggaggtgatggaggccgtgcggctcatctgcgacccagaaactccggacgcaagctacctatggcttctcaatggccaaaacctaccgatgacccataggcttcagctatctaagaccaatcgaacactctatctgttcggagtgacaaagtatattgctggaccatatgagtgcgagatccggaaccccgtgagcgcttcacggagtgatccggtgaccttaaacctcctgcctaaactgccaatgccttacattacgattaataatttgaacccaagagaaaagaaggacgtgctggcttttacttgcgaacctaaatctagaaactatacctacatctggtggctgaatgggcagtctttacccgtttcgccacgggtgaagaggcctatagagaacagaatcttaatcctgccatccgtgacacggaacgagactggaccctaccagtgcgagattcgggatcgttatggaggcatccgatcaaacccagtgaccttgaacgtcctctatggacccgaccttcctcgtatttacccaagttttacatattaccgaagcggtgaaaatttggacctgagctgcttcgctgactcgaatccaccagcagagtattcttggacgattaacggcaagtttcagctctctgggcagaagctgttcatcccacaaataaccaccaatcatagcggtctgtatgcgtgtagtgttaggaacagtgctactgggaaggagatttctaaaagtatgattgtgaaagtgtccgagacggcgtctcctcaggtgacatatgccggcccgaacacttggtttcaagagattctgctcctgtag

SEQ ID NO: 131913 - DNA, 1391 bp, Artificial Sequence
  derived and/or modified sequence
cctaggctcatctccacaggggagaacacacagacagcagagaccatgggacccctctcagcccctccctgcactcagcacatcacctggaaggggctcctgctcacagcatcacttttaaacttctggaacctgcccaccactgcccaagtaataattgaagccaagccacccaaagtttccgaggggaaggatgttcttctacttgtccacaatttgccccagaatcttactggctacatctggtacaaagggcaaatgacggacctctaccattacattacatcatatgtagtacacggtcaaattatatatgggcctgcctacagtggacgagaaacagtatattccaatgcatccctgctgatccagaatgtcacacaggaggatgcaggatcctacaccttacacatcataaagcgaggcgatgggactggaggagtaactggatatttcactgtcaccttatactcggagactcccaagccctccatctccagcagcaacttaaaccccagggaggtcatggaggctgtgcgcttaatctgtgatcctgagactccggatgcaagctacctgtggttgctgaatggtcagaacctccctatgactcacaggttgcagctgtccaaaaccaacaggaccctctatctatttggtgtcacaaagtatattgcaggaccctatgaatgtgaaatacggaacccagtgagtgccagccgcagtgacccagtcaccctgaatctcctcccgaagctgcccatgccttacatcaccatcaacaacttaaaccccagggagaagaaggatgtgttagccttcacctgtgaacctaagagtcggaactacacctacatttggtggctaaatggtcagagcctcccggtcagtccgagggtaaagcgacccattgaaaacaggatactcattctacccagtgtcacgagaaatgaaacaggaccctatcaatgtgaaatacgggaccgatatggtggcatccgcagtaacccagtcaccctgaatgtcctctatggtccagacctccccagaatttacccttcattcacctattaccgttcaggagaaaacctcgacttgtcctgctttgcggactctaacccaccggcagagtattcttggacaattaatgggaagtttcagctatcaggacaaaagctctttatcccccaaattactacaaatcatagcgggctctatgcttgctctgttcgtaactcagccactggcaaggaaatctccaaatccatgatagtcaaagtctctgagacagcatctccccaggttacctatgctggtccaaacacctggtttcaagaaatccttctgctgtgacctcccaaagtgctaggattaaaacatgacccaccatg

SEQ ID NO: 131914 - DNA, 1308 bp, Artificial Sequence
  derived and/or modified sequence
atggggcctctgtctgctcccccatgcacccagcacattacgtggaaagggttgctcctgaccgcctccttattaaatttctggaacctaccgaccaccgcccaggttataatcgaagcgaaaccacctaaggttagtgagggcaaagacgtgttgcttttggtgcacaacctccctcaaaacctgaccggatacatatggtacaaggggcaaatgacagacctgtaccactatatcacctcttacgttgtgcatggccagatcatttacggtccggcatattctgggcgagagaccgtgtattcaaacgcctccctcctcattcagaatgtgacccaggaagatgcaggctcatacacactgcacatcataaagagaggcgatgggaccggaggggtaactggatacttcaccgtgactctttactccgaaacaccaaaacccagtattagctcaagtaacttgaaccctcgggaggttatggaagcagtcagattgatctgtgaccccgagactcccgatgctagctacctgtggctattaaacggccagaaccttcccatgactcaccgtcttcagttgtccaagaccaatagaactttatacctgttcggcgtaaccaaatacatagctgggccatatgaatgtgagattcgcaatcctgtttctgcttcacggtccgatcccgtgacactcaacttgctgcccaaactccctatgccttacattaccattaataaccttaaccctcgtgaaaaaaaggacgtgctggcttttacatgtgagcctaaatcccgcaactatacatacatatggtggctgaacggtcagagccttccggtgtcccctagagtgaaacggcctattgagaataggatcctcattctgccaagtgtgactcggaacgaaaccggaccctatcagtgtgaaataagagaccggtacggagggatccgttcgaatcccgtgaccctgaacgttctgtacgggcctgatttaccacgaatatacccaagcttcacctactacaggtcaggtgagaacctggacctctcatgctttgcggattccaatccaccggctgagtacagctggacaattaatgggaagttccagctcagcggacagaaactgttcattccgcagataactactaaccactccggcctatacgcctgttcagttaggaatagcgctacaggaaaggaaatttccaaatccatgatcgtgaaagtgtcagaaaccgcaagcccgcaagtgacttatgccggaccaaacacatggttccaggagatcctgctgctttag

SEQ ID NO: 131915 - DNA, 1308 bp, Artificial Sequence
  derived and/or modified sequence
atgggccccctgagcgcccccccctgcacccagcacatcacctggaagggcctgctgctgaccgccagcctgctgaacttctggaacctgcccaccaccgcccaggtgatcatcgaggccaagccccccaaggtgagcgagggcaaggacgtgctgctgctggtgcacaacctgccccagaacctgaccggctacatctggtacaagggccagatgaccgacctgtaccactacatcaccagctacgtggtgcacggccagatcatctacggccccgcctacagcggcagagagaccgtgtacagcaacgccagcctgctgatccagaacgtgacccaggaggacgccggcagctacaccctgcacatcatcaagagaggcgacggcaccggcggcgtgaccggctacttcaccgtgaccctgtacagcgagacccccaagcccagcatcagcagcagcaacctgaaccccagagaggtgatggaggccgtgagactgatctgcgaccccgagacccccgacgccagctacctgtggctgctgaacggccagaacctgcccatgacccacagactgcagctgagcaagaccaacagaaccctgtacctgttcggcgtgaccaagtacatcgccggcccctacgagtgcgagatcagaaaccccgtgagcgccagcagaagcgaccccgtgaccctgaacctgctgcccaagctgcccatgccctacatcaccatcaacaacctgaaccccagagagaagaaggacgtgctggccttcacctgcgagcccaagagcagaaactacacctacatctggtggctgaacggccagagcctgcccgtgagccccagagtgaagagacccatcgagaacagaatcctgatcctgcccagcgtgaccagaaacgagaccggcccctaccagtgcgagatcagagacagatacggcggcatcagaagcaaccccgtgaccctgaacgtgctgtacggccccgacctgcccagaatctaccccagcttcacctactacagaagcggcgagaacctggacctgagctgcttcgccgacagcaacccccccgccgagtacagctggaccatcaacggcaagttccagctgagcggccagaagctgttcatcccccagatcaccaccaaccacagcggcctgtacgcctgcagcgtgagaaacagcgccaccggcaaggagatcagcaagagcatgatcgtgaaggtgagcgagaccgccagcccccaggtgacctacgccggccccaacacctggttccaggagatcctgctgctgtag

SEQ ID NO: 131916 - protein, 426 aa, Artificial Sequence
  derived and/or modified sequence
MGPLPAPSCTQRITWKGLLLTASLLNFWNPPTTAEVTIEAQPPKVSEGKDVLLLVHNLPQNLPGYFWYKGEMTDLYHYIISYIVDGKIIIYGPAYSGRETVYSNASLLIQNVTRKDAGTYTLHIIKRGDETREEIRHFTFTLYLETPKPYISSSNLNPREAMEAVRLICDPETLDASYLWWMNGQSLPVTHRLQLSKTNRTLYLFGVTKYIAGPYECEIRNPVSASRSDPVTLNLLPKLPIPYITINNLNPRENKDVLAFTCEPKSENYTYIWWLNGQSLPVSPGVKRPIENRILILPSVTRNETGPYQCEIRDRYGGLRSNPVILNVLYGPDLPRIYPSFTYYRSGENLDLSCFTESNPPAEYFWTINGKFQQSGQKLFIPQITRNHSGLYACSVHNSATGKEISKSMTVKVSGPCHGDLTESQS

SEQ ID NO: 131917 - protein, 387 aa, Artificial Sequence
  derived and/or modified sequence
MGPLPAPSCTQRITWKGLLLTASLLNFWYKGEMTDLYHYIISYIVDGKIIIYGPAYSGRETVYSNASLLIQNVTRKDAGTYTLHIIKRGDETREEIRHFTFTLYLETPKPYISSSNLNPREAMEAVRLICDPETLDASYLWWMNGQSLPVTHRLQLSKTNRTLYLFGVTKYIAGPYECEIRNPVSASRSDPVTLNLLPKLPIPYITINNLNPRENKDVLAFTCEPKSENYTYIWWLNGQSLPVSPGVKRPIENRILILPSVTRNETGPYQCEIRDRYGGLRSNPVILNVLYGPDLPRIYPSFTYYRSGENLDLSCFTESNPPAEYFWTINGKFQQSGQKLFIPQITRNHSGLYACSVHNSATGKEISKSMTVKVSGPCHGDLTESQS

SEQ ID NO: 131918 - DNA, 1281 bp, Artificial Sequence
  derived and/or modified sequence
atgggcccactccctgccccaagttgtacacagcgaatcacgtggaaaggcttgctgctcactgcatcactcctcaacttctggaatccaccaacaactgcggaggtgacaattgaggcccagccccccaaggtgtccgaggggaaagacgtgctcttgctagtgcacaatctgccacagaatttgcccggatacttctggtataaaggcgagatgacagacctttaccactacattatatcttacattgtggatggtaagattattatctacggtccagcatattccggtcgcgagacagtgtatagcaatgcttcactgttgatccaaaacgtaactcgaaaggatgccggtacatacacactgcacatcatcaaaagaggagacgaaactagagaggagattagacacttcaccttcacactctacctggagacccccaagccatatatttccagttcaaacttgaaccccagggaagctatggaggcagtccggctcatttgtgatccagagaccttggacgctagctatctgtggtggatgaacggccagtctttgccagtcacccatcggctgcagctcagcaagaccaatcgtacgctgtatcttttcggtgtgaccaaatacatcgcgggcccatacgaatgcgagatcagaaaccctgtatcagcttcccggtctgatcccgtcaccttgaacttactccctaagcttcctatcccgtatataaccattaacaacttgaatcccagagagaataaggatgtgcttgctttcacatgtgagcctaagtccgagaactacacttatatctggtggcttaacgggcagtcactgccagtatcccctggtgttaaaagacctattgaaaaccgcatactgattctacccagcgtgacaagaaatgagaccggcccttaccaatgcgagatacgagatagatacggcggtctgaggagcaatcccgtgattcttaacgtgctgtacggtccagacctacccagaatctatccctcgttcacctattaccgttccggcgagaacctggatctctcatgttttacagagtccaatccacccgccgagtatttttggactattaacggcaaattccaacagtctgggcagaagctctttattccccagatcaccaggaaccacagcggcctctatgcctgttctgtacacaattccgctactgggaaggagatttccaaatctatgactgtgaaggtgagtggaccatgccacggagatctgactgagtcacagagttag

SEQ ID NO: 131919 - DNA, 1164 bp, Artificial Sequence
  derived and/or modified sequence
atgggccccctgccagctccctcctgcacccagcgaatcacctggaaggggctgctcctaacagcctcgctcctgaatttctggtacaaaggagagatgacagacctttatcattatatcattagctatattgtcgatggaaaaatcatcatctacggtcccgcctacagcggcagagagaccgtatacagcaatgcgtctcttctgatccagaatgtcacccgcaaagacgccgggacgtatactctgcatatcatcaagcgtggggacgagacacgcgaagagatccgtcactttacctttacactgtacctggaaacaccaaagccctacatttcctctagcaatctgaatccacgggaggctatggaggctgtacggttgatctgtgacccagaaacacttgatgccagctatctgtggtggatgaacggtcaaagcctgccggtgacgcaccgcttgcagttaagcaaaacaaatcggacgctgtatctgtttggcgtgacgaaatacatcgccgggccatatgagtgtgagatccggaaccctgtcagtgcttctcgctcagatccagtcacgcttaatctgctccctaagcttcccatcccatacattacgattaacaatttaaatccaagggagaataaggacgtcctagcgttcacttgcgaaccaaaaagcgagaactacacctacatctggtggttgaacgggcaatccctcccagtctctccaggagtcaaacgacccatcgagaacaggattctgatcttaccatcagtgacgcgcaatgagaccggtccgtaccagtgcgaaatccgcgaccgatacggaggactgagaagcaacccagtgatcttgaatgtcctgtacggccccgacctaccacgcatctatcccagtttcacgtattaccggtcaggcgagaatctcgatctttcttgcttcaccgagagcaatccccctgcagaatacttttggacgatcaacggcaaattccaacaaagtggccaaaagctttttataccccagatcacaagaaaccattccggtctgtacgcttgttccgtgcacaatagtgccacgggaaaagagatttccaagtccatgactgtgaaggtgtcaggcccatgccatggtgacttaaccgaaagtcagtcctag

SEQ ID NO: 131920 - DNA, 1281 bp, Artificial Sequence
  derived and/or modified sequence
atgggccccctgcctgcccccagctgcacccagaggatcacctggaagggcctgctgctgacagccagcctgctgaacttctggaacccccccaccacagctgaggtgaccatcgaggcccagccccccaaggtgtctgagggcaaggatgtgctgctgctggtgcacaacctgccccagaacctgcccggctacttctggtacaagggggagatgacagacctgtaccactacatcatctcctacatcgtggatggcaagatcatcatctacggccctgcctacagcggccgggagaccgtgtacagcaatgccagcctgctgatccagaatgtgaccaggaaggatgctggcacctacaccctgcacatcatcaagagaggagatgagacccgggaggagatccgccacttcaccttcaccctgtacctggagacccccaagccctacatcagcagcagcaacctgaacccccgggaggccatggaggccgtgcggctcatctgtgaccctgagaccctggatgccagctacctgtggtggatgaatggccagagcctgcctgtgacccaccggctgcagctgagcaagaccaacagaaccctgtacctgtttggagtgaccaagtacatcgccggcccctatgaatgtgagatccggaaccctgtgtctgccagcagaagtgaccctgtgaccctgaacctgctgcccaagctgcccatcccctacatcaccatcaacaacctgaacccccgggagaacaaggatgtgctggccttcacctgtgagcccaagtctgagaactacacctacatctggtggctgaatggccagagcctgcctgtgtcccctggggtgaagaggcccattgaaaatcgcatcctgatcctgcccagcgtgaccagaaatgaaacaggcccctaccagtgtgagatccgggacagatatggaggcctgcggagcaaccctgtgatcctgaatgtgctgtatggccctgacctgccccgcatctaccccagcttcacctactaccgcagcggggagaacctggacctgagctgcttcacagagagcaaccccccagctgagtacttctggaccatcaatggcaagttccagcagagcggccagaagctgttcatcccccagatcaccaggaaccacagcggcctgtatgcctgcagcgtgcacaacagcgccaccgggaaggagatcagcaagtccatgacagtgaaggtgtctggcccctgccacggggacctgacagagagccagagctag

SEQ ID NO: 131921 - DNA, 1164 bp, Artificial Sequence
  derived and/or modified sequence
atgggccccctgcctgcccccagctgcacccagaggatcacctggaagggcctgctgctgacagccagcctgctgaacttctggtacaagggggagatgacagacctgtaccactacatcatctcctacatcgtggatggcaagatcatcatctacggccctgcctacagcggccgggagaccgtgtacagcaatgccagcctgctgatccagaatgtgaccaggaaggatgctggcacctacaccctgcacatcatcaagagaggagatgagacccgggaggagatccgccacttcaccttcaccctgtacctggagacccccaagccctacatcagcagcagcaacctgaacccccgggaggccatggaggccgtgcggctcatctgtgaccctgagaccctggatgccagctacctgtggtggatgaatggccagagcctgcctgtgacccaccggctgcagctgagcaagaccaacagaaccctgtacctgtttggagtgaccaagtacatcgccggcccctatgaatgtgagatcagaaatcctgtgtctgccagcagaagtgaccctgtgaccctgaacctgctgcccaagctgcccatcccctacatcaccatcaacaacctgaacccccgggagaacaaggatgtgctggccttcacctgtgagcccaagtctgagaactacacctacatctggtggctgaatggccagagcctgcctgtgtccccaggagtgaagaggcccatcgagaaccgcatcctgatcctgcccagcgtgaccagaaatgagaccggcccctaccagtgtgagatccgggacagatatggaggcctgcggagcaaccctgtgatcctgaatgtgctgtatggccctgacctgccccgcatctaccccagcttcacctactacagaagtggagagaacctggacctgagctgcttcacagagagcaaccccccagctgagtacttctggaccatcaacgggaagttccagcagagcggccagaagctgttcatcccccagatcaccaggaaccacagcggcctgtatgcctgcagcgtgcacaacagcgccaccgggaaggagatcagcaagtccatgacagtgaaggtgtctggcccctgccacggggacctgacagagagccagagctag

SEQ ID NO: 131922 - DNA, 1281 bp, Artificial Sequence
  derived and/or modified sequence
atgggccccctgcccgcccccagctgcacccagcggatcacctggaaaggactgcttctcacggcgtcactgcttaacttttggaaccccccaacaacagcagaggtgactattgaggcgcaacctccaaaagtgagcgaagggaaggacgtgttgctccttgttcacaatctaccacagaatttgcctgggtacttctggtacaaaggcgaaatgaccgatctgtaccattatattatttcgtatatcgttgacggtaagatcatcatctatggcccggcctactccggccgtgagacagtttacagtaacgcctcgctcctgatccagaatgtgacacggaaagatgctggtacttacacactccatattattaaacgcggtgatgaaacccgagaagagattagacactttacgtttacattgtacctagagaccccaaaaccgtacattagctcaagtaacctcaatcctcgggaggccatggaggctgtacgcctcatttgcgatccagaaaccctggacgcatcatatctctggtggatgaacgggcagagtttacctgtgacacatcgactgcagctatctaagacaaatcgtaccctatacctgttcggagtgacaaagtacatcgcaggtccgtacgagtgtgaaatccggaaccccgtttcggcttcaaggtcagacccggtgacacttaacctcctgcccaaactgcccattccctacattaccatcaataatctgaatcccagggaaaacaaagacgtgctcgcattcacctgcgagcccaaatccgagaattatacttacatttggtggctcaatggacagtcgctcccagtgtcaccaggcgtgaagcgtccaatcgagaatcgcatcctaatcctcccttccgtgacgagaaacgaaactgggccctatcaatgcgaaatccgtgatagatacggtggtctgcggagcaaccctgtgatccttaatgtactgtatgggcccgacctccctcgtatctacccatcttttacatactacagaagtggggagaatctcgacctgagctgcttcacagagtccaatcctccagccgagtacttttggacaatcaatggaaagttccaacaatccgggcaaaaactgttcatcccccagattactagaaatcattccggcctctatgcttgctccgtgcacaacagcgcgactggaaaagagatctctaagtctatgactgtaaaggtttccggaccatgccacggagatctgactgagtctcagtcttag

SEQ ID NO: 131923 - DNA, 1164 bp, Artificial Sequence
  derived and/or modified sequence
atgggccccctgcccgcccccagctgcacccagcggatcacctggaagggcctcctgctcactgccagtttgctgaatttctggtataaaggggaaatgaccgatctctaccattacatcatttcctacatcgtggacgggaagatcatcatctacggacctgcatactccgggcgagaaactgtgtactccaacgcgtcactgctcatacaaaatgtgactaggaaggacgccggaacttataccttacacatcattaaacggggagatgagactagagaagaaattcggcactttacatttacgctgtacctggaaaccccgaagccttacatctcaagctcgaaccttaacccccgtgaagccatggaggccgtgcgcctcatctgtgaccctgagactctcgatgccagctacttgtggtggatgaatgggcaatccttgcctgttacccaccgtcttcagttatcaaaaaccaatcgtactctatacctcttcggagtgactaagtacattgcaggaccgtacgaatgcgaaataaggaacccggtgtcagctagtaggtctgaccctgtcacactaaatctgctgcccaagctgccaatcccctatattaccatcaataacttaaacccgagggagaacaaagacgtcctggcgttcacctgtgagccgaagtcggagaattatacctatatttggtggctgaatggacaaagtctccccgtgtccccaggggtcaagagaccaatagagaacagaattcttatactaccttccgtgacacgcaacgagactggaccctaccagtgcgaaattagggataggtatggcggcctccggtctaacccggtgattctcaacgtcctgtacgggccggatttgcctcggatatacccgtcattcacatactaccgcagtggggagaatctggatttgtcctgcttcacggaatccaatcctccagctgagtatttttggactattaatggcaagtttcagcaatctggacagaaacttttcatcccccagatcacaagaaatcacagtggtttgtacgcctgctccgtgcacaattcagccacaggcaaagaaatcagcaagagcatgaccgttaaagtcagcggaccctgccacggggacctgactgagtctcagtcctag

SEQ ID NO: 131924 - DNA, 1705 bp, Artificial Sequence
  derived and/or modified sequence
agaaggaggaaggacagcacagctgacagccgtgctcagacagcttctggatcccaggctcatctccacagaggagaacacacaggcagcagagaccatggggcccctcccagccccttcctgcacacagcgcatcacctggaaggggctcctgctcacagcatcacttttaaacttctggaacccgcccaccactgccgaagtcacgattgaagcccagccacccaaagtttctgaggggaaggatgttcttctacttgtccacaatttgccccagaatcttcctggctacttctggtacaaaggggaaatgacggacctctaccattacattatatcgtatatagttgatggtaaaataattatatatgggcctgcatacagtggaagagaaacagtatattccaacgcatccctgctgatccagaatgtcacccggaaggatgcaggaacctacaccttacacatcataaagcgaggtgatgagactagagaagaaattcgacatttcaccttcaccttatacttggagactcccaagccctacatctccagcagcaacttaaaccccagggaggccatggaggctgtgcgcttaatctgtgatcctgagactctggacgcaagctacctatggtggatgaatggtcagagcctccctgtgactcacaggttgcagctgtccaaaaccaacaggaccctctatctatttggtgtcacaaagtatattgcaggaccctatgaatgtgaaatacggaacccagtgagtgccagtcgcagtgacccagtcaccctgaatctcctcccgaagctgcccatcccctacatcaccatcaacaacttaaaccccagggagaataaggatgtcttagccttcacctgtgaacctaagagtgagaactacacctacatttggtggctaaacggtcagagcctccccgtcagtcccggggtaaagcgacccattgaaaacaggatactcattctacccagtgtcacgagaaatgaaacaggaccctatcaatgtgaaatacgggaccgatatggtggcctccgcagtaacccagtcatcctaaatgtcctctatggtccagacctccccagaatttacccttcattcacctattaccgttcaggagaaaacctcgacttgtcctgcttcacggaatctaacccaccggcagagtatttttggacaattaatgggaagtttcagcaatcaggacaaaagctctttatcccccaaattactagaaatcatagcgggctctatgcttgctctgttcataactcagccactggcaaggaaatctccaaatccatgacagtcaaagtctctggtccctgccatggagacctgacagagtctcagtcatgactgcaacaactgagacactgagaaaaagaacaggctgataccttcatgaaattcaagacaaagaagaaaaaaactcaatgttattggactaaataatcaaaaggataatgttttcataattttttattggaaaatgtgctgattctttgaatgttttattctccagatttatgaactttttttcttcagcaattggtaaagtatacttttgtaaacaaaaattgaaatatttgcttttgctgtctatctgaatgccccagaattgtgaaactattcatgagtattcataggtttatggtaataaagttatttgcacatgttccgtaa

SEQ ID NO: 131925 - DNA, 1389 bp, Artificial Sequence
  derived and/or modified sequence
aaggaggaaggacagcacagctgacagccgtgctcagacagcttctggatcccaggctcatctccacagaggagaacacacaggcagcagagaccatggggcccctcccagccccttcctgcacacagcgcatcacctggaaggggctcctgctcacagcatcacttttaaacttctggtacaaaggggaaatgacggacctctaccattacattatatcgtatatagttgatggtaaaataattatatatgggcctgcatacagtggaagagaaacagtatattccaacgcatccctgctgatccagaatgtcacccggaaggatgcaggaacctacaccttacacatcataaagcgaggtgatgagactagagaagaaattcgacatttcaccttcaccttatacttggagactcccaagccctacatctccagcagcaacttaaaccccagggaggccatggaggctgtgcgcttaatctgtgatcctgagactctggacgcaagctacctatggtggatgaatggtcagagcctccctgtgactcacaggttgcagctgtccaaaaccaacaggaccctctatctatttggtgtcacaaagtatattgcaggaccctatgaatgtgaaatacggaacccagtgagtgccagtcgcagtgacccagtcaccctgaatctcctcccgaagctgcccatcccctacatcaccatcaacaacttaaaccccagggagaataaggatgtcttagccttcacctgtgaacctaagagtgagaactacacctacatttggtggctaaacggtcagagcctccccgtcagtcccggggtaaagcgacccattgaaaacaggatactcattctacccagtgtcacgagaaatgaaacaggaccctatcaatgtgaaatacgggaccgatatggtggcctccgcagtaacccagtcatcctaaatgtcctctatggtccagacctccccagaatttacccttcattcacctattaccgttcaggagaaaacctcgacttgtcctgcttcacggaatctaacccaccggcagagtatttttggacaattaatgggaagtttcagcaatcaggacaaaagctctttatcccccaaattactagaaatcatagcgggctctatgcttgctctgttcataactcagccactggcaaggaaatctccaaatccatgacagtcaaagtctctggtccctgccatggagacctgacagagtctcagtcatgactgcaacaactgagacactgagaaaaagaacaggctgataccttcatgaaattcaagacaaagaagaaaaaaactcaatgttattggactaaataatcaaaaggataatgttttcataattttttattgg

SEQ ID NO: 131926 - DNA, 1281 bp, Artificial Sequence
  derived and/or modified sequence
atgggaccactccccgcaccaagctgtacccagcgaattacctggaagggccttctgctcaccgcctctctccttaacttctggaatcctcctactactgccgaagtaactatcgaagctcagccgccaaaggtctctgagggcaaagatgtcctgctgctagtgcataacctcccccaaaatcttcccggttatttctggtacaagggcgagatgactgacttataccactacattattagttacatcgtggacggcaaaatcattatttacgggcctgcttattctgggcgagaaactgtttactccaacgcatccctgctcattcagaacgttacacgaaaggatgccggaacttataccctgcacatcatcaagcgaggcgatgagacaagagaggagatccgccacttcacattcacactgtacctagagactccgaagccctatatctcatctagtaacctcaatccgcgtgaggcgatggaggccgtccgattgatctgtgaccctgagactctcgatgcgagctatctgtggtggatgaacggccagtcgctcccggtcacccataggctccagctgtctaagactaaccgcactttatacctgttcggtgtgacgaaatacatcgctgggccatatgagtgcgaaatcaggaatccagtgagcgccagccgttctgaccccgttactctgaacctgctgcccaagctccctatcccttatatcacaattaacaacctgaacccacgcgaaaataaagacgtgttggccttcacgtgtgagccaaagtccgaaaactacacctatatctggtggttgaacggccagagtctgcccgttagccctggtgtcaagaggccaattgagaaccggatattgattcttccatcagttacacgaaatgaaaccgggccttatcagtgcgaaattagggatcgatacggcggtctgcgctcaaacccggtcatcctgaatgtgctgtacggtcccgatctgcccagaatttacccctcctttacgtactaccggtctggcgagaatctcgatcttagctgctttactgagagtaacccccctgcggaatatttttggacaatcaatgggaagtttcagcagtctgggcagaaattgttcatccctcaaatcactagaaatcattctggcctttacgcgtgctccgtacacaacagcgccactggaaaggaaatcagcaagagcatgactgtgaaggtcagtggtccatgccacggcgaccttactgaaagccagtcatag

SEQ ID NO: 131927 - DNA, 1164 bp, Artificial Sequence
  derived and/or modified sequence
atgggccctctgcccgctcctagttgcactcagaggatcacttggaaggggctgctgcttaccgcgtccctcttgaacttctggtacaaaggagaaatgaccgatctgtatcattacatcatctcatacatcgtggacggcaaaatcataatttatggtcccgcttattcgggtcgtgaaacagtgtattcgaacgctagtttgctgattcagaacgtgacccggaaagacgccggtacatataccctccatattataaagaggggtgacgagacaagagaagagattcggcatttcacattcacgctctacttggagacaccgaaaccatatatttcctcaagcaacctgaatcccagggaggctatggaagccgtaagactgatttgtgacccggaaacgttggatgcgtcatatctatggtggatgaacggacagtccctccctgtgacgcatcgtctccagctgagcaaaacgaaccgaaccttgtatctgttcggagtgacaaaatacatcgccggtccttatgagtgtgagatccgcaacccggttagcgccagccgttcagatccagttaccttaaacttactcccgaaactgcctattccttatataacaatcaataaccttaacccgagagagaataaagatgtattggcattcacctgcgaaccaaagtcggagaactacacatacatctggtggctgaatgggcagagcctgcctgtcagccctggggttaaaagaccaatagaaaaccgtatcctcattctccctagcgtgaccagaaatgagactggcccttatcaatgcgaaatacgggaccgatacggagggctgagatccaaccctgtgatccttaatgtcttatatggtccggacttacctcggatctacccttcctttacgtattaccgcagtggagagaatctggacctctcctgcttcacggaatctaacccgccagccgagtacttttggacaatcaatggaaaattccagcagagcggccagaagttatttatcccccagatcactcgcaatcattctgggctatacgcctgttccgtacacaactccgccacgggcaaggagattagtaaatctatgactgtgaaggtgtccggcccttgccacggtgatctgactgaaagccagtcctag

SEQ ID NO: 131928 - DNA, 1281 bp, Artificial Sequence
  derived and/or modified sequence
atgggcccactgccagcaccttcatgtacgcagcgcattacctggaagggcttactcctgacagcctccctgctgaacttttggaatccacccaccacagccgaggtgaccatagaggcacagccccccaaagttagcgaaggaaaagatgtcttgttgctcgtgcacaatctgccccagaacttacccggctatttttggtacaaaggagagatgacggacctttatcactatatcatctcatacattgttgatgggaagataattatttatgggcctgcatattcagggagggagacagtgtacagcaatgcctctctgcttattcaaaatgtcacccggaaagatgctggcacatatactctgcacatcatcaaacgaggggacgaaactagagaagaaatcaggcattttacctttactctgtacttggaaaccccaaaaccttatatctcctcctccaacctaaatccacgtgaagcaatggaagctgtcaggctgatttgcgatcctgagaccctggacgcatcatacctgtggtggatgaacggccagagcctacccgtcacccaccggttgcagttatctaagaccaatcggaccctatatctcttcggggtgaccaaatatattgcaggaccctacgaatgtgaaatcaggaaccccgtcagtgcttcccggtccgatcctgtcacccttaacctgctcccaaagctccccataccctatattaccattaataatcttaacccccgtgagaacaaggacgtcctagcattcacttgcgagcccaagtctgaaaactatacctacatttggtggctcaacggtcaatctctgcccgtctctccaggcgtcaaacgtccgatcgaaaatagaatccttatcttacccagcgtcacaagaaacgaaacaggcccttatcagtgcgaaattagggatagatatggtggcttgaggagtaaccctgtgattttgaatgtactgtacggacccgatctgcctcgtatctatccatccttcacctactaccgaagcggagaaaatctggacctcagctgctttactgagagtaaccctccagccgaatatttttggactataaatggaaaatttcaacaaagcggtcagaagctatttattccacagatcacccggaatcacagtggactgtatgcgtgcagcgtccacaacagcgctacgggaaaggaaatctccaagagcatgacggttaaggtctctgggccatgtcacggtgacctcacagagtctcagagttag

SEQ ID NO: 131929 - DNA, 1164 bp, Artificial Sequence
  derived and/or modified sequence
atgggcccacttcccgcaccctcctgcacccaaagaattacctggaagggactgctcctgactgctagcctcctgaatttttggtacaaaggggagatgacagatctgtatcattacatcattagctacattgtagatggcaaaattattatatatggcccggcatacagcgggagagagaccgtatacagcaatgcttcattactgattcagaatgtaacacgtaaggacgccggaacttacacccttcatataattaagcgcggagacgaaactcgggaggagataaggcacttcacgtttactttatacctcgagacaccaaagccgtatatctcatcttccaacctcaaccccagggaggctatggaagccgtgcgccttatttgcgatcccgaaaccctagatgcgtcttacttgtggtggatgaacggtcaaagccttccagtgacacaccgcctgcaactttctaagactaaccgaacactttatctttttggcgtcacaaagtatatagctggtccttacgaatgcgaaatcagaaatccagtcagtgcttctagaagtgaccctgtgactctaaacctccttccaaagctgccgatcccatacataaccattaataaccttaacccccgagagaacaaggacgtattggcctttacttgcgagccaaaaagcgagaactatacttacatttggtggctgaacggccagagtctgcccgtgtcgcccggggtaaaacgtccgattgagaacaggatactgattctgccatccgttaccaggaatgagacgggcccgtaccagtgtgaaattagggatagatacggtggactccggtcaaaccccgtaatcctgaacgtgttgtacggacctgacctgccaaggatatacccatcctttacatattatagatccggcgaaaatctggacctgtcgtgcttcacagaatctaatccacccgccgagtatttttggacaatcaatggcaagtttcagcaatctggacaaaagctttttatcccacaaatcacacgtaaccattctgggctgtatgcttgttccgtgcacaacagcgccacagggaaggaaattagcaaatcaatgaccgtgaaggtgtcagggccgtgccatggagacctcacagaatcacagtcttag

SEQ ID NO: 131930 - DNA, 1281 bp, Artificial Sequence
  derived and/or modified sequence
atgggccccttgcctgcgccatcttgtactcaacggatcacgtggaaaggcctgttacttactgcaagcctgctcaatttctggaacccccctactaccgcggaagtgactatcgaagctcagccaccaaaggtctctgagggaaaggatgtcctgttgttggtacacaatcttccacagaatttacccgggtacttctggtacaaaggcgaaatgacagacttataccactacataatttcgtacatagttgacgggaaaattattatctacgggccagcctattctggaagagaaacagtatactcaaacgcctctttattaatacaaaatgtcactcgcaaggacgccggcacgtatactctgcatatcattaaacggggcgacgaaaccagagaagagattcgccacttcacctttacactgtacctggaaactcctaagccctatattagttcatctaatttaaatcctagagaagccatggaagcagttagactcatctgtgaccccgaaaccttagatgcaagctatctttggtggatgaacgggcagtcactgcccgtcacacacaggctacagctgtccaaaacaaaccgcaccctatatctcttcggggtgaccaaatatattgcaggaccctacgaatgtgaaatcaggaaccccgtcagtgcttcccggtccgatcctgtcacccttaacctgctcccaaagctccccataccctatattaccattaataatcttaacccccgtgagaacaaggacgtcctagcattcacttgcgagcccaagtctgaaaactatacctacatttggtggctcaacggtcaatctctgcccgtctctccaggcgtcaaacgtccgatcgaaaatagaatccttatcttacccagcgtcacacgtaacgaaaccgggccttaccaatgcgagattagggacaggtacggcggcctgagaagcaatccagtcattttaaatgtgctatacggtcctgacctacctcgcatataccctagttttacctactatagaagtggcgagaacctggacttatcatgtttcacagaatccaatccgcccgctgagtacttttggacaatcaacggtaaattccaacaatccggtcagaaactttttatcccccagatcacccgtaatcatagcggactgtatgcctgcagcgtgcataattcagccacgggtaaagaaattagcaagtctatgacagtgaaagtatcaggaccttgccatggcgatctcacggaatcccagtcctag

SEQ ID NO: 131931 - DNA, 1164 bp, Artificial Sequence
  derived and/or modified sequence
atgggaccactgccagctcccagttgcactcagcgtatcacatggaaaggactgctactgacagccagcctgctgaacttctggtataagggcgaaatgacagacctgtatcactacatcatctcatatatagtggacggaaagattataatatacgggccagcatattccggacgtgaaacagtctattctaacgccagtctgttgatccaaaatgttacaaggaaggacgccggcacctatactctgcatatcataaaacgaggcgatgaaacaagagaagagatcaggcacttcacatttactttatacctcgagacaccaaagccgtatatctcatcttccaacctcaaccccagggaggctatggaagccgtgcgccttatttgcgatcccgaaaccctagatgcgtcttacttgtggtggatgaacggtcaaagccttccagtgacacaccgcctgcaactttctaagactaaccgaacactttatctttttggcgtcacaaagtatatagctggtccttacgaatgcgaaatcagaaatccagtcagtgcttctagaagtgaccctgtgactctaaacctccttccaaagctgcccatcccctatataaccattaataatttgaacccacgcgaaaacaaggacgttttagccttcacatgtgagcccaagagcgaaaattacacttatatttggtggctgaatggacaatccctgcccgtctcccctggagttaagcgacctattgaaaaccgcatcctgatccttccgtctgtgacccgtaatgaaacaggcccgtatcaatgcgaaattcgagatcgttatgggggtctccgcagtaatcctgtgatactcaacgtactgtacggcccagatttgccgcgtatatacccttctttcacctactacagatccggcgagaatctcgatttatcctgctttacagaatccaacccccctgccgagtacttttggactataaacggcaagtttcagcagtctggacagaagctgtttatcccgcaaatcacacgtaatcacagcggcctctatgcctgttccgtccacaactccgctacaggtaaagaaatttctaagagcatgaccgttaaagtttctggcccctgccatggcgatcttaccgagagtcaatcctag

SEQ ID NO: 131932 - DNA, 1281 bp, Artificial Sequence
  derived and/or modified sequence
atgggccccctgcccgcccccagctgcacccagagaatcacctggaagggcctgctgctgaccgccagcctgctgaacttctggaacccccccaccaccgccgaggtgaccatcgaggcccagccccccaaggtgagcgagggcaaggacgtgctgctgctggtgcacaacctgccccagaacctgcccggctacttctggtacaagggcgagatgaccgacctgtaccactacatcatcagctacatcgtggacggcaagatcatcatctacggccccgcctacagcggcagagagaccgtgtacagcaacgccagcctgctgatccagaacgtgaccagaaaggacgccggcacctacaccctgcacatcatcaagagaggcgacgagaccagagaggagatcagacacttcaccttcaccctgtacctggagacccccaagccctacatcagcagcagcaacctgaaccccagagaggccatggaggccgtgagactgatctgcgaccccgagaccctggacgccagctacctgtggtggatgaacggccagagcctgcccgtgacccacagactgcagctgagcaagaccaacagaaccctgtacctgttcggcgtgaccaagtacatcgccggcccctacgagtgcgagatcagaaaccccgtgagcgccagcagaagcgaccccgtgaccctgaacctgctgcccaagctgcccatcccctacatcaccatcaacaacctgaaccccagagagaacaaggacgtgctggccttcacctgcgagcccaagagcgagaactacacctacatctggtggctgaacggccagagcctgcccgtgagccccggcgtgaagagacccatcgagaacagaatcctgatcctgcccagcgtgaccagaaacgagaccggcccctaccagtgcgagatcagagacagatacggcggcctgagaagcaaccccgtgatcctgaacgtgctgtacggccccgacctgcccagaatctaccccagcttcacctactacagaagcggcgagaacctggacctgagctgcttcaccgagagcaacccccccgccgagtacttctggaccatcaacggcaagttccagcagagcggccagaagctgttcatcccccagatcaccagaaaccacagcggcctgtacgcctgcagcgtgcacaacagcgccaccggcaaggagatcagcaagagcatgaccgtgaaggtgagcggcccctgccacggcgacctgaccgagagccagagctag

SEQ ID NO: 131933 - DNA, 1164 bp, Artificial Sequence
  derived and/or modified sequence
atgggccccctgcccgcccccagctgcacccagagaatcacctggaagggcctgctgctgaccgccagcctgctgaacttctggtacaagggcgagatgaccgacctgtaccactacatcatcagctacatcgtggacggcaagatcatcatctacggccccgcctacagcggcagagagaccgtgtacagcaacgccagcctgctgatccagaacgtgaccagaaaggacgccggcacctacaccctgcacatcatcaagagaggcgacgagaccagagaggagatcagacacttcaccttcaccctgtacctggagacccccaagccctacatcagcagcagcaacctgaaccccagagaggccatggaggccgtgagactgatctgcgaccccgagaccctggacgccagctacctgtggtggatgaacggccagagcctgcccgtgacccacagactgcagctgagcaagaccaacagaaccctgtacctgttcggcgtgaccaagtacatcgccggcccctacgagtgcgagatcagaaaccccgtgagcgccagcagaagcgaccccgtgaccctgaacctgctgcccaagctgcccatcccctacatcaccatcaacaacctgaaccccagagagaacaaggacgtgctggccttcacctgcgagcccaagagcgagaactacacctacatctggtggctgaacggccagagcctgcccgtgagccccggcgtgaagagacccatcgagaacagaatcctgatcctgcccagcgtgaccagaaacgagaccggcccctaccagtgcgagatcagagacagatacggcggcctgagaagcaaccccgtgatcctgaacgtgctgtacggccccgacctgcccagaatctaccccagcttcacctactacagaagcggcgagaacctggacctgagctgcttcaccgagagcaacccccccgccgagtacttctggaccatcaacggcaagttccagcagagcggccagaagctgttcatcccccagatcaccagaaaccacagcggcctgtacgcctgcagcgtgcacaacagcgccaccggcaaggagatcagcaagagcatgaccgtgaaggtgagcggcccctgccacggcgacctgaccgagagccagagctag

SEQ ID NO: 131934 - protein, 263 aa, Artificial Sequence
  derived and/or modified sequence
MFRNQYDNDVTVWSPQGRIHQIEYAMEAVKQGSATVGLKSKTHAVLVALKRAQSELAAHQKKILHVDNHIGISIAGLTADARLLCNFMRQECLDSRFVFDRPLPVSRLVSLIGSKTQIPTQRYGRRPYGVGLLIAGYDDMGPHIFQTCPSANYFDCRAMSIGARSQSARTYLERHMSEFMECNLNELVKHGLRALRETLPAEQDLTTKNVSIGIVGKDLEFTIYDDDDVSPFLEGLEERPQRKAQPAQPADEPAEKADEPMEH

SEQ ID NO: 131935 - DNA, 792 bp, Artificial Sequence
  derived and/or modified sequence
atgttcaggaaccagtacgataatgatgtcacagtatggtctcctcagggccgcatacaccaaatcgaatacgccatggaggcggttaaacaggggagtgcaaccgtcggactcaaaagcaaaacccacgcagttctggtagcactcaagagagcccagagtgaactagctgcccatcagaagaaaatcctgcacgtggataatcacatcggaatcagcatcgccggacttacagctgatgcccgattgctttgtaatttcatgcgccaggaatgcttagacagtagatttgtgttcgataggcccctgcctgtgagccgattagtgagcctgatcggcagcaaaacgcagattcccacacagagatacggcagaaggccatatggcgtcggactgctgatagccgggtatgacgatatgggcccccatatattccagacctgtccaagcgctaattattttgattgccgtgctatgtccattggcgctagatcacagagcgcgcggacctacctggaaagacatatgtctgagtttatggaatgcaatttgaatgagctggttaagcatgggctccgagcgctgcgcgaaactctccccgctgagcaagacctgacaaccaagaatgtgtctatcggcattgtgggcaaagacctcgagttcaccatctatgatgacgatgatgtctcccccttcttggagggcttggaagaaagaccacagcggaaggcccaacctgctcaaccggccgacgaacccgccgaaaaggccgatgagcccatggagcattag

SEQ ID NO: 131936 - DNA, 792 bp, Artificial Sequence
  derived and/or modified sequence
atgtttagaaatcagtacgataacgacgttactgtgtggagccctcaagggcggattcatcaaattgagtatgctatggaggcagtaaagcagggatccgcaactgttggactcaagtccaagacccacgcagtcctggttgccctgaaaagggctcagtctgagctggcagcacaccagaaaaaaatacttcacgtagacaaccatatcgggatcagcatagccggattgacagcagatgctcgcctgttatgtaattttatgcgccaggaatgtttagactctcgcttcgttttcgacaggcctcttcccgtgtctcgtctggtgtccctgatcggcagcaagactcagatcccaactcagaggtatggacgacgaccgtatggtgtaggcctgctgatagcgggttatgacgatatggggcctcacatttttcagacttgccctagcgcaaattacttcgattgtcgcgcgatgagtatcggagcccgaagccagtcagctcgcacctacctcgagcgacacatgagcgagtttatggagtgcaatctcaatgaattggttaaacatggattgcgcgcgttgagggaaaccttacctgctgagcaggatttgaccaccaaaaatgtgtccatcggcatagttgggaaggacctagaatttaccatctatgatgacgatgacgtatcgccattcttggaaggactagaagaaaggcctcaacgtaaggcccagcctgctcagcccgcggatgaaccagcagagaaggcagatgaaccaatggaacactag

SEQ ID NO: 131937 - DNA, 792 bp, Artificial Sequence
  derived and/or modified sequence
atgttcaggaaccagtatgacaatgatgtgacagtgtggagcccccagggccgcatccaccagatcgagtatgccatggaggccgtgaagcagggcagcgccaccgtgggcctgaagagcaagacccatgctgtgctggtggccctgaagagggcccagagcgagctggccgcccaccagaagaagatcctgcacgtggacaaccacatcggcatcagcattgctggcctgacagcagatgcccggctgctgtgcaacttcatgaggcaggagtgcctggacagcagatttgtgtttgaccggcccctgcctgtgtcccggctggtgtccctcatcggcagcaagacccagatccccacccagagatatggaagaagaccctacggcgtgggcctgctgattgctggctatgatgacatgggcccccacatcttccagacctgccccagcgccaactactttgactgccgggccatgagcattggagcccggagccagagcgcccggacctacctggagcggcacatgtctgagttcatggagtgcaacctgaatgagctggtgaagcacggcctgcgggccctgcgggagaccctgcctgctgagcaggacctgaccaccaagaatgtgtccatcggcatcgtgggcaaggacctggagttcaccatctatgatgatgatgatgtgagccccttcctggagggcctggaggagcggccccagaggaaggcccagcctgcccagcctgcagatgagcctgctgagaaggcagatgagcccatggagcactag

SEQ ID NO: 131938 - DNA, 792 bp, Artificial Sequence
  derived and/or modified sequence
atgttccggaaccagtacgacaacgacgtgaccgtgtggagcccccaggggcgtatccaccaaatcgaatatgccatggaagctgtgaaacaggggtcagccaccgtcgggctaaaaagcaaaacgcacgccgtgctcgtggccctcaaaagggcccagagcgagttggcagcccaccaaaagaaaatccttcatgtcgataatcatattggaatcagcatcgctgggctgaccgccgacgctcgacttctgtgtaatttcatgagacaggagtgtctcgactctaggtttgtgttcgaccgcccccttcccgtgtctcgtttagtctcattaattggctcgaagactcagatccccacgcagagatatgggagacgtccctacggcgtgggattgctgatagctggatatgacgatatgggccctcacatattccagacatgcccttccgcaaattacttcgattgtcgggctatgagtatcggcgcccgcagccaatccgctcgaacttatttggagaggcacatgtccgagttcatggagtgtaacctgaatgagctggttaagcacggtcttagggctctcagggagaccctacccgcggaacaggacctcaccactaaaaatgttagtatcggtattgtgggcaaagacctagaatttactatatatgacgacgatgatgtcagccctttcctcgagggattggaggagcgacctcagagaaaagcacagccggcccagcccgctgatgaacccgccgagaaagctgatgaacctatggaacattag

SEQ ID NO: 131939 - DNA, 792 bp, Artificial Sequence
  derived and/or modified sequence
atgttccggaaccagtacgacaacgacgtgaccgtgtggagcccccaaggtagaatccaccagatagagtacgccatggaggccgtcaagcagggatctgcgaccgtgggcttgaagtctaaaacgcacgccgtcctggtggctctaaagcgggcacagagtgagcttgctgcacatcaaaaaaagatactgcatgtcgataaccatatcggaatttcaattgcggggcttacagcagacgcccgactgctctgtaactttatgcggcaggagtgcttagattcacggtttgtgtttgacagacctcttcctgtttcaaggctggtgagccttattgggtcaaaaacccagatcccgacacagcgctatgggcgtcgcccttacggcgtgggcctccttatcgctgggtatgatgacatggggccccatatttttcagacctgtcctagcgccaactacttcgattgtcgagccatgtctataggggccaggtcccagtccgctaggacttacctggagcgtcacatgagcgagttcatggaatgtaaccttaatgagttggtcaagcatggtttaagagccctgagagagacactacccgccgagcaggatcttactacaaagaatgtcagcattggaatcgtcggcaaggatctggagttcaccatttatgatgatgacgacgtgagccccttcttggaagggctggaagagaggccccagcgtaaagcccagcctgcacaaccagctgacgagcctgccgagaaggccgatgagcccatggaacactag

SEQ ID NO: 131940 - DNA, 792 bp, Artificial Sequence
  derived and/or modified sequence
atgttcagaaaccagtatgataacgacgttaccgtctggtcaccccagggcaggattcaccagatcgaatatgccatggaggccgtgaaacagggcagtgcaactgtcggtttaaagagcaagacacatgccgtgctggtggcgctcaagagagcccagtctgagcttgccgcacaccagaaaaagatcctccacgtcgataatcacattgggatcagcattgctgggctgactgcagacgccaggctgctctgcaatttcatgaggcaggagtgcctcgattctcgtttcgtgttcgataggccgctgccggtcagcaggctggtgtctctcattgggtcaaagactcagattcctacgcagaggtatggacggaggccctacggggtcggcctactgatcgccggatacgacgacatgggaccccatatctttcagacctgtccttccgctaattactttgactgtcgcgctatgagtataggggctagaagccagtctgctaggacctacctggaacgtcatatgagcgaatttatggagtgcaatctgaatgaacttgttaaacacgggctccgggctctgcgggagactctgcctgctgagcaggatctgaccaccaaaaatgtgtcaataggaattgtaggcaaggatttagagtttaccatatatgacgatgacgatgtgagcccctttttggaagggcttgaggaacgaccacagagaaaagcccagcctgctcaacccgctgatgagccagctgaaaaagccgacgaaccaatggagcactag

SEQ ID NO: 131941 - DNA, 792 bp, Artificial Sequence
  derived and/or modified sequence
atgttcagaaatcagtatgacaacgatgtgaccgtatggagtccacagggaagaatccatcagattgagtacgctatggaggccgtcaagcaggggtcagcgacagttggattaaagtcaaagacacatgctgttctagtggctctgaaaagggcccaaagcgagctcgctgcacatcagaagaagatcctgcacgtggataaccacatcggtatttctatcgcaggacttaccgctgacgcacgcttattatgtaattttatgcggcaagaatgtttggattcccgtttcgtttttgatcgtccgctccccgtatccaggcttgtatctttgatcgggtccaagacgcaaatcccaacccaacgctatggtcgcagaccttacggcgtgggcctcctcattgccggatatgatgacatgggccctcatatcttccagacttgtccttcagctaattatttcgactgcagagccatgtccattggggctaggagccagtctgccaggacttatctggaaaggcacatgagtgaattcatggagtgtaatctgaacgagttggttaagcatggactgagagctttgcgggaaactcttcccgcagagcaagatctgactactaagaacgtttccatcggaatagtcggcaaggacctggagttcacgatctatgacgacgacgacgtgtcaccattcctggaagggctggaagagaggcctcagcggaaagctcagccggcacaacctgccgacgagcccgctgaaaaggccgacgagcccatggagcactag

SEQ ID NO: 131942 - DNA, 1107 bp, Artificial Sequence
  derived and/or modified sequence
atgtttcgaaatcagtatgacaatgatgtcactgtttggagcccccagggcaggattcatcaaattgaatatgcaatggaagctgttaaacaaggttcagccacagttggtctgaaatcaaaaactcatgcagttttggttgcattgaaaagggcgcaatcagagcttgcagctcatcagaaaaaaattctccatgttgacaaccatattggtatctcaattgcggggcttactgctgatgctagactgttatgtaattttatgcgtcaggagtgtttggattccagatttgtattcgatagaccactgcctgtgtctcgtcttgtatctctaattggaagcaagacccagataccaacacaacgatatggccggagaccatatggtgttggtctccttattgctggttatgatgatatgggccctcacattttccaaacctgtccatctgctaactattttgactgcagagccatgtccattggagcccgttcccaatcagctcgtacttacttggagagacatatgtctgaatttatggagtgtaatttaaatgaactagttaaacatggtctgcgtgccttaagagagacgcttcctgcagaacaggacctgactacaaagaatgtttccattggaattgttggtaaagacttggagtttacaatctatgatgatgatgatgtgtctccattcctggaaggtcttgaagaaagaccacagagaaaggcacagcctgctcaacctgctgatgaacctgcagaaaaggctgatgaaccaatggaacattaagtgataagccagtctatatatgtattatcaaatatgtaagaatacaggcaccacatactgatgacaataatctatactttgaaccaaaagttgcagagtggtggaatgctatgttttaggaatcagtccagatgtgagttttttccaagcaacctcactgaaacctatataatggaatacatttttctttgaaagggtctgtataatcattttctagaaagtatgggtatctatactaatgtttttatatgaagaacataggtgtctttgtggttttaaagacaactgtgaaataaaattgtttcaccgcctggt

SEQ ID NO: 131943 - DNA, 1505 bp, Artificial Sequence
  derived and/or modified sequence
agtatcacccagagtcacggctgttgactcggacgactttagatgcagcccgccagcgggagaaactggagggaatccgccatacacaggaacctagaagggctacgtgacaggggctgccccgcagctctcagccgccggcactcccagccaggttttcccgccagtctcagttcctagatcttccgaggctccgcccgccgccgagcggtcggaaagttttaaggagggggaagtgttgcaagcctatcgatatctctggaatagactgcgctaccctgcgccgccgccgtcaaactcccgcagacttctctgtagatcgctgagcgatactttcggcagcacctccttgattctcagttttgctggaggccgcaaccaggcccgcgccgccaccatgtttcgaaatcagtatgacaatgatgtcactgtttggagcccccagggcaggattcatcaaattgaatatgcaatggaagctgttaaacaaggttcagccacagttggtctgaaatcaaaaactcatgcagttttggttgcattgaaaagggcgcaatcagagcttgcagctcatcagaaaaaaattctccatgttgacaaccatattggtatctcaattgcggggcttactgctgatgctagactgttatgtaattttatgcgtcaggagtgtttggattccagatttgtattcgatagaccactgcctgtgtctcgtcttgtatctctaattggaagcaagacccagataccaacacaacgatatggccggagaccatatggtgttggtctccttattgctggttatgatgatatgggccctcacattttccaaacctgtccatctgctaactattttgactgcagagccatgtccattggagcccgttcccaatcagctcgtacttacttggagagacatatgtctgaatttatggagtgtaatttaaatgaactagttaaacatggtctgcgtgccttaagagagacgcttcctgcagaacaggacctgactacaaagaatgtttccattggaattgttggtaaagacttggagtttacaatctatgatgatgatgatgtgtctccattcctggaaggtcttgaagaaagaccacagagaaaggcacagcctgctcaacctgctgatgaacctgcagaaaaggctgatgaaccaatggaacattaagtgataagccagtctatatatgtattatcaaatatgtaagaatacaggcaccacatactgatgacaataatctatactttgaaccaaaagttgcagagtggtggaatgctatgttttaggaatcagtccagatgtgagttttttccaagcaacctcactgaaacctatataatggaatacatttttctttgaaagggtctgtataatcattttctagaaagtatgggtatctatactaatgtttttatatgaagaacataggtgtctttgtggttttaaagacaactgtgaaataaaattgtttcaccgcctggta

SEQ ID NO: 131944 - DNA, 1221 bp, Artificial Sequence
  derived and/or modified sequence
attctcagttttgctggaggccgcaaccaggcccgcgccgccaccatgtttcgaaatcagtatgacaatgatgtcactgtttggagcccccagggcaggattcatcaaattgaatatgcaatggaagctgttaaacaaggttcagccacagttggtctgaaatcaaaaactcatgcagttttggttgcattgaaaagggcgcaatcagagcttgcagctcatcagaaaaaaattctccatgttgacaaccatattggtatctcaattgcggggcttactgctgatgctagactgttatgtaattttatgcgtcaggagtgtttggattccagatttgtattcgatagaccactgcctgtgtctcgtcttgtatctctaattggaagcagtatcctttttatgatatgggccctcacattttccaaacctgtccatctgctaactattttgactgcagagccatgtccattggagcccgttcccaatcagctcgtacttacttggagagacatatgtctgaatttatggagtgtaatttaaatgaactagttaaacatggtctgcgtgccttaagagagacgcttcctgcagaacaggacctgactacaaagaatgtttccattggaattgttggtaaagacttggagtttacaatctatgatgatgatgatgtgtctccattcctggaaggtcttgaagaaagaccacagagaaaggcacagcctgctcaacctgctgatgaacctgcagaaaaggctgatgaaccaatggaacattaagtgataagccagtctatatatgtattatcaaatatattttctggcatccttaaatcttgtgtcaaggattggttataatataaccagaaaccatgacggcggctgagaacgtatgctacacgttaattaacgtgccaatggattcagaaccaccatctgaaattagcttaaaaaatgatctagaaaaaggagatgtaaagtcaaagactgaagctttgaagaaagtaatcattatgattctgaatggtgaaaaacttcctggacttctgatgaccatcattcgttttgtgctacctcttcaggatcacactatcaagaaattacttctggtattttgggaaattgttcctaaaacaactccagatgggagacttttacatgagatgatccttgtatgtgatgcatacagaaaggatcttcaacatcctaatgaatttattcg

SEQ ID NO: 131945 - DNA, 792 bp, Artificial Sequence
  derived and/or modified sequence
atgttcagaaaccagtacgacaacgacgtgaccgtgtggagcccccagggcagaatccaccagatcgagtacgccatggaggccgtgaagcagggcagcgccaccgtgggcctgaagagcaagacccacgccgtgctggtggccctgaagagagcccagagcgagctggccgcccaccagaagaagatcctgcacgtggacaaccacatcggcatcagcatcgccggcctgaccgccgacgccagactgctgtgcaacttcatgagacaggagtgcctggacagcagattcgtgttcgacagacccctgcccgtgagcagactggtgagcctgatcggcagcaagacccagatccccacccagagatacggcagaagaccctacggcgtgggcctgctgatcgccggctacgacgacatgggcccccacatcttccagacctgccccagcgccaactacttcgactgcagagccatgagcatcggcgccagaagccagagcgccagaacctacctggagagacacatgagcgagttcatggagtgcaacctgaacgagctggtgaagcacggcctgagagccctgagagagaccctgcccgccgagcaggacctgaccaccaagaacgtgagcatcggcatcgtgggcaaggacctggagttcaccatctacgacgacgacgacgtgagccccttcctggagggcctggaggagagaccccagagaaaggcccagcccgcccagcccgccgacgagcccgccgagaaggccgacgagcccatggagcactag

SEQ ID NO: 131946 - protein, 234 aa, Artificial Sequence
  derived and/or modified sequence
MAERGYSFSLTTFSPSGKLVQIEYALAAVAGGAPSVGIKAANGVVLATEKKQKSILYDERSVHKVEPITKHIGLVYSGMGPDYRVLVHRARKLAQQYYLVYQEPIPTAQLVQRVASVMQEYTQSGGVRPFGVSLLICGWNEGRPYLFQSDPSGAYFAWKATAMGKNYVNGKTFLEKRYNEDLELEDAIHTAILTLKESFEGQMTEDNIEVGICNEAGFRRLTPTEVKDYLAAIA

SEQ ID NO: 131947 - protein, 99 aa, Artificial Sequence
  derived and/or modified sequence
MGPDYRVLVHRARKLAQQYYLVYQEPIPTAQLVQRVASVMQEYTQSGGVRPFGVSLLICGWNEGRPYLFQSDPSGAYFAWKATAMGKNYVNGKTFLEKR

SEQ ID NO: 131948 - DNA, 705 bp, Artificial Sequence
  derived and/or modified sequence
atggccgagcgtggttacagcttcagccttacaacctttagcccatctggtaaactggtccagattgagtatgctctcgcggccgtcgcgggtggggcccccagtgtgggaattaaggcagccaacggtgtggtgctggcgactgagaagaaacaaaaaagcatcctgtacgacgaacgctccgtgcataaagtagagcccatcacgaaacacataggcttggtgtactctggaatgggccctgactacagagtactggtgcatcgggcccgcaagctggctcagcagtattacttggtctatcaggagcccattcctacggcccagctagtccaaagggtggcaagcgtaatgcaggaatatacacagtccggcggtgtgaggcctttcggcgtcagtctgttgatttgcggctggaatgagggcagaccgtacttgtttcagtctgaccctagcggcgcttatttcgcctggaaagccacagcgatggggaaaaactacgtcaatggcaaaacattccttgaaaagagatataacgaggatctggagttagaagatgctatccatactgctatccttacactaaaggaaagctttgagggccagatgactgaggataacattgaggtaggaatttgcaacgaggccggattccggcgccttacacctaccgaagttaaggattacctggccgccatcgcatag

SEQ ID NO: 131949 - DNA, 300 bp, Artificial Sequence
  derived and/or modified sequence
atgggaccagattatagggtgctcgtacatagagcaagaaagttggcgcagcagtactatcttgtgtaccaggagcccattccgactgcacagttggtccagcgtgtggctagtgttatgcaggagtatactcagtctggcggagttaggccctttggtgtttcattgttgatctgcggatggaacgaagggcgcccgtacctattccagtccgatccgtccggcgcgtactttgcttggaaagccacagccatgggaaaaaactatgttaatggaaagacttttctggagaagaggtag

SEQ ID NO: 131950 - DNA, 705 bp, Artificial Sequence
  derived and/or modified sequence
atggccgagcggggctacagcttcagcctgaccaccttcagccccagcggcaagctggtgcagatcgagtatgccctggccgctgtggccggcggggcccccagcgtgggcatcaaggccgccaacggggtggtgctggccacagagaagaagcagaagagcatcctgtatgatgagaggtctgtgcacaaggtggagcccatcaccaagcacatcggcctggtgtacagcggcatgggccctgactacagagtgctggtgcaccgggccaggaagctggcccagcagtactacctggtgtaccaggagcccatccccacagcccagctggtgcagagggtggcctctgtgatgcaggagtacacccagagcggcggcgtgcggcccttcggcgtgtccctgctgatctgtggctggaatgaaggccggccctacctgttccagagcgaccccagcggggcctactttgcctggaaggccacagccatgggcaagaactacgtgaatggcaagaccttcctggagaagcgctacaatgaagacctggagctggaggatgccatccacacagccatcctgaccctgaaggagagctttgagggccagatgacagaggacaacatcgaggtgggcatctgcaatgaggccggcttccggcggctgacccccacagaggtgaaggactacctggccgccatcgcctag

SEQ ID NO: 131951 - DNA, 300 bp, Artificial Sequence
  derived and/or modified sequence
atgggccctgactacagagtgctggtgcaccgggccaggaagctggcccagcagtactacctggtgtaccaggagcccatccccacagcccagctggtgcagagggtggcctctgtgatgcaggagtacacccagagcggcggcgtgcggcccttcggcgtgtccctgctgatctgtggctggaatgaaggccggccctacctgttccagagcgaccccagcggggcctactttgcctggaaggccacagccatgggcaagaactacgtgaatggcaagaccttcctggagaagaggtag

SEQ ID NO: 131952 - DNA, 705 bp, Artificial Sequence
  derived and/or modified sequence
atggccgagcggggctacagcttcagcctgaccaccttcagcccctccggcaaattggtccagattgaatatgccctagcagcggttgctggtggagcaccttccgtcggtatcaaagcagcaaacggcgtcgtgcttgctacagagaagaaacaaaagtcgatcttatacgatgaacgatctgttcacaaagtcgagcctattactaagcacatcgggctcgtctattctggcatgggacccgactatagagtgctggtccatagggcccggaagctggcccagcagtattatctggtttaccaggaaccaatccccacagctcagcttgtgcagcgtgtggcctccgttatgcaagagtacactcagtcagggggagtgagaccatttggggtcagtttgctcatatgtggctggaatgagggccggccgtacctctttcagtccgacccttctggggcctacttcgcctggaaagccacggcgatggggaagaactatgtgaacgggaagacattcttagagaaacgctacaacgaggacttggaactcgaggacgccatccacactgctatcctcactctgaaggaatcttttgaagggcagatgaccgaggacaacatcgaagttggcatttgtaacgaggctggattcaggcggttgactccaacagaagtaaaagactaccttgcagccatagcatag

SEQ ID NO: 131953 - DNA, 300 bp, Artificial Sequence
  derived and/or modified sequence
atgggccccgactaccgggtgctggtgcaccgggcccggaagctggcccaacagtattatcttgtctaccaggagccgataccaacggctcagctggtgcaacgtgtggccagcgtgatgcaggagtacacacagtctgggggcgtgagaccttttggagtaagcttgttgatttgtggctggaacgaaggccgcccctaccttttccagtcagatcctagcggtgcgtactttgcatggaaagcgactgctatgggtaagaattatgtgaatgggaaaacttttcttgagaaaaggtag

SEQ ID NO: 131954 - DNA, 705 bp, Artificial Sequence
  derived and/or modified sequence
atggccgagagaggttactccttcagtctaaccacgttctcccctagcggaaaactggttcagattgagtacgccctcgctgctgtcgccggtggcgcaccgagcgtgggcatcaaggcggcaaatggagtcgtactagcaactgagaagaagcagaagtccattctctatgatgagcgctctgtgcacaaggtcgagcccattaccaagcatatcggactagtgtacagtggaatggggccagattacagggtgcttgtacatagagcccgaaagttggcccagcaatactacctcgtgtatcaggagcctattcccaccgcccaactcgtccagcgggtcgccagcgtgatgcaggagtacacacagtctggaggtgtccggccattcggggtgagcttgctgatttgcggctggaatgaagggcgaccttacctgtttcaatcggacccgagtggagcatattttgcgtggaaagcaactgctatgggcaagaattatgttaacgggaagacgttcttagagaagcgctacaatgaggaccttgaattggaggatgccatccatacagccatactgactctcaaagaaagtttcgaaggacagatgaccgaggataacatcgaggtcgggatctgcaatgaagcaggatttaggcgactgaccccaaccgaggtgaaggattatcttgcagctatcgcatag

SEQ ID NO: 131955 - DNA, 300 bp, Artificial Sequence
  derived and/or modified sequence
atgggacctgattaccgggttttggtgcaccgtgctagaaaacttgcccagcagtactacctggtctaccaggaacctattcctacggcccaactcgtgcagcgcgtcgctagcgtcatgcaggagtatacccagtctgggggagtgcgaccatttggcgtgagcctgctgatctgtggctggaatgagggtagaccttacttgtttcagagcgacccaagcggcgcttacttcgcctggaaggcaactgccatgggaaagaattatgtcaacggcaaaaccttcttggagaagcggtag

SEQ ID NO: 131956 - DNA, 1483 bp, Artificial Sequence
  derived and/or modified sequence
ggaaatgaaaggaaatcggccacagtgcgcatgtgtgcggctgtgctttggctcttcgggtaaagatggcggagcgcgggtacagcttttcgctgactacattcagcccgtctggtaaacttgtccagattgaatatgctttggctgctgtagctggaggagccccgtccgtgggaattaaagctgcaaatggtgtggtattagcaactgagaaaaaacagaaatccattctgtatgatgagcgaagtgtacacaaagtagaaccaattaccaagcatataggtttggtgtacagtggcatgggccccgattacagagtgcttgtgcacagagctcgaaaactagctcaacaatactatcttgtgtaccaagaacccattcctacagctcagctggtacagagagtagcttctgtgatgcaagaatatactcagtcaggtggtgttcgtccatttggagtttctttacttatttgtggttggaatgagggacgaccatatttatttcagtcagatccatctggagcttactttgcctggaaagctacagcaatgggaaagaactatgtgaatgggaagactttccttgagaaaagatataatgaagatctggaacttgaagatgccattcatacagccatcttaaccctaaaggaaagctttgaagggcaaatgacagaggataacatagaagttggaatctgcaatgaagctggatttaggaggcttactccaactgaagttaaggattacttggctgccatagcataacaatgaagtgactgaaaaatccagaatttcagataatctatctacttaaacatgtttaaagtatgttttgttttgcagactttttgcatacttatttctacatggtttaaatcgactgtttttaaaatgacacttataaatcctaataaactgttaaacccaccttccagccttttaggagttgctaaaattttaacagttatttcctgctttttatcacagttgatttctgaagactacattgccaagcagaatgatgaaatgactttttcgttgtcaggcaattttggttaagtcaaatcttaatgccctcttcgctatcagatgttgcctgtgtttccataaagcaaaatgctgattttggtaaaaaacatgactgcttctagagctgggaggatctgcagactttcacggattcatggaacaagaaaagaagcataggtacttttaggtgccattaggtattgatcagtgaaatcctagggtgctctatgagattgtactaggcctatgaagagtggtaagccaaataggtctccatgggagatacattatgtaaataaataaacaatggtttgctggttcctgttggtgtctccacaagtaggtaaacatgtttaaaggaacccgggttcttagattttgttagactttttaaactcaaggatgagcataagtgcttgaaataaaatgctaatacttaagtgtcaaaa

SEQ ID NO: 131957 - DNA, 705 bp, Artificial Sequence
  derived and/or modified sequence
atggccgagagaggctacagcttcagcctgaccaccttcagccccagcggcaagctggtgcagatcgagtacgccctggccgccgtggccggcggcgcccccagcgtgggcatcaaggccgccaacggcgtggtgctggccaccgagaagaagcagaagagcatcctgtacgacgagagaagcgtgcacaaggtggagcccatcaccaagcacatcggcctggtgtacagcggcatgggccccgactacagagtgctggtgcacagagccagaaagctggcccagcagtactacctggtgtaccaggagcccatccccaccgcccagctggtgcagagagtggccagcgtgatgcaggagtacacccagagcggcggcgtgagacccttcggcgtgagcctgctgatctgcggctggaacgagggcagaccctacctgttccagagcgaccccagcggcgcctacttcgcctggaaggccaccgccatgggcaagaactacgtgaacggcaagaccttcctggagaagagatacaacgaggacctggagctggaggacgccatccacaccgccatcctgaccctgaaggagagcttcgagggccagatgaccgaggacaacatcgaggtgggcatctgcaacgaggccggcttcagaagactgacccccaccgaggtgaaggactacctggccgccatcgcctag

SEQ ID NO: 131958 - DNA, 300 bp, Artificial Sequence
  derived and/or modified sequence
atgggccccgactacagagtgctggtgcacagagccagaaagctggcccagcagtactacctggtgtaccaggagcccatccccaccgcccagctggtgcagagagtggccagcgtgatgcaggagtacacccagagcggcggcgtgagacccttcggcgtgagcctgctgatctgcggctggaacgagggcagaccctacctgttccagagcgaccccagcggcgcctacttcgcctggaaggccaccgccatgggcaagaactacgtgaacggcaagaccttcctggagaagagatag

SEQ ID NO: 131959 - protein, 255 aa, Artificial Sequence
  derived and/or modified sequence
MSSIGTGYDLSASTFSPDGRVFQVEYAMKAVENSSTAIGIRCKDGVVFGVEKLVLSKLYEEGSNKRLFNVDRHVGMAVAGLLADARSLADIAREEASNFRSNFGYNIPLKHLADRVAMYVHAYTLYSAVRPFGCSFMLGSYSVNDGAQLYMIDPSGVSYGYWGCAIGKARQAAKTEIEKLQMKEMTCRDIVKEVAKIIYIVHDEVKDKAFELELSWVGELTNGRHEIVPKDIREEAEKYAKESLKEEDESDDDNM

SEQ ID NO: 131960 - DNA, 768 bp, Artificial Sequence
  derived and/or modified sequence
atgtcttctatcggcaccgggtatgatttaagtgcttccaccttcagccctgacggacgagtttttcaggtggaatacgccatgaaggccgtggagaactcttccacagccatcggcattcgctgtaaggacggcgtggtattcggcgttgaaaaacttgtcttgtccaagttatacgaggagggaagcaacaaacggctttttaacgtggaccgccacgtcggcatggcggtggccggactcttggccgacgcacgcagtctggccgacatagcccgcgaagaagcatctaattttagaagcaatttcggatataacatcccactcaaacacctggcggaccgagtggcaatgtacgtccacgcgtatacgctgtattctgccgttaggcctttcggatgttctttcatgttaggatcgtatagcgtgaatgatggcgcgcagctttacatgatagatccatctggtgtttcttatgggtactggggttgtgccatcggcaaagccaggcaggcagcaaagacggagatcgagaagctgcagatgaaggaaatgacttgccgcgatatcgttaaagaagttgccaagatcatctacattgtccacgacgaagtcaaagacaaagcctttgaactggaactgtcatgggtgggggagctcaccaatggtagacacgagatagtgccgaaggacatccgcgaggaggcggagaagtatgctaaagaatctctgaaagaggaggatgaatcagatgacgacaacatgtag

SEQ ID NO: 131961 - DNA, 768 bp, Artificial Sequence
  derived and/or modified sequence
atgagcagcatcggcaccggctatgacctgagcgccagcaccttctccccagatggccgggtcttccaggtggagtatgccatgaaggctgtggagaacagcagcacagccatcggcatccgctgcaaggatggagtggtgtttggagtggagaagctggtgctgagcaagctgtatgaggagggcagcaacaagaggctcttcaacgtggacagacatgtgggcatggctgtggccggcctgctggctgatgcccggagcctggccgacatcgcccgggaggaggccagcaacttccgcagcaactttggctacaacatccccctgaagcacctggccgacagagtggccatgtatgtgcacgcctacaccctgtacagcgctgtgcggcccttcggctgcagcttcatgctgggcagctacagcgtgaatgatggagcccagctgtacatgattgaccccagcggcgtgtcctatggctactggggctgtgccatcggcaaggcccggcaggccgccaagacagaaattgagaagctgcagatgaaggagatgacctgccgggacatcgtgaaggaggtggccaagatcatctacatcgtgcatgatgaggtgaaggacaaggcctttgagctggagctgtcctgggtgggggagctgaccaacggcagacatgaaattgtgcccaaggacatccgggaggaggccgagaagtatgccaaggagagcctgaaggaggaggatgaaagtgatgatgacaacatgtag

SEQ ID NO: 131962 - DNA, 768 bp, Artificial Sequence
  derived and/or modified sequence
atgagcagcatcggcaccggctacgacctgagcgccagcaccttctctcccgatggacgcgtcttccaggtggaatacgcgatgaaggctgtggagaattcaagcaccgcaatcggaatacgatgtaaggacggcgtggtgttcggggtggaaaaactggttctgagcaagctgtacgaggaaggtagtaataagcgattatttaatgtcgatcgccacgttgggatggctgtggccgggctcctggccgatgcgcgatctcttgctgacatcgcaagagaagaggccagcaattttcgatccaactttggctacaatattcctctaaagcatctcgcagaccgggtggccatgtacgtgcacgcttacactctctatagcgccgttaggcccttcggatgtagcttcatgttgggatcttatagcgtgaatgacggagcccaactatacatgatcgacccatcaggcgtgagttacggctattgggggtgtgcaatcggaaaagccagacaagcagctaagactgagattgagaaactgcagatgaaagagatgacatgccgagacattgtaaaggaagtcgccaagatcatttatatcgtgcatgatgaggttaaggacaaagctttcgaactcgagcttagctgggtgggcgagctcacgaatggacggcacgagattgttccgaaagatatcagggaggaggccgaaaagtacgcaaaggaaagcttgaaggaggaggatgagtctgatgatgataacatgtag

SEQ ID NO: 131963 - DNA, 768 bp, Artificial Sequence
  derived and/or modified sequence
atgtcttctatcggtactggatacgatcttagtgccagtacattcagccccgacggtcgtgtgttccaggtagagtacgcaatgaaggctgtagaaaactcctctacggccatcggaatcagatgtaaagatggtgtggttttcggcgtagagaaattagtcctgagcaagttgtatgaggaaggctcgaataagcgcttgttcaacgtggaccgccacgtgggcatggccgtcgctgggctattagcagacgccagaagcctcgcggacatcgctcgtgaagaggcctccaacttcaggagcaactttggctacaacattccacttaagcaccttgcagatcgagtggccatgtatgtccatgcctatacactttactccgcggtcaggccctttggctgctcttttatgttgggcagctactcagtcaacgatggagcacagctctacatgatcgatccctccggcgtgtcttacggctattggggttgcgccatcggtaaggctaggcaagccgctaagacggaaatagaaaaactccagatgaaggagatgacatgcagagacatcgttaaagaagtggccaaaattatatacattgtccatgatgaagtgaaggataaagcttttgaactggaactgagctgggtcggcgagctgaccaatgggagacacgagattgtgccaaaggatattcgcgaagaggccgaaaaatacgctaaggagtcactcaaggaggaagacgagtccgacgatgataatatgtag

SEQ ID NO: 131964 - DNA, 970 bp, Artificial Sequence
  derived and/or modified sequence
agcgggcctgttactagtttgcggcatcctgtggtataggggaagcgctccgggcctggaatccctacgcgtccctttgggtttagcacgatgagctcaatcggcactgggtatgacctgtcagcctctacattctctcctgacggaagagtttttcaagttgaatatgctatgaaggctgtggaaaatagtagtacagctattggaatcagatgcaaagatggtgttgtctttggggtagaaaaattagtcctttctaaactttatgaagaaggttccaacaaaagactttttaatgttgatcggcatgttggaatggcagtagcaggtttgttggcagatgctcgttctttagcagacatagcaagagaagaagcttccaacttcagatctaactttggctacaacattccactaaaacatcttgcagacagagtggccatgtatgtgcatgcatatacactctacagtgctgttagaccttttggctgcagtttcatgttagggtcttacagtgtgaatgacggtgcgcaactctacatgattgacccatcaggtgtttcatacggttattggggctgtgccatcggcaaagccaggcaagctgcaaagacggaaatagagaagcttcagatgaaagaaatgacctgccgtgatatcgttaaagaagttgcaaaaataatttacatagtacatgacgaagttaaggataaagcttttgaactagaactcagctgggttggtgaattaactaatggaagacatgaaattgttccaaaagatataagagaagaagcagagaaatatgctaaggaatctctgaaggaagaagatgaatcagatgatgataatatgtaacatttactccagcatctattgtattttaaatttctactccagtccaatgtaactatttagccctggattatacatactgtccaattttcattaaatttttgtcttataacta

SEQ ID NO: 131965 - DNA, 768 bp, Artificial Sequence
  derived and/or modified sequence
atgagcagcatcggcaccggctacgacctgagcgccagcaccttcagccccgacggcagagtgttccaggtggagtacgccatgaaggccgtggagaacagcagcaccgccatcggcatcagatgcaaggacggcgtggtgttcggcgtggagaagctggtgctgagcaagctgtacgaggagggcagcaacaagagactgttcaacgtggacagacacgtgggcatggccgtggccggcctgctggccgacgccagaagcctggccgacatcgccagagaggaggccagcaacttcagaagcaacttcggctacaacatccccctgaagcacctggccgacagagtggccatgtacgtgcacgcctacaccctgtacagcgccgtgagacccttcggctgcagcttcatgctgggcagctacagcgtgaacgacggcgcccagctgtacatgatcgaccccagcggcgtgagctacggctactggggctgcgccatcggcaaggccagacaggccgccaagaccgagatcgagaagctgcagatgaaggagatgacctgcagagacatcgtgaaggaggtggccaagatcatctacatcgtgcacgacgaggtgaaggacaaggccttcgagctggagctgagctgggtgggcgagctgaccaacggcagacacgagatcgtgcccaaggacatcagagaggaggccgagaagtacgccaaggagagcctgaaggaggaggacgagagcgacgacgacaacatgtag

SEQ ID NO: 131966 - protein, 246 aa, Artificial Sequence
  derived and/or modified sequence
MSRGSSAGFDRHITIFSPEGRLYQVEYAFKAINQGGLTSVAVRGKDCAVIVTQKKVPDKLLDSSTVTHLFKITENIGCVMTGMTADSRSQVQRARYEAANWKYKYGYEIPVDMLCKRIADISQVYTQNAEMRPLGCCMILIGIDEEQGPQVYKCDPAGYYCGFKATAAGVKQTESTSFLEKKVKKKFDWTFEQTVETAITCLSTVLSIDFKPSEIEVGVVTVENPKFRILTEAEIDAHLVALAERD

SEQ ID NO: 131967 - protein, 252 aa, Artificial Sequence
  derived and/or modified sequence
MSRGSSAGFDRHITIFSPEGRLYQVEYAFKAINQGGLTSVAVRGKDCAVIVTQKKVPDKLLDSSTVTHLFKITENIGCVMTGMTADSRSQVQRARYEAANWKYKYGYEIPVDMLCKRIADISQVYTQNAEMRPLGCWSFLFLGMILIGIDEEQGPQVYKCDPAGYYCGFKATAAGVKQTESTSFLEKKVKKKFDWTFEQTVETAITCLSTVLSIDFKPSEIEVGVVTVENPKFRILTEAEIDAHLVALAERD

SEQ ID NO: 131968 - protein, 107 aa, Artificial Sequence
  derived and/or modified sequence
MSRGSSAGFDRHITIFSPEGRLYQVEYAFKAINQGGLTSVAVRGKDCAVIVTQKKVPDKLLDSSTVTHLFKITENIGCVMTGMTVSLCRPGCSASWVQAILVPQPPR

SEQ ID NO: 131969 - protein, 148 aa, Artificial Sequence
  derived and/or modified sequence
MSRGSSAGFDRHITIFSPEGRLYQVEYAFKAINQGGLTSVAVRGKDCAVIVTQKKVPDKLLDSSTVTHLFKITENIGCVMTGMTADSRSQVQRARYEAANWKYKYGYEIPVDMLCKRIADISQVYTQNAEMRPLGCYCNYMPVYCSIN

SEQ ID NO: 131970 - protein, 203 aa, Artificial Sequence
  derived and/or modified sequence
MSRGSSAGFDRHITIFSPEGRLYQVEYAFKAINQGGLTSVAVRGKDCAVIVTQKKVPDKLLDSSTVTHLFKITENIGCVMTGMTADSRSQVQRARYEAANWKYKYGYEIPVDMLCKRIADISQVYTQNAEMRPLGCCMILIGIDEEQGPQVYKCDPAGYYCGFKATAAGVKQTESTSFLEKKVKKKFDWTFEQTVEDSYRSRD

SEQ ID NO: 131971 - DNA, 741 bp, Artificial Sequence
  derived and/or modified sequence
atgagcagaggatcttccgctggattcgatcggcatatcacgatattcagtccggaagggcgcttgtaccaggtcgaatacgcattcaaagccatcaatcagggaggtttgacatctgtggctgtgcggggtaaggattgtgccgtcatcgttactcagaagaaggtccctgataagttacttgactctagcacagtaactcacctgtttaagattactgaaaatatcggttgtgttatgactgggatgactgcagatagccgctcacaggttcagcgcgctcgatatgaggccgccaactggaaatacaaatatggatacgagattcccgttgatatgctctgcaagcgtatcgctgatattagccaagtttacacacagaatgcagagatgaggcctttaggatgctgtatgatcctaatcggaatcgacgaggaacaaggaccacaagtatacaagtgcgacccggccggctactattgtggattcaaagccaccgcagcaggagtgaaacagaccgaaagcacctccttcttggaaaagaaggtgaaaaagaagtttgactggaccttcgagcagaccgtggagaccgctatcacctgcctctccacagtgcttagtatcgattttaaaccctccgagattgaggtgggcgtggttaccgtggagaaccccaagttccgaattctgactgaagcagaaattgatgcacacctggtggcacttgccgaaagggactag

SEQ ID NO: 131972 - DNA, 759 bp, Artificial Sequence
  derived and/or modified sequence
atgtctaggggaagttcagctggcttcgatcgacatattactattttctctcctgagggccgcttgtaccaagtcgaatacgctttcaaggccatcaaccagggcggcctgacgtccgtggccgtgcgcggcaaagactgcgcagtaatagtgacacagaagaaggttcccgataagctgctggacagcagcacagttacccatctattcaagatcaccgagaacattggatgtgtgatgaccggcatgaccgctgatagccggtctcaggtccagcgagctcgatatgaggccgccaactggaaatataagtatggatacgagatcccggtcgacatgctatgcaagcgcatcgctgacatttcccaggtgtatacccaaaacgcggaaatgagacctttaggctgctggtcattcctttttctaggcatgattcttatcggcatcgatgaggagcagggtccacaggtgtataaatgtgatcctgccgggtactactgtggatttaaggctaccgccgcgggggtgaagcagaccgaatctacttcttttctggagaaaaaagtgaagaaaaaattcgattggactttcgagcaaacagtggagactgccatcacctgtctctcgacagtactgtcgatcgacttcaagcccagtgagattgaggtcggagtggtaactgtggaaaaccctaagtttagaatcctgacagaagccgaaattgacgcccacttggtggccctggctgaacgcgattag

SEQ ID NO: 131973 - DNA, 324 bp, Artificial Sequence
  derived and/or modified sequence
atgagccgggggagctcagcagggtttgataggcacattaccatcttcagtcctgaaggccggctctatcaggttgagtacgctttcaaggcaatcaatcagggcggcctgaccagcgtcgctgtgcgcgggaaggattgtgctgtgatcgtcacccagaaaaaggtgcccgataaactactggacagcagtaccgtcactcaccttttcaagatcaccgagaacattggatgtgtaatgactggcatgacggtgtccttgtgccgtcccggttgctcggccagctgggtccaggcgatcctagtcccgcaaccccccagatag

SEQ ID NO: 131974 - DNA, 447 bp, Artificial Sequence
  derived and/or modified sequence
atgtctcgcggttcctccgctgggttcgaccggcacatcaccattttcagtcctgaagggaggctctaccaggttgagtacgctttcaaggccataaaccagggggggttgacaagcgtggccgtgaggggcaaagattgcgctgtgatagtgacccagaagaaagtcccagataaacttctcgattccagcactgtaacccatttatttaaaatcaccgaaaatattggttgtgtgatgaccggcatgaccgctgattctcgcagccaggttcagagagcacgctacgaagctgccaattggaaatacaaatatggctacgagatccccgtcgacatgctgtgtaagcggatcgctgacatctcacaggtctatacccagaacgctgagatgcggcccctgggttgctattgtaactatatgcctgtatactgctcgattaattag

SEQ ID NO: 131975 - DNA, 612 bp, Artificial Sequence
  derived and/or modified sequence
atgagtcgtggaagctccgctgggtttgacaggcatattaccattttttcacccgaagggcggctgtaccaggttgagtacgccttcaaggccatcaatcaggggggcctgacgagtgtcgctgtgcggggtaaggattgcgccgttattgttacccagaaaaaagtacccgataaactgctcgactcgtccacagtgacgcacctgtttaaaattacagaaaacataggctgtgtaatgactggtatgaccgctgattcacggagccaggtacagcgtgctcggtacgaagctgcaaactggaagtacaaatatggatatgagattccggtggatatgctttgcaagcgcatcgccgacatctcccaagtctacacccagaacgccgaaatgcggccgcttggttgttgtatgatactcattggaattgacgaggagcaaggtccgcaggtctacaagtgcgatccggcaggatattactgtgggtttaaagctacggccgcaggtgtgaaacagactgagagtacctccttcctcgagaagaaagtaaaaaaaaaatttgattggaccttcgagcagacagttgaggactcttacaggagtagggactag

SEQ ID NO: 131976 - DNA, 741 bp, Artificial Sequence
  derived and/or modified sequence
atgagccggggcagcagcgctggctttgacagacacatcaccatcttcagccctgagggccgcctgtaccaggtggagtatgccttcaaggccatcaaccagggcggcctgacctctgtggccgtgcggggcaaggactgtgccgtcatcgtgacccagaagaaggtgcctgacaagctgctggacagcagcacagtgacccacctgttcaagatcacagagaacatcggctgtgtgatgacaggcatgacagctgacagccgcagccaggtgcagagggcccgctatgaggccgccaactggaagtacaagtatggctatgagatccctgtggacatgctgtgcaagagaattgctgacatcagccaggtgtacacccagaatgctgagatgaggcccctgggctgctgcatgatcctgattggaattgatgaggagcagggcccccaggtgtacaagtgtgaccctgctggctactactgcggcttcaaggccacagctgctggggtgaagcagacagagagcaccagcttcctggagaagaaggtgaagaagaagtttgactggacctttgagcagacagtggagacagccatcacctgcctgagcacagtgctgagcattgacttcaagcccagcgagattgaggtgggcgtggtgacagtggagaaccccaagttccgcatcctgacagaagctgagattgatgcccacctggtggccctggccgagcgggactag

SEQ ID NO: 131977 - DNA, 759 bp, Artificial Sequence
  derived and/or modified sequence
atgagccggggcagcagcgctggctttgacagacacatcaccatcttcagccctgagggccgcctgtaccaggtggagtatgccttcaaggccatcaaccagggcggcctgacctctgtggccgtgcggggcaaggactgtgccgtcatcgtgacccagaagaaggtgcctgacaagctgctggacagcagcacagtgacccacctgttcaagatcacagagaacatcggctgtgtgatgacaggcatgacagctgacagccgcagccaggtgcagagggcccgctatgaggccgccaactggaagtacaagtatggctatgagatccctgtggacatgctgtgcaagagaattgctgacatcagccaggtgtacacccagaatgctgagatgaggcccctgggctgctggagcttcctgttcctgggcatgatcctgattggaattgatgaggagcagggcccccaggtgtacaagtgtgaccctgctggctactactgcggcttcaaggccacagctgctggggtgaagcagacagagagcaccagcttcctggagaagaaggtgaagaagaagtttgactggacctttgagcagacagtggagacagccatcacctgcctgagcacagtgctgagcattgacttcaagcccagcgagattgaggtgggcgtggtgacagtggagaaccccaagttccgcatcctgacagaagctgagattgatgcccacctggtggccctggccgagcgggactag

SEQ ID NO: 131978 - DNA, 324 bp, Artificial Sequence
  derived and/or modified sequence
atgagccggggcagcagcgctggctttgacagacacatcaccatcttcagccctgagggccgcctgtaccaggtggagtatgccttcaaggccatcaaccagggcggcctgacctctgtggccgtgcggggcaaggactgtgccgtcatcgtgacccagaagaaggtgcctgacaagctgctggacagcagcacagtgacccacctgttcaagatcacagagaacatcggctgtgtgatgacaggcatgacagtgtccctgtgccggcccggctgcagcgcctcctgggtgcaggccatcctggtgccccagcccccaagatag

SEQ ID NO: 131979 - DNA, 447 bp, Artificial Sequence
  derived and/or modified sequence
atgagccggggcagcagcgctggctttgacagacacatcaccatcttcagccctgagggccgcctgtaccaggtggagtatgccttcaaggccatcaaccagggcggcctgacctctgtggccgtgcggggcaaggactgtgccgtcatcgtgacccagaagaaggtgcctgacaagctgctggacagcagcacagtgacccacctgttcaagatcacagagaacatcggctgtgtgatgacaggcatgacagctgacagccgcagccaggtgcagagggcccgctatgaggccgccaactggaagtacaagtatggctatgagatccctgtggacatgctgtgcaagagaattgctgacatcagccaggtgtacacccagaatgctgagatgaggcccctgggctgctactgcaactacatgcctgtgtactgcagcatcaactag

SEQ ID NO: 131980 - DNA, 612 bp, Artificial Sequence
  derived and/or modified sequence
atgagccggggcagcagcgctggctttgacagacacatcaccatcttcagccctgagggccgcctgtaccaggtggagtatgccttcaaggccatcaaccagggcggcctgacctctgtggccgtgcggggcaaggactgtgccgtcatcgtgacccagaagaaggtgcctgacaagctgctggacagcagcacagtgacccacctgttcaagatcacagagaacatcggctgtgtgatgacaggcatgacagctgacagccgcagccaggtgcagagggcccgctatgaggccgccaactggaagtacaagtatggctatgagatccctgtggacatgctgtgcaagagaattgctgacatcagccaggtgtacacccagaatgctgagatgaggcccctgggctgctgcatgatcctgattggaattgatgaggagcagggcccccaggtgtacaagtgtgaccctgctggctactactgcggcttcaaggccacagctgctggggtgaagcagacagagagcaccagcttcctggagaagaaggtgaagaagaagtttgactggacctttgagcagacagtggaggacagctaccgcagccgggactag

SEQ ID NO: 131981 - DNA, 741 bp, Artificial Sequence
  derived and/or modified sequence
atgagccggggcagcagcgccggcttcgaccggcacatcaccatcttttcacccgaggggcgtttatatcaagtggaatacgccttcaaagcaatcaatcaggggggcctcacctcagtagctgtgagaggaaaggattgcgccgttatagttacacagaagaaagtacctgacaaactgcttgatagctcaacagtgacacatctttttaaaatcactgagaatattggctgcgtgatgactggtatgacggccgattcacgcagtcaggtccaaagggcgcgatatgaagccgcaaattggaagtataaatatggctacgagattccagtggatatgttatgcaagcgaattgccgacatcagccaagtgtacacccaaaatgccgagatgcgcccactgggctgctgtatgattctgataggaatcgatgaagaacaaggcccacaggtgtacaaatgcgatcccgctggctactattgtggattcaaagcgactgcagcaggagtgaagcagaccgaaagcactagcttcttagaaaaaaaagttaagaaaaagttcgattggacttttgaacagacggtggaaactgctatcacttgcctgagcaccgttctcagtatagactttaaaccaagcgaaattgaggttggggtggtcacagtggagaacccgaagtttcggattctcaccgaagccgagatcgatgcacatttggtggctctcgcggagagagattag

SEQ ID NO: 131982 - DNA, 759 bp, Artificial Sequence
  derived and/or modified sequence
atgagccggggcagcagcgccggcttcgaccggcacatcaccatcttttcaccagaaggcaggctgtaccaggtcgagtatgctttcaaagccatcaatcaaggaggcttgacttctgtggcagtgagagggaaggattgcgccgtgatcgtcacacagaagaaagtgcccgacaagctcctggattcttccacggtgacacacctttttaagattaccgagaatatcggttgtgtgatgaccggcatgacagccgactccagaagccaggttcagcgcgcccgctatgaagcagctaattggaagtacaagtatggctacgaaatcccagtggacatgctctgcaagaggatcgctgatatctcccaggtatacacccaaaacgcagagatgagaccactgggatgctggtcgttcctgtttctggggatgattctcataggaattgatgaggaacaaggaccccaggtgtacaagtgtgatccagccggctattattgtggtttcaaggcaactgccgccggagtgaagcagaccgagagtacgagtttcctggagaaaaaagtgaagaagaaattcgactggacctttgagcagacagtcgaaacagctatcacctgtctgtccacggttctgagtatcgatttcaaaccgagtgagatcgaggtgggcgtcgtcacagtggagaatcctaaatttcgaattttgaccgaggctgaaatagatgcacatttggtggcccttgctgaacgcgattag

SEQ ID NO: 131983 - DNA, 324 bp, Artificial Sequence
  derived and/or modified sequence
atgagccggggcagcagcgccggcttcgaccggcacatcaccatctttagtcccgaagggcgactctatcaggtggaatacgcctttaaagccatcaatcagggcgggctaacttctgtggctgtgaggggaaaagactgcgctgtaatagtgacgcagaagaaagtcccagataaactcttagatagctccactgttactcacctcttcaagatcacagaaaatatcggctgtgtgatgactggtatgacagtgtccctttgtcgaccaggatgcagtgccagctgggtgcaggccatcttggtgcctcagccccccaggtag

SEQ ID NO: 131984 - DNA, 447 bp, Artificial Sequence
  derived and/or modified sequence
atgagccggggcagcagcgccggcttcgaccggcacatcaccatcttctcacctgagggccgactttatcaagtggagtatgcttttaaggctatcaaccaaggcggtcttacctctgtggccgtgcgtggcaaggactgtgctgtcatcgtgacccaaaaaaaagttcccgacaagttgctggactcaagtacggtgacccacctgttcaaaatcactgaaaacattggttgtgtcatgactggaatgaccgccgatagtaggtctcaggttcagagggctcggtatgaagcagccaactggaaatataagtacgggtacgagatccctgtggacatgctctgcaagcggatagctgatatctcgcaggtttatacccagaacgccgaaatgcgacctcttggctgttactgcaactacatgccagtctactgctccataaactag

SEQ ID NO: 131985 - DNA, 612 bp, Artificial Sequence
  derived and/or modified sequence
atgagccggggcagcagcgccggcttcgaccggcacatcaccatctttagccccgaaggtaggctttaccaggtcgaatatgccttcaaggctatcaatcagggcggcctgacaagcgtggcggtaaggggcaaggactgcgccgtaatcgtaacacagaaaaaggtccctgacaaactgttagatagttctaccgtgactcatctgttcaaaatcactgaaaatatcggctgcgtcatgacagggatgacggcagatagccggagccaggtgcaaagagccagatatgaggcagcgaattggaaatacaagtacggatacgagatccctgtcgacatgttgtgcaagagaattgcggacatcagccaggtctatacccagaatgcagaaatgcgccccctcggctgctgtatgatcctgattggcatcgatgaagaacagggaccccaggtatacaagtgtgatccagccgggtactattgcggattcaaggccacagcggcaggggtgaagcagactgaaagcacgagcttcctggagaagaaggtaaaaaagaagttcgactggacatttgagcagactgtggaagattcctatagatctagagattag

SEQ ID NO: 131986 - DNA, 741 bp, Artificial Sequence
  derived and/or modified sequence
atgagcagaggtagttccgcaggatttgacagacacatcacgatcttttctcccgaggggaggctttatcaggttgaatacgcattcaaggcaattaaccaagggggactcacctcggttgcagtgcggggtaaagactgcgccgttattgtgactcagaagaaagttccagacaaactgctggattccagcacagtgactcatctatttaaaattaccgagaatatagggtgcgtaatgaccggcatgacggcagattcgcgatcgcaagttcagagggcgcgatacgaggccgcaaattggaagtataagtacgggtatgagatccccgtggatatgttatgtaagcgcatcgccgatataagtcaggtgtacacccagaacgccgagatgcggcctctgggttgctgcatgatcctcataggtatcgatgaggagcaagggccacaggtttacaaatgtgatccggcagggtactactgcgggttcaaggccacagctgctggcgtgaaacaaactgagtccacgtccttcttggaaaagaaagtgaagaaaaagttcgattggaccttcgaacaaacagttgagacagccatcacctgcctgtcgaccgtgctgagtatcgactttaagccctcagaaatcgaggtaggcgtcgttaccgtcgagaatcctaaatttcgaatccttactgaagcagagatagacgcccatctcgtggccttagcggagagggactag

SEQ ID NO: 131987 - DNA, 759 bp, Artificial Sequence
  derived and/or modified sequence
atgagccgtggctcttcagctgggtttgaccgccatattactatattttctcccgagggcagattgtaccaggtggaatacgccttcaaggctattaaccaaggaggtttaacaagcgtggccgtgcggggaaaggactgcgcagtgatcgttacacagaagaaggtgcccgacaagctgctggattcttctaccgtgactcaccttttcaagattaccgagaatatcggttgtgtaatgaccggcatgactgccgacagccggtctcaggttcagcgagctaggtacgaagccgctaactggaagtacaagtacggatacgagatcccagttgacatgctctgtaagcgtattgcggatatatcccaggtttacactcagaatgccgagatgcgtccacttggctgttggtcttttttgttcctcggtatgattctgatcgggattgacgaagagcagggaccccaggtgtacaagtgtgatccagccggttattattgtggattcaaggccacagcagctggcgtgaagcagaccgagtctacatctttcttagagaagaaagtgaagaagaagtttgactggacattcgagcagaccgtggaaacagctattacatgtctttccactgttctttccattgatttcaagccctctgagattgaggtgggggtcgtgacagtagagaatcctaaatttaggatactcacagaggctgaaattgatgctcatctggtggccctggccgagagggattag

SEQ ID NO: 131988 - DNA, 324 bp, Artificial Sequence
  derived and/or modified sequence
atgtcccggggtagctcagctggcttcgaccggcatatcaccatcttcagtccagagggcaggctgtaccaggtggagtacgctttcaaggcgattaatcagggtggcctcacgtccgtagctgtccggggaaaagattgtgcagtgatagtcacccagaaaaaggttcccgacaagcttctcgatagctccactgtgacacaccttttcaagattaccgaaaacattggctgtgtcatgacagggatgaccgtatctctttgtaggcctggctgttctgcctcatgggtgcaggcaattttggtgcctcagccaccccgatag

SEQ ID NO: 131989 - DNA, 447 bp, Artificial Sequence
  derived and/or modified sequence
atgtccaggggatcctccgccggattcgatagacacatcaccatctttagcccggaaggcaggctgtatcaagtagagtacgcattcaaggctatcaatcagggtggactgacttcagtcgccgttcgaggtaaggattgcgcagtgattgtcacacagaaaaaggtgcccgataaattgctggattcaagtacggtaacacacctattcaaaattacagaaaatatcggttgcgttatgacagggatgacagctgattcccgttcacaagtgcagcgtgcacgctacgaagctgccaactggaaatacaagtatggatacgagataccggtggatatgctttgcaagcgaatcgcggacatttcacaagtctatacccagaacgcggagatgagaccactagggtgttactgcaattatatgccggtgtactgctccataaattag

SEQ ID NO: 131990 - DNA, 612 bp, Artificial Sequence
  derived and/or modified sequence
atgagtcgagggtcatccgccggatttgatcggcacattacaattttttctcccgaagggcgactgtaccaggtggaatatgcatttaaagccatcaaccaggggggattaacttctgttgctgttcggggaaaagactgcgcggtgatcgtgacccagaaaaaggttcctgataagctgctggacagctccaccgtgactcacctgtttaaaatcactgagaacatcgggtgtgtcatgactggtatgaccgctgactcgcgctcccaggtccagcgcgctaggtacgaagcggctaattggaagtataagtatggatatgagatccccgtggatatgctgtgcaagcgaatcgctgacatctcccaagtatacactcagaacgccgagatgcgacctctcggatgctgcatgattcttatcggaattgatgaggagcaaggaccacaggtgtataaatgcgaccccgctggctattactgcggattcaaggccacggctgctggcgtgaaacagaccgaatctacttccttcctcgagaagaaggtaaaaaagaagttcgactggacgttcgagcagaccgtggaagattcctatcgaagccgcgattag

SEQ ID NO: 131991 - DNA, 1029 bp, Artificial Sequence
  derived and/or modified sequence
gcggaagaaacgcggctggtaccccggaagcagtcgctgcaacttccgggaggtgcttgtgtgcctggtgcgggagctacggggcccagggattgtgtttaaagtagtgcttctaccaacatgtcccgtggttccagcgccggttttgaccgccacattaccattttttcacccgagggtcggctctaccaagtagaatatgcttttaaggctattaaccagggtggccttacatcagtagctgtcagagggaaagactgtgcagtaattgtcacacagaagaaagtacctgacaaattattggattccagcacagtgactcacttattcaagataactgaaaacattggttgtgtgatgaccggaatgacagctgacagcagatcccaggtacagagggcacgctatgaggcagctaactggaaatacaagtatggctatgagattcctgtggacatgctgtgtaaaagaattgccgatatttctcaggtctacacacagaatgctgaaatgaggcctcttggttgttgtatgattttaattggtatagatgaagagcaaggccctcaggtatataagtgtgatcctgcaggttactactgtgggtttaaagccactgcagcgggagttaaacaaactgagtcaaccagcttccttgaaaaaaaagtgaagaagaaatttgattggacatttgaacagacagtggaaactgcaattacatgcctgtctactgttctatcaattgatttcaaaccttcagaaatagaagttggagtagtgacagttgaaaatcctaaattcaggattcttacagaagcagagattgatgctcaccttgttgctctagcagagagagactaaacattgtcgttagtttaccagatccgtgatgccacttacctgtgtgtttggtaacaacaaaccaacatcatggaggtccctggattgaaaaaggagcctctcccactcctcctaccaccgaagtggttaggactctatataaataaaaacaaggcttttggaaaataa

SEQ ID NO: 131992 - DNA, 879 bp, Artificial Sequence
  derived and/or modified sequence
acttccgggaggtgcttgtgtgcctggtgcgggagctacggggcccagggattgtgtttaaagtagtgcttctaccaacatgtcccgtggttccagcgccggttttgaccgccacattaccattttttcacccgagggtcggctctaccaagtagaatatgcttttaaggctattaaccagggtggccttacatcagtagctgtcagagggaaagactgtgcagtaattgtcacacagaagaaagtacctgacaaattattggattccagcacagtgactcacttattcaagataactgaaaacattggttgtgtgatgaccggaatgacagctgacagcagatcccaggtacagagggcacgctatgaggcagctaactggaaatacaagtatggctatgagattcctgtggacatgctgtgtaaaagaattgccgatatttctcaggtctacacacagaatgctgaaatgaggcctcttggttgttggtcttttctctttttaggtatgattttaattggtatagatgaagagcaaggccctcaggtatataagtgtgatcctgcaggttactactgtgggtttaaagccactgcagcgggagttaaacaaactgagtcaaccagcttccttgaaaaaaaagtgaagaagaaatttgattggacatttgaacagacagtggaaactgcaattacatgcctgtctactgttctatcaattgatttcaaaccttcagaaatagaagttggagtagtgacagttgaaaatcctaaattcaggattcttacagaagcagagattgatgctcaccttgttgctctagcagagagagactaaacattgtcgttagtttaccagatccgtgatgccacttacct

SEQ ID NO: 131993 - DNA, 790 bp, Artificial Sequence
  derived and/or modified sequence
ctgcaacttccgggaggtgcttgtgtgcctggtgcgggagctacggggcccagggattgtgtttaaagtagtgcttctaccaacatgtcccgtggttccagcgccggttttgaccgccacattaccattttttcacccgagggtcggctctaccaagtagaatatgcttttaaggctattaaccagggtggccttacatcagtagctgtcagagggaaagactgtgcagtaattgtcacacagaagaaagtacctgacaaattattggattccagcacagtgactcacttattcaagataactgaaaacattggttgtgtgatgaccggaatgacagtctcactttgtcgcccaggctgctccgcctcctgggttcaagcaattctcgtgcctcaacctcccaggtagctgggactacagctgacagcagatcccaggtacagagggcacgctatgaggcagctaactggaaatacaagtatggctatgagattcctgtggacatgctgtgtaaaagaattgccgatatttctcaggtctacacacagaatgctgaaatgaggcctcttggttgttgtatgattttaattggtatagatgaagagcaaggccctcaggtatataagtgtgatcctgcaggttactactgtgggtttaaagccactgcagcgggagttaaacaaactgagtcaaccagcttccttgaaaaaaaagtgaagaagaaatttgattggacatttgaacagacagtggaaactgcaattacatgcctgtctactgttctatcaat

SEQ ID NO: 131994 - DNA, 814 bp, Artificial Sequence
  derived and/or modified sequence
ctgcaacttccgggaggtgcttgtgtgcctggtgcgggagctacggggcccagggattgtgtttaaagtagtgcttctaccaacatgtcccgtggttccagcgccggttttgaccgccacattaccattttttcacccgagggtcggctctaccaagtagaatatgcttttaaggctattaaccagggtggccttacatcagtagctgtcagagggaaagactgtgcagtaattgtcacacagaagaaagtacctgacaaattattggattccagcacagtgactcacttattcaagataactgaaaacattggttgtgtgatgaccggaatgacagctgacagcagatcccaggtacagagggcacgctatgaggcagctaactggaaatacaagtatggctatgagattcctgtggacatgctgtgtaaaagaattgccgatatttctcaggtctacacacagaatgctgaaatgaggcctcttggttgttactgcaattacatgcctgtctactgttctatcaattgatttcaaaccttcagaaatagaagttggagtagtgacagttgaaaatcctaaattcaggattcttacagaagcagagattgatgctcaccttgttgctctagcagagagagactaaacattgtcgttagtttaccagatccgtgatgccacttacctgtgtgtttggtaacaacaaaccaacatcatggaggtccctggattgaaaaaggagcctctcccactcctcctaccaccgaagtggttaggactctatataaataaaaacaaggcttttggaaaataa

SEQ ID NO: 131995 - DNA, 1002 bp, Artificial Sequence
  derived and/or modified sequence
gtgtttaaagtagtgcttctaccaacatgtcccgtggttccagcgccggttttgaccgccacattaccattttttcacccgagggtcggctctaccaagtaggtgagtgaaccaggttcgcctgtgggccacctgaattgccctgtcatgaatatgcttttaaggctattaaccagggtggccttacatcagtagctgtcagagggaaagactgtgcagtaattgtcacacagaagaaagtacctgacaaattattggattccagcacagtgactcacttattcaagataactgaaaacattggttgtgtgatgaccggaatgacagctgacagcagatcccaggtacagagggcacgctatgaggcagctaactggaaatacaagtatggctatgagattcctgtggacatgctgtgtaaaagaattgccgatatttctcaggtctacacacagaatgctgaaatgaggcctcttggttgttgtatgattttaattggtatagatgaagagcaaggccctcaggtatataagtgtgatcctgcaggttactactgtgggtttaaagccactgcagcgggagttaaacaaactgagtcaaccagcttccttgaaaaaaaagtgaagaagaaatttgattggacatttgaacagacagtggaaactgcaattacatgcctgtctactgttctatcaattgatttcaaaccttcagaaatagaagttggagtagtgacagttgaaaatcctaaattcaggattcttacagaagcagagattgatgctcaccttgttgctctagcagagagagactaaacattgtcgttagtttaccagatccgtgatgccacttacctgtgtgtttggtaacaacaaaccaacatcatggaggtccctggattgaaaaaggagcctctcccactcctcctaccaccgaagtggttaggactctatataaataaaaacaaggcttttggaaaataattgcatcctgttgttttca

SEQ ID NO: 131996 - DNA, 763 bp, Artificial Sequence
  derived and/or modified sequence
caacatgtcccgtggttccagcgccggttttgaccgccacattaccattttttcacccgagggtcggctctaccaagtagaatatgcttttaaggctattaaccagggtggccttacatcagtagctgtcagagggaaagactgtgcagtaattgtcacacagaagaaagtacctgacaaattattggattccagcacagtgactcacttattcaagataactgaaaacattggttgtgtgatgaccggaatgacagctgacagcagatcccaggtacagagggcacgctatgaggcagctaactggaaatacaagtatggctatgagattcctgtggacatgctgtgtaaaagaattgccgatatttctcaggtctacacacagaatgctgaaatgaggcctcttggttgttgtatgattttaattggtatagatgaagagcaaggccctcaggtatataagtgtgatcctgcaggttactactgtgggtttaaagccactgcagcgggagttaaacaaactgagtcaaccagcttccttgaaaaaaaagtgaagaagaaatttgattggacatttgaacagacagtggaagattcttacagaagcagagattgatgctcaccttgttgctctagcagagagagactaaacattgtcgttagtttaccagatccgtgatgccacttacctgtgtgtttggtaacaacaaaccaacatcatggaggtccctggattgaaaaaggagcctctcccactcctcct

SEQ ID NO: 131997 - DNA, 741 bp, Artificial Sequence
  derived and/or modified sequence
atgagcagaggcagcagcgccggcttcgacagacacatcaccatcttcagccccgagggcagactgtaccaggtggagtacgccttcaaggccatcaaccagggcggcctgaccagcgtggccgtgagaggcaaggactgcgccgtgatcgtgacccagaagaaggtgcccgacaagctgctggacagcagcaccgtgacccacctgttcaagatcaccgagaacatcggctgcgtgatgaccggcatgaccgccgacagcagaagccaggtgcagagagccagatacgaggccgccaactggaagtacaagtacggctacgagatccccgtggacatgctgtgcaagagaatcgccgacatcagccaggtgtacacccagaacgccgagatgagacccctgggctgctgcatgatcctgatcggcatcgacgaggagcagggcccccaggtgtacaagtgcgaccccgccggctactactgcggcttcaaggccaccgccgccggcgtgaagcagaccgagagcaccagcttcctggagaagaaggtgaagaagaagttcgactggaccttcgagcagaccgtggagaccgccatcacctgcctgagcaccgtgctgagcatcgacttcaagcccagcgagatcgaggtgggcgtggtgaccgtggagaaccccaagttcagaatcctgaccgaggccgagatcgacgcccacctggtggccctggccgagagagactag

SEQ ID NO: 131998 - DNA, 759 bp, Artificial Sequence
  derived and/or modified sequence
atgagcagaggcagcagcgccggcttcgacagacacatcaccatcttcagccccgagggcagactgtaccaggtggagtacgccttcaaggccatcaaccagggcggcctgaccagcgtggccgtgagaggcaaggactgcgccgtgatcgtgacccagaagaaggtgcccgacaagctgctggacagcagcaccgtgacccacctgttcaagatcaccgagaacatcggctgcgtgatgaccggcatgaccgccgacagcagaagccaggtgcagagagccagatacgaggccgccaactggaagtacaagtacggctacgagatccccgtggacatgctgtgcaagagaatcgccgacatcagccaggtgtacacccagaacgccgagatgagacccctgggctgctggagcttcctgttcctgggcatgatcctgatcggcatcgacgaggagcagggcccccaggtgtacaagtgcgaccccgccggctactactgcggcttcaaggccaccgccgccggcgtgaagcagaccgagagcaccagcttcctggagaagaaggtgaagaagaagttcgactggaccttcgagcagaccgtggagaccgccatcacctgcctgagcaccgtgctgagcatcgacttcaagcccagcgagatcgaggtgggcgtggtgaccgtggagaaccccaagttcagaatcctgaccgaggccgagatcgacgcccacctggtggccctggccgagagagactag

SEQ ID NO: 131999 - DNA, 324 bp, Artificial Sequence
  derived and/or modified sequence
atgagcagaggcagcagcgccggcttcgacagacacatcaccatcttcagccccgagggcagactgtaccaggtggagtacgccttcaaggccatcaaccagggcggcctgaccagcgtggccgtgagaggcaaggactgcgccgtgatcgtgacccagaagaaggtgcccgacaagctgctggacagcagcaccgtgacccacctgttcaagatcaccgagaacatcggctgcgtgatgaccggcatgaccgtgagcctgtgcagacccggctgcagcgccagctgggtgcaggccatcctggtgccccagccccccagatag

SEQ ID NO: 132000 - DNA, 447 bp, Artificial Sequence
  derived and/or modified sequence
atgagcagaggcagcagcgccggcttcgacagacacatcaccatcttcagccccgagggcagactgtaccaggtggagtacgccttcaaggccatcaaccagggcggcctgaccagcgtggccgtgagaggcaaggactgcgccgtgatcgtgacccagaagaaggtgcccgacaagctgctggacagcagcaccgtgacccacctgttcaagatcaccgagaacatcggctgcgtgatgaccggcatgaccgccgacagcagaagccaggtgcagagagccagatacgaggccgccaactggaagtacaagtacggctacgagatccccgtggacatgctgtgcaagagaatcgccgacatcagccaggtgtacacccagaacgccgagatgagacccctgggctgctactgcaactacatgcccgtgtactgcagcatcaactag

SEQ ID NO: 132001 - DNA, 612 bp, Artificial Sequence
  derived and/or modified sequence
atgagcagaggcagcagcgccggcttcgacagacacatcaccatcttcagccccgagggcagactgtaccaggtggagtacgccttcaaggccatcaaccagggcggcctgaccagcgtggccgtgagaggcaaggactgcgccgtgatcgtgacccagaagaaggtgcccgacaagctgctggacagcagcaccgtgacccacctgttcaagatcaccgagaacatcggctgcgtgatgaccggcatgaccgccgacagcagaagccaggtgcagagagccagatacgaggccgccaactggaagtacaagtacggctacgagatccccgtggacatgctgtgcaagagaatcgccgacatcagccaggtgtacacccagaacgccgagatgagacccctgggctgctgcatgatcctgatcggcatcgacgaggagcagggcccccaggtgtacaagtgcgaccccgccggctactactgcggcttcaaggccaccgccgccggcgtgaagcagaccgagagcaccagcttcctggagaagaaggtgaagaagaagttcgactggaccttcgagcagaccgtggaggacagctacagaagcagagactag

SEQ ID NO: 132002 - protein, 149 aa, Artificial Sequence
  derived and/or modified sequence
MSYDRAITVFSPDGHLFQVEYAQEAVKKGSTAVGVRGRDIVVLGVEKKSVAKLQDERTVRKICALDDNVCMAFAGLTADARIVINRARVECQSHRLTVEDPVTVEYITRYIASLKQVGACPLACSPLAAGQSRLRHGGSCHVTSGESEN

SEQ ID NO: 132003 - protein, 178 aa, Artificial Sequence
  derived and/or modified sequence
MAFAGLTADARIVINRARVECQSHRLTVEDPVTVEYITRYIASLKQRYTQSNGRRPFGISALIVGFDFDGTPRLYQTDPSGTYHAWKANAIGRGAKSVREFLEKNYTDEAIETDDLTIKLVIKALLEVVQSGGKNIELAVMRRDQSLKILNPEEIEKYVAEIEKEKEENEKKKQKKAS

SEQ ID NO: 132004 - protein, 248 aa, Artificial Sequence
  derived and/or modified sequence
MSYDRAITVFSPDGHLFQVEYAQEAVKKGSTAVGVRGRDIVVLGVEKKSVAKLQDERTVRKICALDDNVCMAFAGLTADARIVINRARVECQSHRLTVEDPVTVEYITRYIASLKQRYTQSNGRRPFGISALIVGFDFDGTPRLYQTDPSGTYHAWKANAIGRGAKSVREFLEKNYTDEAIETDDLTIKLVIKALLEVVQSGGKNIELAVMRRDQSLKILNPEEIEKYVAEIEKEKEENEKKKQKKAS

SEQ ID NO: 132005 - protein, 187 aa, Artificial Sequence
  derived and/or modified sequence
  misc_feature (1)..(1): Xaa can be any naturally occurring amino acid
XLTADARIVINRARVECQSHRLTVEDPVTVEYITRYIASLKQRYTQSNGRRPFGISALIVGFDFDGTPRLYQTDPSGTYHAWKANAIGRGAKSVREFLEKNYTDEAIETDDLTIKLVIKALLEGKVVNAPVFCPFKVVQSGGKNIELAVMRRDQSLKILNPEEIEKYVAEIEKEKEENEKKKQKKAS

SEQ ID NO: 132006 - DNA, 450 bp, Artificial Sequence
  derived and/or modified sequence
atgagctacgaccgcgcaataaccgtgtttagccccgatggacacctgtttcaagtagagtatgcccaggaagcagtcaagaagggatcaacagctgtgggtgttcgcggacgcgatatcgtggtcttgggcgttgagaagaaaagcgtcgctaaactgcaggatgagcgtacggttagaaaaatctgtgctttagacgacaatgtctgcatggcatttgccggactgactgcagacgccagaatcgtcatcaaccgggcccgtgtagaatgtcaatcacataggttaacagtggaagatcccgtgactgtcgaatatataaccagatatattgcctcattgaagcaagtcggagcctgccctctagcatgtagcccactcgctgccggccaatccaggctgcggcacggcggttcttgtcacgtgacgtctggcgagtcggaaaactag

SEQ ID NO: 132007 - DNA, 537 bp, Artificial Sequence
  derived and/or modified sequence
atggccttcgctggcctgaccgcagatgccagaatcgtgatcaaccgcgctcgcgttgaatgccagtctcaccggctgaccgttgaagatcccgtcactgtcgagtacattacacgatacatcgcatccctgaagcagaggtatacccaatcgaacggccggagaccatttgggatatccgctctgatcgtggggttcgattttgacggaacccctaggctttaccagaccgaccccagcgggacctaccacgcatggaaggctaacgccatcggccggggcgccaagagcgtgcgggagtttctcgaaaagaactacactgacgaagcaatagaaactgatgacctgaccatcaagctcgtcatcaaagccctgctcgaagttgtgcagtccggaggtaagaacatcgaattagccgtgatgaggcgggaccaatcgctgaagattctcaatcccgaggagattgagaagtacgtcgctgagattgaaaaggagaaggaggaaaacgaaaagaaaaaacagaaaaaagcctcgtag

SEQ ID NO: 132008 - DNA, 747 bp, Artificial Sequence
  derived and/or modified sequence
atgagttatgacagagccattactgtattttccccagatggccacttattccaggtcgagtatgcccaggaggccgtgaagaagggctccactgctgtcggggtccgggggagagatattgtcgtcctcggggtggagaagaagtcggtggctaaactgcaggacgagcggacagtgcgcaagatctgcgcgctggatgataatgtctgcatggcctttgcagggctgaccgccgatgcccggatagttatcaatcgcgcacgggtagaatgccagtcgcaccggctgactgttgaggacccagtcactgttgagtacataacgcggtatatagcttcattgaagcagaggtatacccagagcaacggccggcgcccctttggtatctctgctctgattgtcggtttcgacttcgatggaacacccagactctatcaaaccgacccttccggcacttaccacgcatggaaggccaacgctataggccgaggcgccaagtccgtaagagaattcctggagaaaaattacacggatgaggcaatcgaaaccgacgatctgacaatcaaattagtcatcaaggccttattggaggtcgtgcagagcggggggaagaacatcgagctggcggtgatgcgaagagaccaatccctcaagattctaaaccccgaggaaatcgaaaagtacgttgctgaaatcgagaaagagaaggaagagaacgagaagaaaaaacagaaaaaagccagctag

SEQ ID NO: 132009 - DNA, 564 bp, Artificial Sequence
  derived and/or modified sequence
tagctcaccgctgacgccaggatcgtgattaatcgcgcccgggttgagtgccaaagccatcggctgacagtagaagaccctgtgactgtggaatacattacccgatacatcgcttcattaaaacaacggtatacacaatccaatgggcgaagaccattcggaatttcagccctgatcgttggctttgacttcgatggcacaccccggctttatcaaactgaccctagtggcacctaccacgcctggaaggctaacgcaataggacgcggcgctaaatccgtgagggagttcctggagaagaattataccgatgaggctatagaaactgatgacctgaccatcaagttggtgatcaaggccctgctggagggcaaggtagtgaatgctccagtcttttgtcctttcaaggtggtccagagcgggggcaaaaatatagagctcgccgtcatgcggcgcgaccagagcttgaaaattctcaaccccgaggaaattgaaaaatacgtggcggagattgagaaggagaaggaagagaacgaaaagaaaaagcagaagaaggcctcgtag

SEQ ID NO: 132010 - DNA, 450 bp, Artificial Sequence
  derived and/or modified sequence
atgtcctatgaccgggccatcaccgtcttctccccagatggccacctgttccaggtggagtatgcccaggaggccgtgaagaagggcagcacagctgtgggcgtgcggggccgggacatcgtggtgctgggcgtggagaagaagtctgtggccaagctgcaggatgagaggacagtgaggaagatctgtgccctggatgacaacgtgtgcatggcctttgctggcctgacagcagatgcccgcatcgtcatcaacagagcccgggtggagtgccagagccaccggctgactgtggaggaccctgtgacagtggagtacatcacccgctacatcgccagcctgaagcaggtgggcgcctgccccctggcctgcagccccctggccgccggccagagccggctgcggcacggcggcagctgccacgtgaccagcggggagagcgagaactag

SEQ ID NO: 132011 - DNA, 537 bp, Artificial Sequence
  derived and/or modified sequence
atggcctttgctggcctgacagcagatgcccgcatcgtcatcaacagagcccgggtggagtgccagagccaccggctgactgtggaggaccctgtgacagtggagtacatcacccgctacatcgccagcctgaagcagcgctacacccagagcaatggccggcggcccttcggcatcagcgccctgattgtgggctttgattttgatggcaccccccggctgtaccagacagaccccagcggcacctaccacgcctggaaggccaatgccatcggccgcggggccaagtctgtgcgggagttcctggagaagaactacacagatgaggccattgaaacagatgacctgaccatcaagctggtgatcaaggccctgctggaggtggtgcagagcggcggcaagaacatcgagctggccgtgatgaggcgggaccagagcctgaagatcctgaaccctgaggagattgagaagtatgtggccgagattgagaaggagaaggaggagaatgagaagaagaagcagaagaaggccagctag

SEQ ID NO: 132012 - DNA, 747 bp, Artificial Sequence
  derived and/or modified sequence
atgtcctatgaccgggccatcaccgtcttctccccagatggccacctgttccaggtggagtatgcccaggaggccgtgaagaagggcagcacagctgtgggcgtgcggggccgggacatcgtggtgctgggcgtggagaagaagtctgtggccaagctgcaggatgagaggacagtgaggaagatctgtgccctggatgacaacgtgtgcatggcctttgctggcctgacagcagatgcccgcatcgtcatcaacagagcccgggtggagtgccagagccaccggctgactgtggaggaccctgtgacagtggagtacatcacccgctacatcgccagcctgaagcagcgctacacccagagcaatggccggcggcccttcggcatcagcgccctgattgtgggctttgattttgatggcaccccccggctgtaccagacagaccccagcggcacctaccacgcctggaaggccaatgccatcggccgcggggccaagtctgtgcgggagttcctggagaagaactacacagatgaggccattgaaacagatgacctgaccatcaagctggtgatcaaggccctgctggaggtggtgcagagcggcggcaagaacatcgagctggccgtgatgaggcgggaccagagcctgaagatcctgaaccctgaggagattgagaagtatgtggccgagattgagaaggagaaggaggagaatgagaagaagaagcagaagaaggccagctag

SEQ ID NO: 132013 - DNA, 564 bp, Artificial Sequence
  derived and/or modified sequence
tgactgacagcagatgcccgcatcgtcatcaacagagcccgggtggagtgccagagccaccggctgactgtggaggaccctgtgacagtggagtacatcacccgctacatcgccagcctgaagcagcgctacacccagagcaatggccggcggcccttcggcatcagcgccctgattgtgggctttgattttgatggcaccccccggctgtaccagacagaccccagcggcacctaccacgcctggaaggccaatgccatcggccgcggggccaagtctgtgcgggagttcctggagaagaactacacagatgaggccattgaaacagatgacctgaccatcaagctggtgatcaaggccctgctggagggcaaggtggtgaatgcccctgtgttctgccccttcaaggtggtgcagagcggcggcaagaacatcgagctggccgtgatgagaagagaccagagcctgaagatcctgaaccctgaggagattgagaagtatgtggccgagattgagaaggagaaggaggagaatgagaagaagaagcagaagaaggccagctag

SEQ ID NO: 132014 - DNA, 450 bp, Artificial Sequence
  derived and/or modified sequence
atgagctacgaccgggccatcaccgtgttcagccccgacggccacctctttcaggttgaatacgcacaggaggccgttaagaaagggagcactgcggtaggtgtgcgcggacgggacatcgtggtcctgggcgtcgagaaaaaatcagttgcaaagttacaggacgagcggaccgtgaggaagatctgcgcgctcgacgataatgtttgtatggccttcgcaggcctgactgccgatgcacgcattgtgatcaatagagccagggtggaatgtcagtctcacaggttgactgtcgaggaccctgtgaccgtcgagtacattacccgctatattgcctcactaaagcaagttggagcatgccctctggcgtgttccccactggcagctgggcaaagtcgcctccgacacggagggagttgccacgtgacaagcggagaatcagaaaattag

SEQ ID NO: 132015 - DNA, 537 bp, Artificial Sequence
  derived and/or modified sequence
atggccttcgccggcctgaccgccgacgcccggatcgtgatcaacagagctcgggtggagtgtcagagccatagactaaccgtagaggacccagtgacagttgagtacattacaagatacatcgctagtctgaaacaaagatacacacagtcgaacggacgccgccccttcggaatttcggccctcatcgtgggcttcgattttgacggcactccgcgtctttaccaaactgacccctccggcacctatcatgcctggaaagcgaacgctatcggccgcggcgccaagtccgtgcgcgaatttctggagaaaaactacacggacgaagctattgagacagacgatctaactattaagttggtcatcaaggcactcctggaggtggttcagtctggtgggaagaatatcgagctggccgtgatgcgaagggatcagtcactcaaaatcttaaaccctgaagaaattgagaagtatgtggccgagatcgaaaaagaaaaagaagagaacgagaaaaaaaagcagaaaaaggcgtcatag

SEQ ID NO: 132016 - DNA, 747 bp, Artificial Sequence
  derived and/or modified sequence
atgagctacgaccgggccatcaccgtgttcagccccgacggccacctttttcaggttgagtatgcccaggaggcggttaagaaaggtagtaccgccgttggggtgagaggtcgggacattgtcgtcctcggcgtcgaaaaaaagagcgtcgccaaactgcaggatgagaggacggttcggaaaatttgcgccctagatgacaacgtgtgtatggcattcgccggcctcactgccgacgcacgcattgtcattaatcgggcacgtgtggagtgtcaaagccaccgcttaacggtagaagatcccgtcacagtggaatacatcacccgatatatagcgagccttaaacaaaggtacacccagtctaacgggaggcgcccatttggcattagtgctctgatagtgggctttgacttcgatggcacaccccgcctgtaccaaaccgatcccagcggaacctatcacgcctggaaagccaatgcaatcggccggggggcaaaatccgtcagagagtttttagagaaaaattacactgatgaggctattgagaccgatgacctcaccattaagctggttatcaaggctcttctggaggtggtgcaatccggcggaaagaatatcgagcttgcggtgatgaggcgtgatcagagtctcaagattctaaatcccgaggaaattgagaaatatgtagccgaaattgagaaagagaaagaggaaaatgagaagaagaagcagaagaaggcctcttag

SEQ ID NO: 132017 - DNA, 564 bp, Artificial Sequence
  derived and/or modified sequence
tgactgaccgccgacgcccggatcgtgatcaaccgggcccgggtggaatgccagtcccatcgtctgactgtagaagatcccgttactgtcgaatacataaccaggtacatagctagtctcaaacagaggtacacacagtcaaacggccgacggccctttggcatttctgctctgattgtgggtttcgatttcgatggtacacccagactgtatcagactgatccttcaggcacttaccacgcatggaaagcaaatgctatcgggaggggcgccaagtctgtgcgtgaatttttggaaaagaactatactgatgaagcaatagaaactgacgaccttacaatcaagctggtcattaaagctttgcttgagggaaaggtggtcaatgcccccgtgttttgcccatttaaggtcgttcagagcggcgggaagaatatagagctcgctgtcatgcgaagagaccagagcctcaagatactgaatccagaggaaatagaaaagtacgtggccgaaattgagaaggaaaaagaagagaacgagaaaaagaagcagaagaaggcaagctag

SEQ ID NO: 132018 - DNA, 450 bp, Artificial Sequence
  derived and/or modified sequence
atgtcttacgaccgcgctattacagtgttcagtcctgacggccacctcttccaggtggagtatgcgcaggaggctgttaagaagggaagtacagctgtgggtgtcaggggcagagatattgttgtcctcggcgtcgagaagaagtccgtcgctaagctccaagacgaacgcacagtacggaaaatatgcgccttggatgacaatgtttgtatggcgttcgctggtctgactgctgacgctaggattgtcatcaatcgggcacgtgtcgaatgccaatcgcacaggctgaccgtagaggatcctgtcacagtggagtatatcaccagatacatcgcatctttgaaacaagtcggcgcatgtcccttagcctgctcgcctctagccgcaggtcaaagccgcttgaggcacgggggttcctgccacgtgacatccggagagtcagaaaattag

SEQ ID NO: 132019 - DNA, 537 bp, Artificial Sequence
  derived and/or modified sequence
atggcgttcgcaggtctcactgccgatgcaaggatagtgatcaacagagctcgcgtggagtgccaatcacaccgtctgactgttgaggacccagtcaccgtggagtatatcacaagatatattgcctccttgaagcagagatacacacaatcgaacgggcgtagaccattcggcatatccgctcttatcgttggatttgatttcgacggtacacccaggctctatcagacagatccaagcggcacttatcacgcatggaaggcaaacgccataggtcgaggagccaaaagtgttcgggagttccttgaaaagaactacacagatgaggcaatagagacagacgatttgacaatcaagctcgttataaaggcactgctggaagtagtgcagagcgggggaaaaaacatagaactggctgtgatgagacgcgaccagtcgctcaaaattttgaatccagaggaaattgagaaatacgtggcagagattgaaaaggaaaaggaggaaaacgaaaagaaaaagcaaaaaaaagcgagttag

SEQ ID NO: 132020 - DNA, 747 bp, Artificial Sequence
  derived and/or modified sequence
atgtcatatgatagagccattaccgtgttttccccagacgggcatttattccaggttgagtacgcccaagaggccgtaaaaaaaggaagcaccgcagtgggcgttcgaggccgtgacatcgtggtcctcggggtagaaaagaagtccgttgccaagctccaggatgaacgcaccgtacgaaagatatgcgctcttgatgataacgtgtgcatggcctttgcgggtctcactgccgatgctagaattgttataaacagagcaagagtagagtgccagtcacatcggctaactgtagaggaccccgtgactgtagaatacatcaccaggtatattgccagcctgaaacagcgctacactcagtccaacggaaggcggccttttggtatctcggcccttatcgtgggctttgatttcgacggtacaccacgactgtaccagacagacccgagcgggacctaccacgcgtggaaggctaatgcaatcgggaggggggctaaatcagtccgcgagtttctcgagaaaaattataccgacgaagcaattgaaactgatgaccttacaatcaagctcgttataaaggctctcttggaagtagtccagagtggtggtaaaaatatcgaacttgccgtgatgcggagagaccagtcactgaagatattaaatccagaggaaatcgagaaatacgtggctgaaatagaaaaagagaaggaggagaatgagaagaaaaagcagaagaaagcatcctag

SEQ ID NO: 132021 - DNA, 564 bp, Artificial Sequence
  derived and/or modified sequence
tgactgaccgccgacgctcgaattgtgataaaccgggctagggtggaatgccagtctcatcggctgaccgtcgaagaccctgtaactgtcgagtacattacaaggtatattgctagcctaaagcagcggtatacccagtccaacggcaggagacctttcggcatctcagcgttaatagtcgggttcgatttcgacggaacccccaggttgtaccagactgatcccagtggcacttaccacgcatggaaagcgaacgctatcggtcgaggggctaagtccgtcagggaattccttgagaaaaattatactgatgaagctattgaaactgatgaccttacaatcaagttggtaataaaagccctgttagaggggaaggtcgtaaatgcacccgttttttgtcccttcaaagtagtccagtctggtggaaagaatattgagctggctgtgatgcgcagggaccagtcgctgaagatcctgaatcccgaggaaattgagaaatacgtggccgaaatcgagaaggaaaaagaagagaatgagaaaaaaaagcaaaagaaggcgtcttag

SEQ ID NO: 132022 - DNA, 925 bp, Artificial Sequence
  derived and/or modified sequence
cagcgcaggacacggcgccgagggtggggcgcgggcgtagtggcgccgggagtcgcgggtgcgcgcgggccgtgagtgtgcgcttttgagagtcgcggcggaaggagcccggccgccgcccgccggcatgagctacgaccgcgccatcaccgtcttctcgcccgacggccacctcttccaagtggagtacgcgcaggaggccgtcaagaagggctcgaccgcggttggtgttcgaggaagagacattgttgttcttggtgtggagaagaagtcagtggccaaactgcaggatgaaagaacagtgcggaagatctgtgctttggatgacaacgtctgcatggcctttgcaggcctcaccgccgatgcaaggatagtcatcaacagggcccgggtggagtgccagagccaccggctgactgtggaggacccggtcactgtggagtacatcacccgctacatcgccagtctgaagcaggtgggtgcctgcccgcttgcatgctcacctctggcagcagggcagtcacggctccgccatggagggtcctgccatgtcacttcaggtgaatcagaaaactgatttattctggggcgtgatcctaatcttgacttgcacaagtgtaacttgacctagctcaccaatttcagtaacattgttctgttctcagttcctggcatgggatattccaaattcctgtgtctggagggaaatgatagcttttgtcttgccatcctgagtgaccagtcacaaagcagttgaagggggctggaagccaccctatgaggacacgccattagtatgtaagcagaatgtgtgtctacctgtcaaagtaatttccagtaacctgagttcacaattctggtcctaggtgagtttttctaggagtgaaaatgcagaaaaggatgttgaaagctattggctaatgta

SEQ ID NO: 132023 - DNA, 773 bp, Artificial Sequence
  derived and/or modified sequence
ccgcccgggtcaggactggtttggacgcggccgtttcgttttgacgagggctcgtgtacattgaccttagtgacattgtttgaaacttaaattcgtaccatcaagacgtgtcagtttaattggttggtgttcgaggaagagacattgttgttcttggtgtggagaagaagtcagtggccaaactgcaggatgaaagaacagtgcggaagatctgtgctttggatgacaacgtctgcatggcctttgcaggcctcaccgccgatgcaaggatagtcatcaacagggcccgggtggagtgccagagccaccggctgactgtggaggacccggtcactgtggagtacatcacccgctacatcgccagtctgaagcagcgttatacgcagagcaatgggcgcaggccgtttggcatctctgccctcatcgtgggtttcgactttgatggcactcctaggctctatcagactgacccctcgggcacataccatgcctggaaggccaatgccataggtcggggtgccaagtcagtgcgcgagttcctggagaagaactatactgacgaagccattgaaacagatgatctgaccattaagctggtgatcaaggcactcctggaagtggttcagtcaggtggcaaaaacattgaacttgctgtcatgaggcgagatcaatccctcaagattttaaatcctgaagaaattgagaagtatgttgctgaaattgaaaaagaaaaagaagaaaacgaaaagaagaaacaaaagaaagcatcatga

SEQ ID NO: 132024 - DNA, 996 bp, Artificial Sequence
  derived and/or modified sequence
cagcgcaggacacggcgccgagggtggggcgcgggcgtagtggcgccgggagtcgcgggtgcgcgcgggccgtgagtgtgcgcttttgagagtcgcggcggaaggagcccggccgccgcccgccggcatgagctacgaccgcgccatcaccgtcttctcgcccgacggccacctcttccaagtggagtacgcgcaggaggccgtcaagaagggctcgaccgcggttggtgttcgaggaagagacattgttgttcttggtgtggagaagaagtcagtggccaaactgcaggatgaaagaacagtgcggaagatctgtgctttggatgacaacgtctgcatggcctttgcaggcctcaccgccgatgcaaggatagtcatcaacagggcccgggtggagtgccagagccaccggctgactgtggaggacccggtcactgtggagtacatcacccgctacatcgccagtctgaagcagcgttatacgcagagcaatgggcgcaggccgtttggcatctctgccctcatcgtgggtttcgactttgatggcactcctaggctctatcagactgacccctcgggcacataccatgcctggaaggccaatgccataggtcggggtgccaagtcagtgcgcgagttcctggagaagaactatactgacgaagccattgaaacagatgatctgaccattaagctggtgatcaaggcactcctggaagtggttcagtcaggtggcaaaaacattgaacttgctgtcatgaggcgagatcaatccctcaagattttaaatcctgaagaaattgagaagtatgttgctgaaattgaaaaagaaaaagaagaaaacgaaaagaagaaacaaaagaaagcatcatgatgaataaaatgtctttgcttgtaatttttaaattcatatcaatcatggatgagtctcgatgtgtaggcctttccattccatttattcacactgagtgtcctacaataaacttccgtattttt

SEQ ID NO: 132025 - DNA, 685 bp, Artificial Sequence
  derived and/or modified sequence
gcctcaccgccgatgcaaggatagtcatcaacagggcccgggtggagtgccagagccaccggctgactgtggaggacccggtcactgtggagtacatcacccgctacatcgccagtctgaagcagcgttatacgcagagcaatgggcgcaggccgtttggcatctctgccctcatcgtgggtttcgactttgatggcactcctaggctctatcagactgacccctcgggcacataccatgcctggaaggccaatgccataggtcggggtgccaagtcagtgcgcgagttcctggagaagaactatactgacgaagccattgaaacagatgatctgaccattaagctggtgatcaaggcactcctggaaggaaaggtggttaatgctcctgtcttctgtcccttcaaggtggttcagtcaggtggcaaaaacattgaacttgctgtcatgaggcgagatcaatccctcaagattttaaatcctgaagaaattgagaagtatgttgctgaaattgaaaaagaaaaagaagaaaacgaaaagaagaaacaaaagaaagcatcatgatgaataaaatgtctttgcttgtaatttttaaattcatatcaatcatggatgagtctcgatgtgtaggcctttccattccatttattcacactgagtgtcctacaataaacttccgtattttt

SEQ ID NO: 132026 - DNA, 450 bp, Artificial Sequence
  derived and/or modified sequence
atgagctacgacagagccatcaccgtgttcagccccgacggccacctgttccaggtggagtacgcccaggaggccgtgaagaagggcagcaccgccgtgggcgtgagaggcagagacatcgtggtgctgggcgtggagaagaagagcgtggccaagctgcaggacgagagaaccgtgagaaagatctgcgccctggacgacaacgtgtgcatggccttcgccggcctgaccgccgacgccagaatcgtgatcaacagagccagagtggagtgccagagccacagactgaccgtggaggaccccgtgaccgtggagtacatcaccagatacatcgccagcctgaagcaggtgggcgcctgccccctggcctgcagccccctggccgccggccagagcagactgagacacggcggcagctgccacgtgaccagcggcgagagcgagaactag

SEQ ID NO: 132027 - DNA, 537 bp, Artificial Sequence
  derived and/or modified sequence
atggccttcgccggcctgaccgccgacgccagaatcgtgatcaacagagccagagtggagtgccagagccacagactgaccgtggaggaccccgtgaccgtggagtacatcaccagatacatcgccagcctgaagcagagatacacccagagcaacggcagaagacccttcggcatcagcgccctgatcgtgggcttcgacttcgacggcacccccagactgtaccagaccgaccccagcggcacctaccacgcctggaaggccaacgccatcggcagaggcgccaagagcgtgagagagttcctggagaagaactacaccgacgaggccatcgagaccgacgacctgaccatcaagctggtgatcaaggccctgctggaggtggtgcagagcggcggcaagaacatcgagctggccgtgatgagaagagaccagagcctgaagatcctgaaccccgaggagatcgagaagtacgtggccgagatcgagaaggagaaggaggagaacgagaagaagaagcagaagaaggccagctag

SEQ ID NO: 132028 - DNA, 747 bp, Artificial Sequence
  derived and/or modified sequence
atgagctacgacagagccatcaccgtgttcagccccgacggccacctgttccaggtggagtacgcccaggaggccgtgaagaagggcagcaccgccgtgggcgtgagaggcagagacatcgtggtgctgggcgtggagaagaagagcgtggccaagctgcaggacgagagaaccgtgagaaagatctgcgccctggacgacaacgtgtgcatggccttcgccggcctgaccgccgacgccagaatcgtgatcaacagagccagagtggagtgccagagccacagactgaccgtggaggaccccgtgaccgtggagtacatcaccagatacatcgccagcctgaagcagagatacacccagagcaacggcagaagacccttcggcatcagcgccctgatcgtgggcttcgacttcgacggcacccccagactgtaccagaccgaccccagcggcacctaccacgcctggaaggccaacgccatcggcagaggcgccaagagcgtgagagagttcctggagaagaactacaccgacgaggccatcgagaccgacgacctgaccatcaagctggtgatcaaggccctgctggaggtggtgcagagcggcggcaagaacatcgagctggccgtgatgagaagagaccagagcctgaagatcctgaaccccgaggagatcgagaagtacgtggccgagatcgagaaggagaaggaggagaacgagaagaagaagcagaagaaggccagctag

SEQ ID NO: 132029 - DNA, 564 bp, Artificial Sequence
  derived and/or modified sequence
tgactgaccgccgacgccagaatcgtgatcaacagagccagagtggagtgccagagccacagactgaccgtggaggaccccgtgaccgtggagtacatcaccagatacatcgccagcctgaagcagagatacacccagagcaacggcagaagacccttcggcatcagcgccctgatcgtgggcttcgacttcgacggcacccccagactgtaccagaccgaccccagcggcacctaccacgcctggaaggccaacgccatcggcagaggcgccaagagcgtgagagagttcctggagaagaactacaccgacgaggccatcgagaccgacgacctgaccatcaagctggtgatcaaggccctgctggagggcaaggtggtgaacgcccccgtgttctgccccttcaaggtggtgcagagcggcggcaagaacatcgagctggccgtgatgagaagagaccagagcctgaagatcctgaaccccgaggagatcgagaagtacgtggccgagatcgagaaggagaaggaggagaacgagaagaagaagcagaagaaggccagctag

SEQ ID NO: 132030 - protein, 241 aa, Artificial Sequence
  derived and/or modified sequence
MLSSTAMYSAPGRDLGMEPHRAAGPLQLRFSPYVFNGGTILAIAGEDFAIVASDTRLSEGFSIHTRDSPKCYKLTDKTVIGCSGFHGDCLTLTKIIEARLKMYKHSNNKAMTTGAIAAMLSTILYSRRFFPYYVYNIIGGLDEEGKGAVYSFDPVGSYQRDSFKAGGSASAMLQPLLDNQVGFKNMQNVEHVPLSLDRAMRLVKDVFISAAERDVYTGDALRICIVTKEGIREETVSLRKD

SEQ ID NO: 132031 - protein, 196 aa, Artificial Sequence
  derived and/or modified sequence
RRSRAMLSSTAMYSAPGRDLGMEPHRAAGPLQLRFSPYVFNGGTILAIAGEDFAIVASDTRLSEGFSIHTRDSPKCYKLTDKTVIGCSGFHGDCLTLTKIIEARLKMYKHSNNKAMTTGAIAAMLSTILYSRRFFPYYVYNIIGGLDEEGKGAVYSFDPVGSYQRDSFKAGGSASAMLQPLLDNQYISSNSVSLCV

SEQ ID NO: 132032 - DNA, 726 bp, Artificial Sequence
  derived and/or modified sequence
atgctatccagcacagcaatgtatagcgctcccggtcgcgacctgggcatggagcctcatcgagctgctgggccacttcagttgcggttctccccatacgttttcaacggtgggacaatcttggctattgctggtgaggactttgccattgtggcctccgacacaaggctttccgaggggtttagtattcacacaagggactctcctaaatgctacaaattgacagataagacagttattggctgttctggctttcatggagactgcctaaccctcactaagatcatagaggctcggctgaagatgtataagcactctaacaataaagccatgacgacaggggctattgctgccatgctgtctacaatattgtactctcgccggttcttcccttattacgtgtataatattatcgggggcctagacgaggaagggaagggtgcagtgtactcctttgaccctgtgggatcttatcagcgggacagctttaaggcaggagggagtgcaagtgctatgctgcaacctctcctagacaaccaagtgggttttaagaatatgcagaatgtagagcatgtgcctctgtctctcgacagggcgatgcgactggtaaaagatgtgtttatcagcgctgccgagcgggacgtgtatacaggcgatgctttgaggatttgtattgttaccaaggaggggattcgagaggagactgtgtccctgcgtaaagactag

SEQ ID NO: 132033 - DNA, 591 bp, Artificial Sequence
  derived and/or modified sequence
aggagaagcagggccatgctgtcatccaccgccatgtactctgccccagggagagacctgggtatggagccccatcgtgctgccgggcccctgcagctcagattctctccctatgtttttaatggaggtactattttggccattgcaggtgaagattttgctattgttgcttcagacactagactctccgagggcttctccatccacactagggactctccaaagtgctataagctcactgataaaacagtaatcggctgtagcggtttccacggagattgcttgacattgacaaagatcatcgaagcgaggctgaagatgtacaaacactcaaataataaagccatgaccacaggcgcaatcgcagctatgctgtcaacgattctgtactctaggaggttctttccatattatgtctacaacattatcggcggtctggatgaggaagggaagggcgcagtgtattcatttgatcctgtgggaagttaccaaagggacagcttcaaagcaggcggttctgcctccgctatgctccagccgctcctagacaatcagtacatctcctctaactctgtgagcctgtgcgtatag

SEQ ID NO: 132034 - DNA, 726 bp, Artificial Sequence
  derived and/or modified sequence
atgctgagcagcacagccatgtacagcgcccctggccgggacctgggcatggagccccacagagctgctggccccctgcagctgcgcttcagcccctacgtgttcaacggcggcaccatcctggccatcgccggggaggactttgccatcgtggccagtgacacccggctgtctgagggcttcagcatccacacccgggacagccccaagtgctacaagctgacagacaagacagtcatcggctgcagcggcttccacggggactgcctgaccctgaccaagatcatcgaggcccggctgaagatgtacaagcacagcaacaacaaggccatgaccactggagccatcgccgccatgctgagcaccatcctgtacagccgccgcttcttcccctactacgtgtacaacatcatcggcggcctggatgaggagggcaaaggagctgtgtacagctttgatcctgtgggcagctaccagagggacagcttcaaggccggcggcagcgccagcgccatgctgcagcccctgctggacaaccaggtgggcttcaagaacatgcagaatgtggagcacgtgcccctgagcctggaccgggccatgaggctggtgaaggatgtgttcatctctgctgctgagagagatgtgtacacaggagatgccctgcgcatctgcatcgtgaccaaggagggcatccgggaggagaccgtgtccctgaggaaggactag

SEQ ID NO: 132035 - DNA, 591 bp, Artificial Sequence
  derived and/or modified sequence
agaagaagccgggccatgctgagcagcacagccatgtacagcgcccctggccgggacctgggcatggagccccacagagctgctggccccctgcagctgcgcttcagcccctacgtgttcaatggaggcaccatcctggccatcgctggagaagattttgccatcgtggccagtgacacccggctgtctgagggcttcagcatccacacccgggacagccccaagtgctacaagctgacagacaagacagtgattggctgcagcggcttccatggagactgcctgaccctgaccaagatcatcgaggcccggctgaagatgtacaagcacagcaacaacaaggccatgaccaccggggccatcgccgccatgctgagcaccatcctgtacagccgccgcttcttcccctactacgtgtacaacatcattggaggcctggatgaggagggcaaaggagctgtgtacagctttgatcctgtgggcagctaccagagggacagcttcaaggccggcggcagcgccagcgccatgctgcagcccctgctggacaaccagtacatcagcagcaacagcgtgtccctgtgtgtgtag

SEQ ID NO: 132036 - DNA, 726 bp, Artificial Sequence
  derived and/or modified sequence
atgctgagcagcaccgccatgtacagcgcccccggccgggacctgggcatggaaccccacagggcagccggtcccctgcagctcagattctcaccctacgtctttaatggaggcaccattctggcgatcgctggcgaggacttcgcgatcgtcgcatccgacaccagattaagcgagggcttctccattcacacacgcgattcccctaaatgctacaagctcacagataagacagtaatcgggtgctccggctttcacggcgactgcttgaccctgaccaagatcattgaagcccgcctcaaaatgtacaagcattccaacaataaggccatgaccaccggtgccattgctgcaatgctctccaccattctgtattcaaggaggttttttccatactacgtgtacaatatcatagggggacttgatgaggaaggtaaaggcgcagtctactccttcgaccctgtcggttcatatcagagagactctttcaaggccggtggttctgcatctgccatgctgcagccgctgctagacaaccaggtcggattcaaaaacatgcagaacgtggaacacgtgcccctgtctttggaccgggcgatgcgcctagtcaaggatgtcttcatctcagcagctgaaagagacgtttacaccggcgatgctctccgcatatgcatcgtgacgaaggagggcattcgggaggagaccgtaagcctgcgcaaagattag

SEQ ID NO: 132037 - DNA, 591 bp, Artificial Sequence
  derived and/or modified sequence
cggcggagccgggccatgctgagcagcaccgccatgtacagcgccccgggtcgcgacctaggtatggaaccgcacagggccgccggcccgctccagctgagattcagtccctacgttttcaacggtggaacaatactcgcgattgcgggcgaggattttgcaatcgtcgcttcagataccaggttgagcgaggggttttccattcatacacgggattcacctaagtgttataaactaactgacaaaaccgtgatcggctgttccggttttcacggagactgcctcacgctgacaaagatcattgaggctagactgaaaatgtacaagcatagcaataataaggcgatgactactggtgccattgctgccatgttgtctacaattctttatagccggagattcttcccatactacgtgtacaatattatcgggggcctggatgaggagggaaaaggagctgtctattcctttgaccccgtggggagctatcagcgagatagctttaaagcagggggatccgcttcagcaatgttgcagcctctgctggataatcagtacatttcctcgaactcagtttccttatgcgtttag

SEQ ID NO: 132038 - DNA, 726 bp, Artificial Sequence
  derived and/or modified sequence
atgctaagctcaaccgctatgtactctgccccaggcagggacttgggcatggagccccatcgggctgccggacctttacagctgcggttctctccgtacgtgttcaacggcggtactatcctagctatcgcgggtgaggacttcgccatcgttgccagcgacaccagactctccgagggcttttccattcacacacgcgattctccaaagtgttataaactgacagacaagacagtaatagggtgcagtggcttccatggagattgtcttaccctgacgaaaataattgaggctagattgaagatgtataaacactccaataacaaagccatgaccacaggcgcaattgccgcaatgctcagcacaattctctacagtcggaggttcttcccatactatgtgtataacattattggtgggcttgatgaagaaggtaagggagctgtgtactcatttgatcccgtgggttcataccagagagactcgtttaaagccggaggtagcgcctctgctatgctccaacctctgctcgataaccaggttggctttaaaaatatgcagaacgtggagcacgtgcctctgtcgctcgatcgggcaatgaggttggtcaaggacgtctttatctcagcggctgagcgcgatgtgtataccggcgacgcactgaggatctgcatcgttaccaaggaaggaattagggaggagaccgtgtcattgcggaaggactag

SEQ ID NO: 132039 - DNA, 591 bp, Artificial Sequence
  derived and/or modified sequence
cggagatcccgggctatgttgtcttccaccgccatgtactcagcaccgggtcgtgacctcgggatggagcctcaccgcgctgccggtcccctgcagctgagattttcgccatatgtttttaacggcggaaccatcctggccatcgctggagaggactttgctatagtcgccagcgatactcgcctgtctgaaggcttttccatccataccagagacagtccaaagtgctacaaactgacagataagacggtgatcggatgttcagggtttcacggagattgcttaaccctgactaagattatagaggctagactgaaaatgtataaacactctaataataaagccatgacgacgggcgctattgcggctatgctatcaactatcctctactccagaaggttcttcccatattatgtctacaacatcattggcggtctggatgaggagggtaagggagcggtgtactcatttgacccagtgggaagctaccagcgcgacagtttcaaggccggaggctccgcatcagccatgctccagcctttgctggacaatcagtatataagcagcaacagcgtgagcctgtgtgtgtag

SEQ ID NO: 132040 - DNA, 928 bp, Artificial Sequence
  derived and/or modified sequence
agcgaacttcaggagaagccggaagtggcgtaacgtccggtcaaggcagccatctcgccgtgagacagcaagtgtcggatccgcaggcgcagccgtgcgatgttgtcctctacagccatgtattcggctcctggcagagacttggggatggaaccgcacagagccgcgggccctttgcagctgcgattttcgccctacgttttcaacggaggtactatactggcaattgctggagaagattttgcaattgttgcttctgatactcgattgagtgaagggttttcaattcatacgcgggatagccccaaatgttacaaattaacagacaaaacagtcattggatgcagcggttttcatggagactgtcttacgctgacaaagattattgaagcaagactaaagatgtataagcattccaataataaggccatgactacgggggcaattgctgcaatgctgtctacaatcctgtattcaaggcgcttctttccatactatgtttacaacatcatcggtggacttgatgaagaaggaaagggggctgtatacagctttgatccagtagggtcttaccagagagactccttcaaggctggaggctcagcaagtgccatgctacagcccctgcttgacaaccaggttggttttaagaacatgcagaatgtggagcatgttccgctgtccttggacagagccatgcggctggtgaaagatgtcttcatttctgcggctgagagagatgtgtacactggggacgcactccggatctgcatagtgaccaaagagggcatcagggaggaaactgtttccttaaggaaggactgatctgtgtgctcttatcaccaatcagttcagacctggttgattttgtactttggaactgtaccttggatggttttgtttattaaaagagaaacctgaagtactc

SEQ ID NO: 132041 - DNA, 660 bp, Artificial Sequence
  derived and/or modified sequence
gagaagccggaagtggcgtaacgtccggtcaaggcagccatctcgccgtgagacagcaagtgtcggatccgcaggcgcagccgtgcgatgttgtcctctacagccatgtattcggctcctggcagagacttggggatggaaccgcacagagccgcgggccctttgcagctgcgattttcgccctacgttttcaacggaggtactatactggcaattgctggagaagattttgcaattgttgcttctgatactcgattgagtgaagggttttcaattcatacgcgggatagccccaaatgttacaaattaacagacaaaacagtcattggatgcagcggttttcatggagactgtcttacgctgacaaagattattgaagcaagactaaagatgtataagcattccaataataaggccatgactacgggggcaattgctgcaatgctgtctacaatcctgtattcaaggcgcttctttccatactatgtttacaacatcatcggtggacttgatgaagaaggaaagggggctgtatacagctttgatccagtagggtcttaccagagagactccttcaaggctggaggctcagcaagtgccatgctacagcccctgcttgacaaccagtacatatcaagcaattcagtcagtttatgtgta

SEQ ID NO: 132042 - DNA, 726 bp, Artificial Sequence
  derived and/or modified sequence
atgctgagcagcaccgccatgtacagcgcccccggcagagacctgggcatggagccccacagagccgccggccccctgcagctgagattcagcccctacgtgttcaacggcggcaccatcctggccatcgccggcgaggacttcgccatcgtggccagcgacaccagactgagcgagggcttcagcatccacaccagagacagccccaagtgctacaagctgaccgacaagaccgtgatcggctgcagcggcttccacggcgactgcctgaccctgaccaagatcatcgaggccagactgaagatgtacaagcacagcaacaacaaggccatgaccaccggcgccatcgccgccatgctgagcaccatcctgtacagcagaagattcttcccctactacgtgtacaacatcatcggcggcctggacgaggagggcaagggcgccgtgtacagcttcgaccccgtgggcagctaccagagagacagcttcaaggccggcggcagcgccagcgccatgctgcagcccctgctggacaaccaggtgggcttcaagaacatgcagaacgtggagcacgtgcccctgagcctggacagagccatgagactggtgaaggacgtgttcatcagcgccgccgagagagacgtgtacaccggcgacgccctgagaatctgcatcgtgaccaaggagggcatcagagaggagaccgtgagcctgagaaaggactag

SEQ ID NO: 132043 - DNA, 591 bp, Artificial Sequence
  derived and/or modified sequence
agaagaagcagagccatgctgagcagcaccgccatgtacagcgcccccggcagagacctgggcatggagccccacagagccgccggccccctgcagctgagattcagcccctacgtgttcaacggcggcaccatcctggccatcgccggcgaggacttcgccatcgtggccagcgacaccagactgagcgagggcttcagcatccacaccagagacagccccaagtgctacaagctgaccgacaagaccgtgatcggctgcagcggcttccacggcgactgcctgaccctgaccaagatcatcgaggccagactgaagatgtacaagcacagcaacaacaaggccatgaccaccggcgccatcgccgccatgctgagcaccatcctgtacagcagaagattcttcccctactacgtgtacaacatcatcggcggcctggacgaggagggcaagggcgccgtgtacagcttcgaccccgtgggcagctaccagagagacagcttcaaggccggcggcagcgccagcgccatgctgcagcccctgctggacaaccagtacatcagcagcaacagcgtgagcctgtgcgtgtag

SEQ ID NO: 132044 - protein, 264 aa, Artificial Sequence
  derived and/or modified sequence
MEAFLGSRSGLWAGGPAPGQFYRIPSTPDSFMDPASALYRGPITRTQNPMVTGTSVLGVKFEGGVVIAADMLGSYGSLARFRNISRIMRVNNSTMLGASGDYADFQYLKQVLGQMVIDEELLGDGHSYSPRAIHSWLTRAMYSRRSKMNPLWNTMVIGGYADGESFLGYVDMLGVAYEAPSLATGYGAYLAQPLLREVLEKQPVLSQTEARDLVERCMRVLYYRDARSYNRFQIATVTEKGVEIEGPLSTETNWDIAHMISGFE

SEQ ID NO: 132045 - DNA, 795 bp, Artificial Sequence
  derived and/or modified sequence
atggaagcctttctcggaagccgttcagggctgtgggctggagggccagcaccgggccagttctatcgaattccctcaacacctgacagctttatggatcctgctagcgcactatacagagggcccatcacacggacgcaaaatcccatggtgacaggtacgtctgtgctgggggttaaatttgaaggaggagttgtcatcgcagccgatatgctcggcagctacggatccctggctcgtttcagaaacatctctcgcattatgcgggtgaataacagcaccatgctgggcgctagcggtgactatgccgatttccagtaccttaaacaagtgctgggacaaatggtaatcgatgaggagttacttggggatggccactcatattcacccagagcgattcattcctggctgacaagggcgatgtactctcgacggtccaaaatgaaccccctgtggaacactatggttatcggaggttacgctgatggggaatcatttctcggctacgtagacatgttaggcgtcgcctatgaggccccttccctcgctaccggttacggggcttacctcgcccagcctctgctccgtgaggtcctcgagaagcagcctgtactgtcacagaccgaagccagggaccttgtggagagatgtatgagagttctgtattacagagacgccagaagctataataggttccaaatagctactgtcaccgagaagggagtcgagattgagggtcccctctctacagaaactaactgggatatcgctcatatgatctccgggtttgaatag

SEQ ID NO: 132046 - DNA, 795 bp, Artificial Sequence
  derived and/or modified sequence
atggaggccttcctgggcagccgcagcggcctgtgggccggcggccctgcccctggccagttctaccgcatccccagcaccccagacagcttcatggaccctgccagcgccctgtaccggggccccatcaccaggacccagaaccccatggtgacaggcacctctgtgctgggcgtgaagtttgaaggaggagtggtgattgctgctgacatgctgggcagctatggcagcctggcccgcttcaggaacatcagccgcatcatgagggtgaacaacagcaccatgctgggcgccagcggggactatgctgacttccagtacctgaagcaggtgctgggccagatggtgattgatgaggagctgctgggagatggccacagctacagcccccgggccatccacagctggctgacccgggccatgtacagccgccgcagcaagatgaaccccctgtggaacaccatggtgattggaggctatgcagatggagagagcttcctgggctacgtggacatgctgggcgtggcctatgaggcccccagcctggccaccggctacggggcctacctggcccagcccctgctgcgggaggtgctggagaagcagcctgtgctgagccagacagaggcccgggacctggtggagcgctgcatgagggtgctgtactacagagatgcccggagctacaaccgcttccagatcgccaccgtgacagagaagggcgtggagattgagggccccctgagcacagagaccaactgggacatcgcccacatgatcagcggctttgaatag

SEQ ID NO: 132047 - DNA, 795 bp, Artificial Sequence
  derived and/or modified sequence
atggaggccttcctgggcagccggagcggcctgtgggccggcggccccgcccccggacagttctatagaattccatccacacctgactcatttatggacccggcctccgccctgtatcgcggccctatcacaaggacacagaacccaatggttacgggcacatccgtcctcggcgtgaagttcgaggggggggtggtgattgccgcagacatgcttggctcctacgggagtctggcccgattcagaaacatctctagaattatgcgagtcaataattccacaatgctgggcgcttctggggattatgccgatttccagtatttgaagcaggttttgggacagatggtgatcgatgaggagctattgggcgacgggcacagttactcaccccgagcgatccattcttggctgacccgagctatgtactcaaggagatcaaagatgaaccccctgtggaatacgatggtcataggagggtatgccgatggcgagagttttctaggctacgttgatatgctgggagtcgcttacgaggctccctctctggccaccgggtacggggcttatctcgcgcagcccttgctccgcgaggtgttagagaaacagcccgtgctgtcacagaccgaagctcgggacctggtcgagcgctgtatgcgggtactgtattatagggacgcaaggagttataataggttccagatcgccacggtcactgaaaagggtgtagagatagagggccccctgagcactgagacaaattgggacatcgctcacatgatctccggtttcgagtag

SEQ ID NO: 132048 - DNA, 795 bp, Artificial Sequence
  derived and/or modified sequence
atggaggcatttctgggctccaggtccgggctatgggctgggggaccagcccctggccagttttataggattccttcaaccccggactctttcatggaccctgcctcagcactatatagggggccaattacaagaacgcagaaccctatggtgacgggaaccagtgtcttgggcgtcaagtttgaaggtggtgtagtgatagctgccgacatgctgggatcttacggctctctggctcgatttcgcaacattagcaggatcatgcgcgttaataattctaccatgctcggagcctctggcgactatgcagatttccagtatctcaaacaagtgctcggccaaatggttatcgatgaggaactgctgggagacggccactcctatagcccaagggcaattcatagctggctaacccgtgcaatgtacagcagacgcagtaaaatgaatcctctgtggaacaccatggttatcggcggttacgctgacggtgagtctttcctaggctatgtggacatgctgggagtggcctatgaggcgccttcacttgcaactggatatggggcttatctggctcagccactcttacgcgaagtcctggagaaacaaccggtgctgtcccagaccgaggcccgtgacctcgtagagaggtgtatgagagtgctttattatagggacgcacgctcctataatcgcttccagatcgcaaccgttaccgaaaagggggtggagatagaaggcccactctccactgaaacgaactgggacatagctcacatgattagtggcttcgaatag

SEQ ID NO: 132049 - DNA, 964 bp, Artificial Sequence
  derived and/or modified sequence
acttccgcttccgttggcgcaagcgctttcattttttctgctaccgtgactaagatggaagcgtttttggggtcgcggtccggactttgggcggggggtccggccccaggacagttttaccgcattccgtccactcccgattccttcatggatccggcgtctgcactttacagaggtccaatcacgcggacccagaaccccatggtgaccgggacctcagtcctcggcgttaagttcgagggcggagtggtgattgccgcagacatgctgggatcctacggctccttggctcgtttccgcaacatctctcgcattatgcgagtcaacaacagtaccatgctgggtgcctctggcgactacgctgatttccagtatttgaagcaagttctcggccagatggtgattgatgaggagcttctgggagatggacacagctatagtcctagagctattcattcatggctgaccagggccatgtacagccggcgctcgaagatgaaccctttgtggaacaccatggtcatcggaggctatgctgatggagagagcttcctcggttatgtggacatgcttggtgtagcctatgaagccccttcgctggccactggttatggtgcatacttggctcagcctctgctgcgagaagttctggagaagcagccagtgctaagccagaccgaggcccgcgacttagtagaacgctgcatgcgagtgctgtactaccgagatgcccgttcttacaaccggtttcaaatcgccactgtcaccgaaaaaggtgttgaaatagagggaccattgtctacagagaccaactgggatattgcccacatgatcagtggctttgaatgaaatacagatgcattatccagaactgaagttgccctacttttaactttgaacttggctagttcaaagatagactcttcttttgtaaagtaaataaattcttcaaaatgcttgctga

SEQ ID NO: 132050 - DNA, 795 bp, Artificial Sequence
  derived and/or modified sequence
atggaggccttcctgggcagcagaagcggcctgtgggccggcggccccgcccccggccagttctacagaatccccagcacccccgacagcttcatggaccccgccagcgccctgtacagaggccccatcaccagaacccagaaccccatggtgaccggcaccagcgtgctgggcgtgaagttcgagggcggcgtggtgatcgccgccgacatgctgggcagctacggcagcctggccagattcagaaacatcagcagaatcatgagagtgaacaacagcaccatgctgggcgccagcggcgactacgccgacttccagtacctgaagcaggtgctgggccagatggtgatcgacgaggagctgctgggcgacggccacagctacagccccagagccatccacagctggctgaccagagccatgtacagcagaagaagcaagatgaaccccctgtggaacaccatggtgatcggcggctacgccgacggcgagagcttcctgggctacgtggacatgctgggcgtggcctacgaggcccccagcctggccaccggctacggcgcctacctggcccagcccctgctgagagaggtgctggagaagcagcccgtgctgagccagaccgaggccagagacctggtggagagatgcatgagagtgctgtactacagagacgccagaagctacaacagattccagatcgccaccgtgaccgagaagggcgtggagatcgagggccccctgagcaccgagaccaactgggacatcgcccacatgatcagcggcttcgagtag

SEQ ID NO: 132051 - protein, 263 aa, Artificial Sequence
  derived and/or modified sequence
MALASVLERPLPVNQRGFFGLGGRADLLDLGPGSLSDGLSLAAPGWGVPEEPGIEMLHGTTTLAFKFRHGVIVAADSRATAGAYIASQTVKKVIEINPYLLGTMAGGAADCSFWERLLARQCRIYELRNKERISVAAASKLLANMVYQYKGMGLSMGTMICGWDKRGPGLYYVDSEGNRISGATFSVGSGSVYAYGVMDRGYSYDLEVEQAYDLARRAIYQATYRDAYSGGAVNLYHVREDGWIRVSSDNVADLHEKYSGSTP

SEQ ID NO: 132052 - protein, 160 aa, Artificial Sequence
  derived and/or modified sequence
MAGGAADCSFWERLLARQCRIYELRNKERISVAAASKLLANMVYQYKGMGLSMGTMICGWDKRGPGLYYVDSEGNRISGATFSVGSGSVYAYGVMDRGYSYDLEVEQAYDLARRAIYQATYRDAYSGGAVNLYHVREDGWIRVSSDNVADLHEKYSGSTP

SEQ ID NO: 132053 - DNA, 792 bp, Artificial Sequence
  derived and/or modified sequence
atggccctggcttcagttctggaacgacccctgcctgtgaaccagagggggtttttcggtttggggggccgcgccgatctgctggatctcgggccaggcagtctcagtgatggattgagcctcgcagcaccaggctggggcgtccccgaggaaccaggaatcgaaatgttacacggtactactacactggcatttaagtttcgccacggggtaatcgttgcggcggactctagggccaccgccggagcctacattgcgagccagaccgttaagaaagtgatcgaaatcaacccatacctacttggtaccatggccggaggggccgccgattgctctttctgggaaagactcttggcacgtcagtgtcgtatctatgagctccggaacaaggagcgaatatctgtcgccgcggctagtaagctgctcgccaatatggtgtaccaatataaaggaatgggcctaagtatgggcactatgatttgcgggtgggataagcgcggcccaggactgtattacgttgacagcgagggcaacagaatctcaggggcgactttttccgtcggttctggaagtgtctacgcttatggcgtgatggaccgaggatattcttacgacctcgaggtggaacaagcctatgacctagcacgccgtgcgatttatcaggccacatacagagacgcctactctggcggtgcagtgaacttgtatcacgtgagggaagacggatggattagggtttccagcgacaatgtggccgacctgcatgagaaatatagcgggtcaacgccatag

SEQ ID NO: 132054 - DNA, 792 bp, Artificial Sequence
  derived and/or modified sequence
atggccctggcctctgtgctggagcggcccctgcctgtgaaccagaggggcttcttcggcctgggcggccgggctgacctgctggacctgggccctggcagcctgagtgatggcctgagcctggccgcccctggctggggcgtgcctgaggagcccggcatcgagatgctgcacggcaccaccaccctggccttcaagttcagacatggagtcatcgtggccgctgacagccgggccacagctggggcctacatcgccagccagacagtgaagaaggtgattgagatcaacccctacctgctgggcaccatggccggcggcgctgctgactgcagcttctgggagcggctgctggcccggcagtgccgcatctatgagctgaggaacaaggagcgcatctctgtggccgccgccagcaagctgctggccaacatggtgtaccagtacaagggcatgggcctgtccatgggcaccatgatctgtggctgggacaagaggggccctggcctgtactacgtggacagcgagggcaaccgcatcagcggggccaccttctctgtgggcagcggctctgtgtatgcctatggagtgatggaccggggctacagctatgacctggaggtggagcaggcctatgacctggcccggcgggccatctaccaggccacctacagagatgcctacagcggcggcgctgtgaacctgtaccacgtgcgggaggatggctggatccgggtgtccagtgacaacgtggccgacctgcacgagaagtacagcggcagcaccccctag

SEQ ID NO: 132055 - DNA, 792 bp, Artificial Sequence
  derived and/or modified sequence
atggccctggccagcgtgctggagcggcccctgcccgtgaaccagaggggattttttgggctcggcggccgcgccgaccttctagacctgggccccggcagcctgagtgatgggctcagcttagccgcccctggatggggcgttcccgaggagcctgggatagagatgctgcacggtacaactaccctcgcctttaaatttagacacggggtgattgtggccgctgattcaagagcgactgcgggcgcctatatagcctcccagaccgtgaaaaaggttatagagatcaacccgtatctgcttggaactatggcaggcggagccgccgactgctcattctgggaaaggttgctcgctcgacaatgtagaatatacgaactcagaaacaaagagaggattagcgtggcagccgcctctaagctactggcgaatatggtctatcagtataagggcatggggttgagcatggggacaatgatctgtggctgggataagaggggtccagggctctattacgtggattcagaaggaaaccgcatctccggcgcaactttttctgtcggatccggttccgtatatgcttatggggtcatggatagaggctattcatacgacctggaggtggaacaggcttatgacctggctcgaagggccatataccaagcgacatatcgcgacgcttatagtggtggagctgtaaacctgtaccacgtgagggaagatggatggattcgcgtcagctctgacaatgttgctgacttgcacgaaaaatattctggctcgacaccgtag

SEQ ID NO: 132056 - DNA, 792 bp, Artificial Sequence
  derived and/or modified sequence
atggccctggcctcagtgctcgaacggccactgcccgttaatcagagggggttttttggactgggcggaagggccgacttgctcgatctgggccctggaagtttgtcagatggcctttcccttgcagccccagggtggggtgtccccgaagagccaggtatcgaaatgctacatggaacaaccacacttgcttttaaatttcgacacggagtaatcgtggccgcagactctcgcgcaactgctggagcctatattgcttcccagacagtaaagaaggtgattgagatcaacccatatctgttaggcaccatggctgggggtgcagcagactgctccttctgggaaaggctgttggcacgacagtgtcggatctatgagctgaggaataaggaacgaatttccgttgccgctgcatctaagctgctcgctaacatggtgtatcaatacaaaggcatgggacttagtatggggaccatgatatgcggttgggataagcgcggtcctggtctctattatgttgactccgaagggaaccggatctctggagcaactttctccgtggggtcaggctcggtttatgcttatggcgtaatggatagaggttattcctacgatctggaggtggagcaggcctacgatttggccagacgagcaatttatcaggctacgtaccgagatgcctattcgggcggagcagtaaacctgtatcacgtgcgagaagatgggtggattagggtgagttcagataacgtcgcagatctgcacgaaaagtacagtggaagcacaccctag

SEQ ID NO: 132057 - DNA, 1294 bp, Artificial Sequence
  derived and/or modified sequence
aggactacttgcatgaccaaagccaagatggcaggtacgtccttttagaatttaaggttagtgaagccatctatttccccgacccccttcagtgaaaatggtctttcgcatctggcccttctttttggaggcgtgcttgccagcagtcaaaatggctccattccggaatagatttaataggaagtgaagctgtgacggcgaggcgttgcccggcctatctttgctaggcgttctcagaattagttctttctgcccacactagacatggcgcttgccagcgtgttggagagaccgctaccggtgaaccagcgcgggtttttcggacttgggggtcgtgcagatctgctggatctaggtccagggagtctcagtgatggtctgagcctggccgcgccaggctggggtgtcccagaagagccaggaatcgaaatgcttcatggaacaaccaccctggccttcaagttccgccatggagtcatagttgcagctgactccagggctacagcgggtgcttacattgcctcccagacggtgaagaaggtgatagagatcaacccatacctgctaggcaccatggctgggggcgcagcggattgcagcttctgggaacggctgttggctcggcaatgtcgaatctatgagcttcgaaataaggaacgcatctctgtagcagctgcctccaaactgcttgccaacatggtgtatcagtacaaaggcatggggctgtccatgggcaccatgatctgtggctgggataagagaggccctggcctctactacgtggacagtgaagggaaccggatttcaggggccaccttctctgtaggttctggctctgtgtatgcatatggggtcatggatcggggctattcctatgacctggaagtggagcaggcctatgatctggcccgtcgagccatctaccaagccacctacagagatgcctactcaggaggtgcagtcaacctctaccacgtgcgggaggatggctggatccgagtctccagtgacaatgtggctgatctacatgagaagtatagtggctctaccccctgaaagagggtggatgcagctgcttgtgtttcttggggtgactgtcattggtaatacggacacagtgacccatcctccatcctatttatagtggaagggccttcaattgtatcagtacttttttttaagctctggcacattgacctctatgtgttaccagtcattaatgagctgctgcagaggtgactatttgttttactttcttggatgttaacattacactactcactactcaatctca

SEQ ID NO: 132058 - DNA, 900 bp, Artificial Sequence
  derived and/or modified sequence
cttctcaaagatggccgacctcacttcccttacgcaacatggacgttttcagtcacttcctgtgattttgaggttattctgatccaggactacttgcatgaccaaagccaagatggcagttccgccatggagtcatagttgcagctgactccagggctacagcgggtgcttacattgcctcccagacggtgaagaaggtgatagagatcaacccatacctgctaggcaccatggctgggggcgcagcggattgcagcttctgggaacggctgttggctcggcaatgtcgaatctatgagcttcgaaataaggaacgcatctctgtagcagctgcctccaaactgcttgccaacatggtgtatcagtacaaaggcatggggctgtccatgggcaccatgatctgtggctgggataagagaggccctggcctctactacgtggacagtgaagggaaccggatttcaggggccaccttctctgtaggttctggctctgtgtatgcatatggggtcatggatcggggctattcctatgacctggaagtggagcaggcctatgatctggcccgtcgagccatctaccaagccacctacagagatgcctactcaggaggtgcagtcaacctctaccacgtgcgggaggatggctggatccgagtctccagtgacaatgtggctgatctacatgagaagtatagtggctctaccccctgaaagagggtggatgcagctgcttgtgtttcttggggtgactgtcattggtaatacggacacagtgacccatcctccatcctatttatagtggaagggccttcaattgtatcagtacttttttttaagctctggcacattgacctctatgtgttaccagtcattaatgagctgctgcagaggtgactat

SEQ ID NO: 132059 - DNA, 1117 bp, Artificial Sequence
  derived and/or modified sequence
acactagacatggcgcttgccagcgtgttggagagaccgctaccggtgaaccagcgcgggtttttcggacttgggggtcgtgcagatctgctggatctaggtccagggagtctcagtgatggtctgagcctggccgcgccaggctggggtgtcccagaagagccaggaatcgaaatgcttcatggaacaaccaccctggccttcaagttccgccatggagtcatagttgcagctgactccagggctacagcgggtgcttacattgcctcccagacggtgaagaaggtgatagagatcaacccatacctgctaggcaccatggctgggggcgcagcggattgcagcttctgggaacggctgttggctcggcaatgtcgaatctatgagcttcgaaataaggaacgcatctctgtagcagctgcctccaaactgcttgccaacatggtgtatcagtacaaaggcatggggctgtccatgggcaccatgatctgtggctgggataagagaggccctgtgtctgaagttctgtgcttgaaacctaagtcatttggaatgtacttgttttgtgggtgtgctgagaggatcggcaacatggcaaggcctctactacgtggacagtgaagggaaccggatttcaggggccaccttctctgtaggttctggctctgtgtatgcatatggggtcatggatcggggctattcctatgacctggaagtggagcaggcctatgatctggcccgtcgagccatctaccaagccacctacagagatgcctactcaggaggtgcagtcaacctctaccacgtgcgggaggatggctggatccgagtctccagtgacaatgtggctgatctacatgagaagtatagtggctctaccccctgaaagagggtggatgcagctgcttgtgtttcttggggtgactgtcattggtaatacggacacagtgacccatcctccatcctatttatagtggaagggccttcaattgtatcagtacttttttttaagctctggcacattgacctctatgtgttaccagtcattaatgagctgctgcagaggtgactatttgttttactttcttggatgttaacattacactactcactactc

SEQ ID NO: 132060 - DNA, 792 bp, Artificial Sequence
  derived and/or modified sequence
atggccctggccagcgtgctggagagacccctgcccgtgaaccagagaggcttcttcggcctgggcggcagagccgacctgctggacctgggccccggcagcctgagcgacggcctgagcctggccgcccccggctggggcgtgcccgaggagcccggcatcgagatgctgcacggcaccaccaccctggccttcaagttcagacacggcgtgatcgtggccgccgacagcagagccaccgccggcgcctacatcgccagccagaccgtgaagaaggtgatcgagatcaacccctacctgctgggcaccatggccggcggcgccgccgactgcagcttctgggagagactgctggccagacagtgcagaatctacgagctgagaaacaaggagagaatcagcgtggccgccgccagcaagctgctggccaacatggtgtaccagtacaagggcatgggcctgagcatgggcaccatgatctgcggctgggacaagagaggccccggcctgtactacgtggacagcgagggcaacagaatcagcggcgccaccttcagcgtgggcagcggcagcgtgtacgcctacggcgtgatggacagaggctacagctacgacctggaggtggagcaggcctacgacctggccagaagagccatctaccaggccacctacagagacgcctacagcggcggcgccgtgaacctgtaccacgtgagagaggacggctggatcagagtgagcagcgacaacgtggccgacctgcacgagaagtacagcggcagcaccccctag

SEQ ID NO: 132061 - protein, 239 aa, Artificial Sequence
  derived and/or modified sequence
MAATLLAARGAGPAPAWGPEAFTPDWESREVSTGTTIMAVQFDGGVVLGADSRTTTGSYIANRVTDKLTPIHDRIFCCRSGSAADTQAVADAVTYQLGFHSIELNEPPLVHTAASLFKEMCYRYREDLMAGIIIAGWDPQEGGQVYSVPMGGMMVRQSFAIGGSGSSYIYGYVDATYREGMTKEECLQFTANALALAMERDGSSGGVIRLAAIAESGVERQVLLGDQIPKFAVATLPPA

SEQ ID NO: 132062 - DNA, 720 bp, Artificial Sequence
  derived and/or modified sequence
atggccgcaactctgcttgcagcacggggggccggccctgctcctgcctggggtccagaggcctttacccctgactgggaatcaagggaggtttccacaggaactaccatcatggccgtccaatttgatggaggagtagtgctgggcgcagattcacgcaccacaactggctcttacatagcgaaccgcgtaacagacaaactcacgccaatccacgataggatcttctgttgtcgaagcggctctgcagcagacacccaggccgtggctgatgcagtgacatatcagttagggtttcacagcattgagctgaatgaaccccccttagtgcataccgcagcctctttgttcaaagaaatgtgctaccggtacagggaggacttgatggccggaataatcatcgcaggctgggaccctcaggagggcggccaggtgtatagtgtgcctatgggaggtatgatggttcgccagtcgtttgcaattggagggtccggcagcagttacatttatggatacgttgatgctacatatagggaagggatgacgaaagaagaatgtttacagtttaccgcgaacgcgctagcactggccatggagagggatgggagcagcggaggggtcattcggctcgccgccatcgcagaaagtggcgtggagagacaggttctgcttggggaccagatccctaaatttgctgttgctaccctgccccctgcctag

SEQ ID NO: 132063 - DNA, 720 bp, Artificial Sequence
  derived and/or modified sequence
atggccgccaccctgctggccgcccggggagctggccctgccccagcctggggccctgaggccttcaccccagactgggagagccgggaggtgtccacaggcaccaccatcatggctgtgcagtttgatggaggagtggtgctgggcgctgacagcaggaccaccaccggcagctacatcgccaacagagtgacagacaagctgacccccatccatgaccgcatcttctgctgccgcagcggcagcgctgctgacacccaggccgtggctgatgctgtgacctaccagctgggcttccacagcattgagctgaatgaaccacccctggtgcacacagctgccagcctcttcaaggagatgtgctaccgctaccgggaggacctgatggccggcatcatcatcgccggctgggacccccaggagggcggccaggtgtacagcgtgcccatgggcggcatgatggtgcggcagagctttgccatcggcggcagcggcagcagctacatctacggctacgtggatgccacctaccgggagggcatgaccaaggaggagtgcctgcagttcaccgccaatgccctggccctggccatggagagagatggcagcagcggcggcgtcatccggctggccgccatcgccgagagcggcgtggagcggcaggtgctgctgggggaccagatccccaagtttgctgtggccaccctgcccccagcctag

SEQ ID NO: 132064 - DNA, 720 bp, Artificial Sequence
  derived and/or modified sequence
atggccgccaccctgctggccgcccggggcgccggccccgcccccgcttggggcccagaggcttttactcctgattgggagagcagggaagtgagcacgggtactacaatcatggccgtccaatttgatgggggggtggtgcttggtgcggatagccgcacaaccaccggaagctacattgctaatagggtcacagacaagctgacgcctatccatgaccggatattctgctgccgctcaggatccgccgctgacacccaggccgtggccgacgcagtcacctatcaactggggttccattcaattgaactgaacgagcccccactagtacacactgcagcctctctcttcaaggagatgtgctaccgatacagggaggaccttatggctgggattattatcgcgggatgggacccacaagaaggaggccaagtttactctgtccctatgggcggaatgatggtgcggcagagcttcgccataggagggagcggaagtagctatatatacggctacgtggacgctacctaccgggagggtatgactaaggaggaatgccttcagtttacagctaacgcgctcgccctcgccatggagcgagacggatcttcgggaggcgtcattcgtctagccgccattgctgagtccggtgtggagagacaggtgcttctcggtgaccagataccaaaattcgccgttgcgactctgcctccagcttag

SEQ ID NO: 132065 - DNA, 720 bp, Artificial Sequence
  derived and/or modified sequence
atggccgctacgttactagcagctcgtggagccggtcccgctccagcctggggcccagaagccttcaccccggactgggaaagtagagaggtttccaccggaacgacaataatggccgtgcagtttgatggcggtgtcgtgttgggtgccgatagcaggacgactacgggtagctatatagccaaccgagtgacagataaactgacccctatccatgacaggatattctgctgtcgctctgggagcgccgcagatacccaagccgtagccgatgctgtcacataccagcttgggtttcactccatcgaactgaacgagccacccctggtacacactgccgcatccctatttaaagagatgtgttatcggtatcgggaagacctcatggcgggaatcatcatcgctgggtgggacccacaggagggagggcaggtgtacagcgtccctatgggcggaatgatggtcagacagtctttcgccattggcggaagtggttcgtcttacatctacggttacgtagacgctacttatagagaaggtatgacaaaagaggagtgcctgcagttcaccgccaatgcactagctctggcaatggaaagagatgggagcagcggaggggttatcaggctcgccgctattgccgaatccggtgtggagcggcaagtcctgctaggagaccagatccccaagttcgctgtggccaccttacccccagcttag

SEQ ID NO: 132066 - DNA, 852 bp, Artificial Sequence
  derived and/or modified sequence
gtgacagagcgctttacgacagttgctttgaggcagtaccggaggagaaagatggcggctaccttactagctgctcggggagccgggccagcaccggcttgggggccggaggcgttcactccagactgggaaagccgagaagtttccactgggaccactatcatggccgtgcagtttgacgggggcgtggttctgggggcggactccagaacaaccactgggtcctacatcgccaatcgagtgactgacaagctgacacctattcacgaccgcattttctgctgtcgctcaggctcagctgctgatacccaggcagtagctgatgctgtcacctaccagctcggtttccacagcattgaactgaatgagcctccactggtccacacagcagccagcctctttaaggagatgtgttaccgataccgggaagacctgatggcgggaatcatcatcgcaggctgggaccctcaagaaggagggcaggtgtactcagtgcctatggggggtatgatggtaaggcagtcctttgccattggaggctccgggagctcctacatctatggctatgttgatgctacctaccgggaaggcatgaccaaggaagagtgtctgcaattcactgccaatgctctcgctttggccatggagcgggatggctccagtggaggagtgatccgcctggcagccattgcagagtcaggggtagagcggcaagtacttttgggagaccagatacccaaattcgccgttgccactttaccacccgcctgaatcctgggattctagtatgcaataagagatgccctgtactgatgcaaaatttaataaagtttgtcacagagaatctttgta

SEQ ID NO: 132067 - DNA, 720 bp, Artificial Sequence
  derived and/or modified sequence
atggccgccaccctgctggccgccagaggcgccggccccgcccccgcctggggccccgaggccttcacccccgactgggagagcagagaggtgagcaccggcaccaccatcatggccgtgcagttcgacggcggcgtggtgctgggcgccgacagcagaaccaccaccggcagctacatcgccaacagagtgaccgacaagctgacccccatccacgacagaatcttctgctgcagaagcggcagcgccgccgacacccaggccgtggccgacgccgtgacctaccagctgggcttccacagcatcgagctgaacgagccccccctggtgcacaccgccgccagcctgttcaaggagatgtgctacagatacagagaggacctgatggccggcatcatcatcgccggctgggacccccaggagggcggccaggtgtacagcgtgcccatgggcggcatgatggtgagacagagcttcgccatcggcggcagcggcagcagctacatctacggctacgtggacgccacctacagagagggcatgaccaaggaggagtgcctgcagttcaccgccaacgccctggccctggccatggagagagacggcagcagcggcggcgtgatcagactggccgccatcgccgagagcggcgtggagagacaggtgctgctgggcgaccagatccccaagttcgccgtggccaccctgccccccgcctag

SEQ ID NO: 132068 - protein, 277 aa, Artificial Sequence
  derived and/or modified sequence
MAAVSVYAPPVGGFSFDNCRRNAVLEADFAKRGYKLPKVRKTGTTIAGVVYKDGIVLGADTRATEGMVVADKNCSKIHFISPNIYCCGAGTAADTDMTTQLISSNLELHSLSTGRLPRVVTANRMLKQMLFRYQGYIGAALVLGGVDVTGPHLYSIYPHGSTDKLPYVTMGSGSLAAMAVFEDKFRPDMEEEEAKNLVSEAIAAGIFNDLGSGSNIDLCVISKNKLDFLRPYTVPNKKGTRLGRYRCEKGTTAVLTEKITPLEIEVLEETVQTMDTS

SEQ ID NO: 132069 - protein, 210 aa, Artificial Sequence
  derived and/or modified sequence
MAAVSVYAPPVGGFSFDNCRRNAVLEADFAKRGYKLPKVRKTGTTIAGVVYKDGIVLGADTRATEGMVVADKNCSKIHFISPNIYCCGAGTAADTDMTTQLISSNLELHSLSTGRLPRVVTANRMLKQMLFRYQGYIGAALVLGGVDVTGPHLYSIYPHGSTDKLPYVTMVHCEEELFTENLFFIRQAEVVSEEAWGPSFAISLAVFLVA

SEQ ID NO: 132070 - protein, 142 aa, Artificial Sequence
  derived and/or modified sequence
MAAVSVYAPPVGGFSFDNCRRNAVLEADFAKRGYKLPKVRKTGTTIAGVVYKDGIVLGADTRATEGMVVADKNCSKIHFISPNIYCCGAGTAADTDMTTQLISSNLELHSLSTGRLPRVVTANRMLKQMLFRFWLLGSNGCI

SEQ ID NO: 132071 - DNA, 834 bp, Artificial Sequence
  derived and/or modified sequence
atggcggctgtcagtgtctacgccccccccgttggggggttctcctttgacaattgccggcggaacgccgtccttgaagccgattttgcgaagaggggctataaactccctaaggtcagaaagaccggcactacaattgcaggtgttgtctacaaggatgggattgtcttaggagccgacaccagggccacagaaggaatggtggttgcagataagaattgttctaagatccattttatctctccaaatatctactgttgtggcgctgggacggccgcggatacagatatgacaacacaacttatatcctcaaacctggagctccacagcttgtcaactgggcgactaccgcgagtcgtcactgcaaacagaatgctcaaacagatgctgtttcgatatcaggggtacatcggcgctgcacttgtgctcgggggcgttgacgtgacaggacctcatctgtattcaatttatccccacggaagcaccgacaaactcccgtacgtaaccatgggcagcggcagcctggctgccatggctgtgttcgaagataagtttcggcccgatatggaggaggaggaggcaaagaatcttgtgagcgaggctatcgcagcaggcattttcaatgatttggggtcagggtcaaacatcgatctgtgcgtgatcagcaagaacaagctggacttcctcagaccttacaccgttccaaataaaaaagggactagactcgggcgctaccggtgcgagaagggtactacagccgtcctgaccgaaaagattaccccgctggagattgaagttttggaggagaccgtgcaaaccatggacaccagctag

SEQ ID NO: 132072 - DNA, 633 bp, Artificial Sequence
  derived and/or modified sequence
atggccgctgtgtctgtttatgccccccctgtgggcggattctcctttgataattgcagacgcaatgccgtcctggaagcagacttcgcaaagagaggctataaactgcctaaagtccgaaagaccgggaccacgatcgccggcgtcgtttataaggatggaattgtattgggggcagacacccgtgccacagagggcatggttgttgccgataaaaattgcagcaagattcatttcatctcccccaacatctactgttgcggtgccggaacagccgcagataccgacatgactacacaattgatttcatctaacctcgaactgcattcgttaagtaccggaagactgccccgagtggtaaccgctaataggatgctcaagcagatgctcttccgataccaaggctatattggcgccgcactggtcctgggcggagtcgatgtgactggtcctcatctctattccatctatcctcacgggtctacagacaaactaccctacgttaccatggtacactgtgaggaagaactgttcacagagaatctattctttatccggcaggcagaggttgtgtctgaggaggcttggggaccatcctttgctattagtctggctgtctttttggtggcttag

SEQ ID NO: 132073 - DNA, 429 bp, Artificial Sequence
  derived and/or modified sequence
atggcagcagtaagcgtatacgctcctcctgtgggcggcttctcctttgataactgtaggaggaatgcagttctggaagcagacttcgccaaaagaggctataagctgccaaaagttcggaagactggcaccacaattgcgggcgtggtgtacaaagatgggatcgtgcttggggcagacactcgtgccaccgaaggcatggtggtcgctgacaagaactgttccaaaattcattttatatcccctaacatatattgttgtggggccggcactgctgccgacactgacatgactacgcagctgatatcttccaatctggagttacacagcctgtccacagggcggctgccgagggtagtgacagctaataggatgttgaaacagatgctctttaggttttggctcctcgggtcgaatggatgcatttag

SEQ ID NO: 132074 - DNA, 834 bp, Artificial Sequence
  derived and/or modified sequence
atggctgctgtgtctgtgtatgcccctcctgtgggcggcttctcctttgacaactgcagaagaaatgctgtgctggaggccgactttgccaagaggggctacaagctgcccaaggtgaggaagacaggcaccaccatcgccggcgtggtgtacaaggatggcatcgtgctgggcgctgacacccgggccacagagggcatggtggtggccgacaagaactgcagcaagatccacttcatcagccccaacatctactgctgcggggccggcacagctgctgacacagacatgaccacccagctgatcagcagcaacctggagctgcacagcctgagcacaggccgcctgccccgggtggtgacagccaacaggatgctgaagcagatgctgttccgctaccagggctacatcggggccgccctggtgctgggcggcgtggatgtgacaggcccccacctgtacagcatctacccccacggcagcacagacaagctgccctacgtgaccatgggcagcggcagcctggccgccatggctgtgtttgaggacaagttccggccagacatggaggaggaggaggccaagaacctggtgtctgaggccatcgccgccggcatcttcaatgacctgggcagcggcagcaacatcgacctgtgtgtgatcagcaagaacaagctggacttcctgcggccctacacagtgcccaacaagaagggcacccggctgggccgctaccgctgtgagaagggcaccacagctgtgctgacagagaagatcacccccctggagattgaggtgctggaggagaccgtgcagaccatggacaccagctag

SEQ ID NO: 132075 - DNA, 633 bp, Artificial Sequence
  derived and/or modified sequence
atggctgctgtgtctgtgtatgcccctcctgtgggcggcttctcctttgacaactgcagaagaaatgctgtgctggaggccgactttgccaagaggggctacaagctgcccaaggtgaggaagacaggcaccaccatcgccggcgtggtgtacaaggatggcatcgtgctgggcgctgacacccgggccacagagggcatggtggtggccgacaagaactgcagcaagatccacttcatcagccccaacatctactgctgcggggccggcacagctgctgacacagacatgaccacccagctgatcagcagcaacctggagctgcacagcctgagcacaggccgcctgccccgggtggtgacagccaacaggatgctgaagcagatgctgttccgctaccagggctacatcggggccgccctggtgctgggcggcgtggatgtgacaggcccccacctgtacagcatctacccccacggcagcacagacaagctgccctacgtgaccatggtgcactgtgaggaggagctgttcacagagaacctcttcttcatccggcaggccgaggtggtgtctgaggaggcctggggccccagctttgccatcagcctggccgtgttcctggtggcctag

SEQ ID NO: 132076 - DNA, 429 bp, Artificial Sequence
  derived and/or modified sequence
atggctgctgtgtctgtgtatgcccctcctgtgggcggcttctcctttgacaactgcagaagaaatgctgtgctggaggccgactttgccaagaggggctacaagctgcccaaggtgaggaagacaggcaccaccatcgccggcgtggtgtacaaggatggcatcgtgctgggcgctgacacccgggccacagagggcatggtggtggccgacaagaactgcagcaagatccacttcatcagccccaacatctactgctgcggggccggcacagctgctgacacagacatgaccacccagctgatcagcagcaacctggagctgcacagcctgagcacaggccgcctgccccgggtggtgacagccaacaggatgctgaagcagatgctgttccgcttctggctgctgggcagcaatggctgcatctag

SEQ ID NO: 132077 - DNA, 834 bp, Artificial Sequence
  derived and/or modified sequence
atggccgccgtgagcgtgtacgccccccccgtgggcggcttcagctttgacaactgtagacggaacgccgtgctggaggcagacttcgctaaaagaggatacaagttgccgaaggtccgaaaaaccggtacaaccattgcgggggtcgtatataaggacggcattgtactcggcgcagacacaagggccactgaagggatggttgtagcagataagaattgctccaagattcactttatatcacccaatatttattgctgtggtgccggtactgccgcggacactgacatgacaacccagctgatctcatcaaatctggaactccactcgttgagtacagggagactgcctcgcgtcgtcacagccaatagaatgcttaagcagatgctcttcagatatcaagggtacataggagccgccttagtgctgggcggcgttgacgtgacaggacctcacctgtacagtatttatccgcatgggtctaccgataaactgccctatgttactatgggctctgggagcttagccgctatggccgtgttcgaggacaagttccgtcccgacatggaagaggaagaggccaaaaacttagtgtccgaggccatcgccgccgggattttcaacgatctgggatcaggttctaatatcgacctctgtgttataagcaagaataagttagactttctgaggccctacaccgtgccaaataagaaggggacacgcctgggcaggtaccgctgcgaaaagggcactactgcagtgctgacagagaaaatcacgccgctggagattgaggtcctcgaagagacagtacaaaccatggacactagctag

SEQ ID NO: 132078 - DNA, 633 bp, Artificial Sequence
  derived and/or modified sequence
atggccgccgtgagcgtgtacgccccccccgtgggcggcttcagctttgacaattgtcgccgaaacgctgtgcttgaggctgatttcgccaagcggggctacaaactcccgaaagtcaggaaaactggcaccactatagccggggttgtgtataaagacggtatagtcttaggggcagatactcgcgccactgaagggatggtcgtcgctgacaaaaactgttctaagatccattttatcagtcccaatatctactgctgtggcgctggtaccgccgcagatactgacatgactacacaactaatttcctctaatttggagctccacagcctcagtaccggtaggctgccccgggtcgtgactgcaaataggatgcttaaacaaatgctgttccggtatcagggatatattggtgccgccctagtgttaggcggagtcgacgtgaccgggccacacctgtatagcatttatccccatgggtctacggacaagttgccctatgttaccatggtgcactgtgaagaagaactctttactgagaacctgttcttcattcggcaggctgaagtggtgagcgaagaagcctggggccccagcttcgctatatccttagctgtctttctggtggcctag

SEQ ID NO: 132079 - DNA, 429 bp, Artificial Sequence
  derived and/or modified sequence
atggccgccgtgagcgtgtacgccccccccgtgggcggcttcagcttcgataactgcaggcgcaacgctgtgctggaagcggactttgccaagcgcggatacaaactgccaaaagtgagaaagactggcactaccatagctggtgtagtgtataaggacggcattgtattaggcgccgacacccgggcgacagagggtatggttgtggcggacaaaaactgttccaagatccatttcatctcgccaaacatctattgctgcggagccggcactgcagccgacacagatatgactacacagctgatctcttcaaatctcgaattgcattctttaagcacgggccggctaccccgggtcgtgaccgccaatcgtatgctgaaacagatgctgtttagattttggctgctcgggagcaatggctgtatctag

SEQ ID NO: 132080 - DNA, 834 bp, Artificial Sequence
  derived and/or modified sequence
atggccgcagtgagcgtctatgctcctccagtgggcggattttcgtttgataactgtcggcgtaacgctgttttggaggctgattttgctaagaggggttacaaacttcctaaggtccggaagactggcacaaccatcgccggagtggtgtataaggatggtattgtccttggcgcagatactcgagctaccgagggcatggtggtggccgataagaattgctcaaagatccactttatctctcctaacatttactgctgtggggctggcacagccgctgatactgacatgacaacccagttaatctcgtcaaacctcgagcttcattcactgagcaccggccgactgcctcgggtggtgactgccaataggatgttgaagcagatgctgttcagataccaagggtacatcggggctgcactcgtcctcggaggtgtcgatgtcactgggccacacctatacagcatttatccacacgggagtacagacaaactgccatacgtcacgatgggctctggatctttagccgctatggcagtattcgaagacaagttccgaccggacatggaagaggaagaggctaaaaatctggtctcagaagccatcgctgccggaatctttaatgacctcggatccggatcaaatatcgacctgtgcgtgattagcaaaaataaactcgacttcttgcgcccttacacagtccctaataaaaaaggcaccaggctgggtaggtacagatgtgaaaaaggaactacagctgtccttaccgagaaaatcactccattagaaatcgaagtgctggaggagacggtccagacaatggacactagttag

SEQ ID NO: 132081 - DNA, 633 bp, Artificial Sequence
  derived and/or modified sequence
atggccgcagtgagcgtttacgctcccccagtgggagggttttcattcgataactgccggaggaatgccgtgcttgaggccgactttgccaaaagggggtacaagctgccaaaagtgagaaaaactggtaccacgattgcgggagtcgtgtacaaagacgggattgtgctcggcgcagatacccgggcaacagaggggatggtggttgcggacaagaactgtagtaagattcactttattagcccaaatatttattgctgcggggcaggaacggccgctgacaccgacatgaccacccagctcatcagctctaacctggaactccactccctctccactggcagattgccacgggtagttaccgcaaacagaatgctcaagcagatgcttttcaggtatcagggctatataggggctgccctcgtgctgggaggcgtggacgtaactggtccacatttgtactcaatctacccccacggatctacggacaagctgccgtatgtaacaatggtacattgcgaggaggagttgttcactgaaaacctgttcttcatcaggcaagcagaagtggtatcggaagaggcctggggcccatcattcgctatcagcctagctgtatttctggtcgcctag

SEQ ID NO: 132082 - DNA, 429 bp, Artificial Sequence
  derived and/or modified sequence
atggccgcagtgtcagtgtacgcaccccctgtcggcggattcagttttgataactgccgcaggaacgccgtcctggaggccgatttcgccaaacgaggctacaagctccctaaagtaaggaaaaccgggaccacgatagccggagttgtgtataaagatggaattgttctgggcgctgacactagagcaacagagggcatggtggtggcggataagaactgttccaagattcatttcatttcccccaacatttactgctgcggcgcagggacagcggctgacactgatatgactacccagcttataagcagcaacctggagctgcattccttgagcactgggagactacctcgggtggtgacggccaaccggatgcttaagcagatgctctttcgtttttggctgctcggtagtaatggttgcatatag

SEQ ID NO: 132083 - DNA, 980 bp, Artificial Sequence
  derived and/or modified sequence
gctttcttgggaagatggcggctgtgtcggtgtatgctccaccagttggaggcttctcttttgataactgccgcaggaatgccgtcttggaagccgattttgcaaagaggggatacaagcttccaaaggtccggaaaactggcacgaccatcgctggggtggtctataaggatggcatagttcttggagcagatacaagagcaactgaagggatggttgttgctgacaagaactgttcaaaaatacacttcatatctcctaatatttattgttgtggtgctgggacagctgcagacacagacatgacaacccagctcatttcttccaacctggagctccactccctctccactggccgtcttcccagagttgtgacagccaatcggatgctgaagcagatgcttttcaggtatcaaggttacattggtgcagccctagttttagggggagtagatgttactggacctcacctctacagcatctatcctcatggatcaactgataagttgccttatgtcaccatgggttctggctccttggcagcaatggctgtatttgaagataagtttaggccagacatggaggaggaggaagccaagaatctggtgagcgaagccatcgcagctggcatcttcaacgacctgggctccggaagcaacattgacctctgcgtcatcagcaagaacaagctggattttctccgcccatacacagtgcccaacaagaaggggaccaggcttggccggtacaggtgtgagaaagggactactgcagtcctcactgagaaaatcactcctctggagattgaggtgctggaagaaacagtccaaacaatggacacttcctgaatggcatcagtgggtggctggccgcggttctggaaggtggtgagcattgaggcccagtaagacactcatgtggctagtgtttgccgaatgaaactcaactcaataaaaaacaaaaaccaaattgggcagctg

SEQ ID NO: 132084 - DNA, 650 bp, Artificial Sequence
  derived and/or modified sequence
gaactgctttcttgggaagatggcggctgtgtcggtgtatgctccaccagttggaggcttctcttttgataactgccgcaggaatgccgtcttggaagccgattttgcaaagaggggatacaagcttccaaaggtccggaaaactggcacgaccatcgctggggtggtctataaggatggcatagttcttggagcagatacaagagcaactgaagggatggttgttgctgacaagaactgttcaaaaatacacttcatatctcctaatatttattgttgtggtgctgggacagctgcagacacagacatgacaacccagctcatttcttccaacctggagctccactccctctccactggccgtcttcccagagttgtgacagccaatcggatgctgaagcagatgcttttcaggtatcaaggttacattggtgcagccctagttttagggggagtagatgttactggacctcacctctacagcatctatcctcatggatcaactgataagttgccttatgtcaccatggtccattgtgaagaggagctctttacagagaatcttttctttattaggcaagctgaagtagtgtcagaagaagcttggggaccatcttttgctattagcttggcagtgttccttgtagcag

SEQ ID NO: 132085 - DNA, 988 bp, Artificial Sequence
  derived and/or modified sequence
actgctttcttgggaagatggcggctgtgtcggtgtatgctccaccagttggaggcttctcttttgataactgccgcaggaatgccgtcttggaagccgattttgcaaagaggggatacaagcttccaaaggtccggaaaactggcacgaccatcgctggggtggtctataaggatggcatagttcttggagcagatacaagagcaactgaagggatggttgttgctgacaagaactgttcaaaaatacacttcatatctcctaatatttattgttgtggtgctgggacagctgcagacacagacatgacaacccagctcatttcttccaacctggagctccactccctctccactggccgtcttcccagagttgtgacagccaatcggatgctgaagcagatgcttttcaggttctggctccttggcagcaatggctgtatttgaagataagtttaggccagacatggaggaggaggaagccaagaatctggtgagcgaagccatcgcagctggcatcttcaacgacctgggctccggaagcaacattgacctctgcgtcatcagcaagaacaagctggattttctccgcccatacacagtgcccaacaagaaggggaccaggtgagtgaaggagacgaagttcttcctgggtcccctggcgtcgtggccacccttggtatctccatggcatctggatggagttttcctggttctttccacattaagtacatccagtgttcccaaatcaacctcccacacagaccttcggcttgttacttgctttatgacagtgggctgctgtcaggtgtaggaaagtgatttaatttgatgggagaggtggagggtggcccaggaaagagccctaggctgggaggtggggccggagaggtttggatcatctgctgtcctttctcaagtgtcttaaagaatcccctgatttctgggagaaggtgcatttttcagggcagccccagcactttccctca

SEQ ID NO: 132086 - DNA, 834 bp, Artificial Sequence
  derived and/or modified sequence
atggccgccgtgagcgtgtacgccccccccgtgggcggcttcagcttcgacaactgcagaagaaacgccgtgctggaggccgacttcgccaagagaggctacaagctgcccaaggtgagaaagaccggcaccaccatcgccggcgtggtgtacaaggacggcatcgtgctgggcgccgacaccagagccaccgagggcatggtggtggccgacaagaactgcagcaagatccacttcatcagccccaacatctactgctgcggcgccggcaccgccgccgacaccgacatgaccacccagctgatcagcagcaacctggagctgcacagcctgagcaccggcagactgcccagagtggtgaccgccaacagaatgctgaagcagatgctgttcagataccagggctacatcggcgccgccctggtgctgggcggcgtggacgtgaccggcccccacctgtacagcatctacccccacggcagcaccgacaagctgccctacgtgaccatgggcagcggcagcctggccgccatggccgtgttcgaggacaagttcagacccgacatggaggaggaggaggccaagaacctggtgagcgaggccatcgccgccggcatcttcaacgacctgggcagcggcagcaacatcgacctgtgcgtgatcagcaagaacaagctggacttcctgagaccctacaccgtgcccaacaagaagggcaccagactgggcagatacagatgcgagaagggcaccaccgccgtgctgaccgagaagatcacccccctggagatcgaggtgctggaggagaccgtgcagaccatggacaccagctag

SEQ ID NO: 132087 - DNA, 633 bp, Artificial Sequence
  derived and/or modified sequence
atggccgccgtgagcgtgtacgccccccccgtgggcggcttcagcttcgacaactgcagaagaaacgccgtgctggaggccgacttcgccaagagaggctacaagctgcccaaggtgagaaagaccggcaccaccatcgccggcgtggtgtacaaggacggcatcgtgctgggcgccgacaccagagccaccgagggcatggtggtggccgacaagaactgcagcaagatccacttcatcagccccaacatctactgctgcggcgccggcaccgccgccgacaccgacatgaccacccagctgatcagcagcaacctggagctgcacagcctgagcaccggcagactgcccagagtggtgaccgccaacagaatgctgaagcagatgctgttcagataccagggctacatcggcgccgccctggtgctgggcggcgtggacgtgaccggcccccacctgtacagcatctacccccacggcagcaccgacaagctgccctacgtgaccatggtgcactgcgaggaggagctgttcaccgagaacctgttcttcatcagacaggccgaggtggtgagcgaggaggcctggggccccagcttcgccatcagcctggccgtgttcctggtggcctag

SEQ ID NO: 132088 - DNA, 429 bp, Artificial Sequence
  derived and/or modified sequence
atggccgccgtgagcgtgtacgccccccccgtgggcggcttcagcttcgacaactgcagaagaaacgccgtgctggaggccgacttcgccaagagaggctacaagctgcccaaggtgagaaagaccggcaccaccatcgccggcgtggtgtacaaggacggcatcgtgctgggcgccgacaccagagccaccgagggcatggtggtggccgacaagaactgcagcaagatccacttcatcagccccaacatctactgctgcggcgccggcaccgccgccgacaccgacatgaccacccagctgatcagcagcaacctggagctgcacagcctgagcaccggcagactgcccagagtggtgaccgccaacagaatgctgaagcagatgctgttcagattctggctgctgggcagcaacggctgcatctag

SEQ ID NO: 132089 - protein, 219 aa, Artificial Sequence
  derived and/or modified sequence
MLRAGAPTGDLPRAGEVHTGTTIMAVEFDGGVVMGSDSRVSAGEAVVNRVFDKLSPLHERIYCALSGSAADAQAVADMAAYQLELHGIELEEPPLVLAAANVVRNISYKYREDLSAHLMVAGWDQREGGQVYGTLGGMLTRQPFAIGGSGSTFIYGYVDAAYKPGMSPEECRRFTTDAIALAMSRDGSSGGVIYLVTITAAGVDHRVILGNELPKFYDE

SEQ ID NO: 132090 - protein, 196 aa, Artificial Sequence
  derived and/or modified sequence
MAVEFDGGVVMGSDSRVSAGEAVVNRVFDKLSPLHERIYCALSGSAADAQAVADMAAYQLELHGIELEEPPLVLAAANVVRNISYKYREDLSAHLMVAGWDQREGGQVYGTLGGMLTRQPFAIGGSGSTFIYGYVDAAYKPGMSPEECRRFTTDAIALAMSRDGSSGGVIYLVTITAAGVDHRVILGNELPKFYDE

SEQ ID NO: 132091 - protein, 131 aa, Artificial Sequence
  derived and/or modified sequence
MAVEFDGGVVMGSDSRVSAGEAVVNRVFDKLSPLHERIYCALSGSAADAQAVADMAAYQLELHGIELEEPPLVLAAANVVRNISYKYREDLSAHLMVAGWDQREGGQVYGTLGGMLTRQPFAIGGSGSTFI

SEQ ID NO: 132092 - protein, 131 aa, Artificial Sequence
  derived and/or modified sequence
MAVEFDGGVVMGSDSRVSAGEAVVNRVFDKLSPLHEHIYCALSGSAADAQAVADMAAYQLELHGIELEEPPLVLAAANVVRNISYKYREDLSAHLMVAGWDQREGGQVYGTLGGMLTRQPFAIGGSGSTFI

SEQ ID NO: 132093 - protein, 196 aa, Artificial Sequence
  derived and/or modified sequence
MAVEFDGGVVMGSDSRVSAGEAVVNRVFDKLSPLHEHIYCALSGSAADAQAVADMAAYQLELHGIELEEPPLVLAAANVVRNISYKYREDLSAHLMVAGWDQREGGQVYGTLGGMLTRQPFAIGGSGSTFIYGYVDAAYKPGMSPEECRRFTTDAIALAMSRDGSSGGVIYLVTITAAGVDHRVILGNELPKFYDE

SEQ ID NO: 132094 - protein, 219 aa, Artificial Sequence [sequence omitted]

SEQ ID NO: 132095 - DNA, 660 bp, Artificial Sequence
  derived and/or modified sequence
atgttaagagccggcgccccaaccggtgatttgcctcgcgccggggaagttcacacaggcactacgatcatggctgtcgaatttgatggcggggtggttatgggctcagattctagagtttcggcgggtgaagccgtcgttaaccgcgtttttgataagttatctccactgcatgagagaatctattgtgcgctgtctggaagcgccgcggacgctcaagccgtagctgatatggctgcataccagctcgagttacacgggatagaactggaagaaccacctttggttctggccgcggcaaacgtggttcgcaacatatcttacaagtatcgcgaagatctctcggctcatcttatggtcgccggatgggaccaaagagaaggagggcaggtgtatggaactctgggaggtatgcttacaagacagccatttgcaataggaggttctggttccacatttatctacgggtatgtggatgctgcttacaagccaggaatgtccccagaagagtgtcgtaggttcactactgatgccatcgcccttgcaatgagccgtgacggtagtagcgggggtgttatttacctggtgacaatcaccgccgctggggtggaccatcgcgtgatactcgggaatgagcttccaaaattctatgacgaatag

SEQ ID NO: 132096 - DNA, 660 bp, Artificial Sequence
  derived and/or modified sequence
atgcttcgggctggggctcccacaggtgacctgcccagagctggcgaagtgcacaccgggaccactatcatggccgtggaatttgatggtggggtggtaatgggctctgacagcagagtgtctgccggtgaagctgtggtgaatcgcgtcttcgataaactttctccccttcacgagcggatctattgcgcactgtccgggtctgctgcagacgcacaggccgtcgccgatatggctgcctaccagttagaactccatggcatcgagcttgaggaaccaccattggtgctggccgcagccaatgtggtgcgtaacatctcctacaagtaccgggaagatctgagtgcgcatctcatggttgccggctgggatcagcgggagggcgggcaagtgtacgggacactgggcggcatgttgaccagacaacccttcgccatcgggggcagcggaagcactttcatttacggatatgtggacgccgcatataagcctggaatgtcacccgaggagtgtcgccgcttcactaccgacgccatcgcgctagccatgagtcgcgacggctcatccgggggcgtcatatacctggtgaccatcaccgctgccggtgtggaccaccgggtaatcttgggcaacgaactgcctaaattctacgacgagtag

SEQ ID NO: 132097 - DNA, 660 bp, Artificial Sequence
  derived and/or modified sequence
atgctacgagcgggtgcccctactggtgacctgcctagagcgggcgaggttcatacaggcactacaattatggccgtggagtttgatgggggagtcgtgatgggtagcgactcgcgggtgtctgcaggggaggcagttgttaacagagtgtttgacaagctttctccactgcacgagcgaatctattgcgcactgtcaggcagcgctgctgacgcacaggccgtggccgacatggcagcctaccagctggagttacacggtatcgaactagaagagccccccttagtgctggctgctgctaatgtggtcagaaacatttcctacaaatatcgcgaggatctctccgctcacttgatggtggctggctgggatcaacgtgaggggggccaagtctacggcaccctgggggggatgctcacacgccaaccattcgcaatcggaggcagcggttccacttttatctatggatacgtggatgccgcctataaacccggtatgtcccctgaggaatgccgccggttcaccactgatgctattgccttagccatgtcacgcgacgggagttccgggggagtgatctacctagtaactatcacagctgctggggtagatcacagggttatactgggcaacgaattacctaagttctatgacgagtag

SEQ ID NO: 132098 - DNA, 591 bp, Artificial Sequence
  derived and/or modified sequence
atggcggtagaattcgatggcggcgtggttatgggatccgactctagggtgtctgcgggggaggccgtggtcaaccgcgtgttcgataaactcagtcctttacatgaacggatatattgcgcactgtcaggatcagcagctgacgctcaggcagtcgcggacatggctgcttaccagcttgagctgcacggaattgagctcgaggagcctcccttagttcttgccgcagccaatgttgttaggaacatttcgtacaagtaccgcgaagatctgagcgcccatctcatggtggccggttgggaccagcgcgaggggggacaggtgtacggcacgctcgggggcatgctgacccgacagcccttcgccattggtggcagcgggtcgacattcatttacggctatgttgatgctgcgtacaaacccggcatgagtcccgaggagtgcagacgttttaccacagatgctatagcgctcgcaatgtctcgggacggtagttccggaggcgttatctacctggtgaccatcaccgccgcgggcgttgaccatagggtcatcctggggaatgagctgcctaagttctatgatgagtag

SEQ ID NO: 132099 - DNA, 591 bp, Artificial Sequence
  derived and/or modified sequence
atggccgtcgagtttgacggtggagtagttatgggttctgactccagagtatcagcgggtgaggcggtagtcaatagagtgttcgacaagctctcaccacttcacgaaagaatttactgcgccctgtcaggctccgccgctgatgcccaggctgtagcagatatggccgcctaccaactcgaacttcacggcatcgaactggaggagcccccacttgttctggcggccgcaaacgtcgttagaaacatctcttacaagtatcgcgaagacctgagcgcgcacctcatggttgccggttgggatcagagggaaggcgggcaggtctacggcaccttgggaggtatgctaacacgtcaacctttcgctatcggaggaagtggcagtacttttatctacggttatgtagatgctgcctataagcccgggatgagtccagaagagtgtcgaagattcaccaccgatgctattgcgctagccatgagcagggatggctcgtctggcggggtgatatatcttgtgacaatcaccgctgccggggtggaccaccgcgtgatcctgggcaatgaactcccaaagttctatgacgaatag

SEQ ID NO: 132100 - DNA, 591 bp, Artificial Sequence
  derived and/or modified sequence
atggccgtagagttcgatggcggtgtggtgatgggttccgactctagggtgtccgccggggaagcagtggtaaaccgcgtgttcgataagctgtcaccccttcacgagcggatatactgcgccctgagcggcagtgcagcagacgcacaggcagttgccgacatggccgcctatcagctggaactgcacgggatagaactcgaggagccgccgttggttctcgctgccgccaatgtggtgaggaacatttcctacaaatacagggaggacctgagcgctcacctgatggtcgctggctgggaccagagagaaggaggccaagtttatggaactctgggagggatgctgacacgacagccattcgctatcgggggatctggttcaacatttatctatggatacgtggatgccgcttataaaccagggatgtctcctgaagaatgcagacggttcactacagacgccatcgctcttgcaatgtcacgggacgggtcctcaggaggagtgatttacctggtgactatcaccgcggctggcgtcgatcatcgggtaattctcggcaatgaattacccaaattttatgatgaatag

SEQ ID NO: 132101 - DNA, 396 bp, Artificial Sequence
  derived and/or modified sequence
atggccgtcgagttcgacggaggggtcgtaatgggatccgattctagagtgtccgccggcgaggccgtggttaatagggtcttcgacaagctgtcccctctgcacgagcgtatctactgtgccctgtccggtagcgctgccgatgcccaagctgtggccgacatggctgcataccagctagagctccatggaatcgagttggaagaaccgccactggttcttgccgccgccaatgtggtccgcaacatatcttacaagtatagagaggacttgtcagctcatctgatggtggctgggtgggatcagagggaaggcggccaggtttatgggacactgggtggaatgctgactcgacagccattcgctatcggtggcagcggttccacattcatttag

SEQ ID NO: 132102 - DNA, 396 bp, Artificial Sequence
  derived and/or modified sequence
atggcagttgaattcgacggaggagttgttatgggtagcgattctcgcgtctctgcaggcgaggccgttgtgaacagagtgtttgacaagctctcaccactgcacgaaaggatctactgtgccctgagcgggtctgcggccgacgctcaggctgtggccgatatggccgcctatcagttagaactgcacggcatcgaattagaagaacctccactggtgctggctgcagcaaatgtggtgaggaatatatcctataaataccgggaagatctgtccgcacacctgatggttgcgggctgggatcaaagagagggaggccaggtttatgggaccctgggaggaatgttgacacgccagccatttgcaattggaggatctggtagcacctttatatag

SEQ ID NO: 132103 - DNA, 396 bp, Artificial Sequence
  derived and/or modified sequence
atggccgtcgagttcgacggaggggtggtcatgggatccgactcacgagtatcggcgggggaggcggtcgttaacagagttttcgataagctgtcaccgttgcacgagcggatatattgtgccctgtcaggcagtgctgcagacgcccaggccgtcgctgatatggctgcctaccagctcgaactgcatgggatcgaactggaggaaccccctctcgtgcttgctgcagccaatgtcgtccggaatattagttataagtatagagaagatctgtccgcccacttaatggtagctggctgggatcagagagagggcggtcaggtgtacggcaccctaggaggcatgcttacacggcagccattcgcaatcggagggagcggctctacttttatatag

SEQ ID NO: 132104 - DNA, 396 bp, Artificial Sequence
  derived and/or modified sequence
atggcagtcgaattcgatggaggcgttgttatgggcagtgactcgcgcgtgtctgctggagaggccgttgtgaacagggtttttgataagctgagccccttgcacgaacggatttattgcgcgctgtctggttctgccgcagacgctcaagccgttgccgacatggccgcataccagctggaactgcacggcatcgagcttgaagagcctcctctggtgttggccgccgcgaatgtggtgcgaaacatctcctataagtacagagaagatttgagcgcccatctgatggtggcaggttgggatcagcgggaggggggccaggtgtatggcacgctcggcggcatgctaactcgccagccatttgcaatcgggggatctgggtcaacatttatttag

SEQ ID NO: 132105 - DNA, 396 bp, Artificial Sequence
  derived and/or modified sequence
atggccgtcgagtttgatggaggggtggttatgggcagtgattccagggtttccgccggcgaagcagtagtaaatcgtgtattcgacaagttgagccccttgcacgagcatatttactgcgctctctctggatcagccgccgacgcccaggcagtcgctgacatggctgcctatcaacttgagcttcacggaattgaactggaggagcctccactagttctcgcagctgccaacgtcgtgagaaacatctcgtacaagtatagagaagatctgtctgcccatctcatggttgccggctgggatcaaagggaggggggccaggtctacggtactttgggaggaatgctgacccggcagcccttcgcaatcggaggcagtggtagcacatttatctag

SEQ ID NO: 132106 - DNA, 591 bp, Artificial Sequence
  derived and/or modified sequence
atggcagtggagtttgatggcggcgtggtcatgggttctgacagtagggtgtctgcgggggaggccgtggtgaaccgcgtgttcgacaaactgtcaccccttcatgagagaatatattgtgcactaagcgggtcagccgcagacgcgcaggcagtcgcagacatggccgcctatcagctggaactgcacgggatcgaactggaggaaccccctctggttttagccgcagccaacgtggtacgaaatatctcctacaagtatagagaagatctgtccgcacatctaatggtcgctggatgggaccagagggagggcgggcaggtctacggcacgcttgggggcatgctgacaaggcaacctttcgccatcggcgggagtggatccaccttcatttatggatacgttgatgcggcctataaacccggcatgtcaccggaagagtgtagacgattcacgaccgatgctattgctcttgcgatgtctcgggatggttcttctggcggcgttatatatctcgtcaccattaccgcagcaggggtcgatcacagggtgatcctcggtaacgagttgccgaagttttacgacgagtag

SEQ ID NO: 132107 - DNA, 660 bp, Artificial Sequence
  derived and/or modified sequence
atgctgcgcgccggcgcaccaacaggagatctcccccgggccggcgaggttcataccggtactactatcatggctgtcgagttcgatgggggggtggtaatgggcagcgactccagggtttccgccggagaggccgtggtgaatagggtgtttgataaactcagtcctcttcatgaacgaatatactgcgctctttctggttcggcagctgatgcacaagcagtcgcagatatggccgcttatcaacttgaactgcacggaattgagctggaagagccacctctggtgcttgcggctgctaacgtggtgcgcaacatttcttataagtacagagaggatttaagcgcccacctcatggtcgctggctgggaccagcgtgagggaggccaagtctatgggacgctgggaggtatgttaacaagacaaccatttgccatcggcggttcgggttcaacgttcatatatggttacgtggatgcggcctacaagcctggtatgtctcccgaggagtgccggaggtttacgacagacgccatcgcactggctatgtctagagatggtagttcgggcggagtgatctacctggtgaccataactgcggctggggtcgatcatagagttattcttggaaacgaactgccgaagttctacgacgagtag

SEQ ID NO: 132108 - DNA, 591 bp, Artificial Sequence
  derived and/or modified sequence
atggcagtggaatttgatggcggagttgtgatggggagcgatagcagggtgtcagcaggtgaagccgttgtgaacagggtgttcgacaagctgtcacccctccacgagcacatctactgcgccctctctgggagcgccgccgacgcacaggctgtggctgacatggcagcctaccagctggagctgcacgggatcgaactcgaggagcctccattagtgctagcagcggctaatgttgtgaggaatatttcctacaagtacagagaagaccttagcgcccatcttatggttgcgggctgggaccagcgcgagggaggccaggtttacgggacattgggcggcatgcttacacggcaaccctttgccatcgggggctctggcagtacttttatttatggctacgttgatgccgcttataagccagggatgtctccagaggagtgccggcggtttacaactgacgcgatcgcgctagcaatgtcacgagatgggagctccggcggcgtcatttacctagtcaccatcaccgctgccggtgtcgatcaccgcgtgattctggggaacgagctccccaagttttacgacgagtag

SEQ ID NO: 132109 - DNA, 660 bp, Artificial Sequence
  derived and/or modified sequence
atgctccgcgctggtgcacctacgggagacctgccccgagctggcgaagttcataccggaaccaccatcatggctgtggagttcgacggaggcgtcgtaatggggagcgattcacgggtgtccgccggtgaagccgtggtgaatagagtgttcgacaagctgtccccactgcatgagcatatctactgtgccttgagcggttccgctgctgacgcccaggctgtggcggatatggctgcttatcagctggagctgcacggcatcgagctggaggaacctcccctcgtgttagctgccgcaaatgtagtgcggaacatttcatataagtatcgagaagacctgagcgcgcacttgatggtggccggctgggaccagcgggagggggggcaggtatacgggacattaggagggatgttgacccggcaaccgttcgccattgggggatcagggagcactttcatctacgggtacgtggacgctgcttacaagcctggcatgtcccccgaagagtgtagacgttttactactgacgcaatcgccctagctatgtctagagacggctcctccggaggcgtgatctacctggttaccattacagccgccggtgtggaccatcgcgtgatcctgggaaatgagctgccaaaattttacgatgaatag

SEQ ID NO: 132110 - DNA, 591 bp, Artificial Sequence
  derived and/or modified sequence
atggcagtggaatttgatgggggagtagtaatgggatctgactcacgggtgagcgctggtgaagccgtggtgaacagggtgtttgataaattgtcacccctccatgagcatatttattgcgcactgtccgggtcagctgctgacgctcaggctgtcgctgacatggcggcgtaccagcttgaactgcatggtatcgaactggaggagccccctctggtgctggcggcagctaatgtcgtgaggaatatttcctacaagtacagggaggatttgtccgcccatctgatggttgccggctgggaccagcgtgaggggggtcaagtttatggaactctcggtgggatgctgacccgacagcccttcgcgatcggagggtccggctctacctttatatatggttacgtcgacgcagcttacaaacccgggatgagtccagaagagtgccgcaggtttaccacagatgccattgctttggcaatgagcagagacggaagctctggcggtgttatatacctcgtgaccattactgcagccggtgtagaccaccgagtaattctgggcaacgagctgcctaaattctatgatgaatag

SEQ ID NO: 132111 - DNA, 660 bp, Artificial Sequence
  derived and/or modified sequence
atgctccgggccggtgccccaacaggtgacctcccgcgggcaggcgaggtgcacaccggaaccacaatcatggccgttgagttcgatgggggtgtggttatggggagtgacagtcgtgtatcagcaggggaggccgtggtgaaccgcgtctttgataagctgagcccactgcatgagcatatatactgcgccctctctggtagcgctgcagacgcacaggctgtagcagatatggcagcctatcagctggagctgcacggaatcgagctggaggagcctcctcttgtcctggctgccgcaaacgtcgtgcgcaacatctcttataaataccgcgaagatctttctgctcatttgatggtggctggttgggaccagcgggagggcggccaggtgtacgggacactgggtggaatgctgactagacaaccctttgctatagggggatcgggttcaacctttatttacggctacgtggatgccgcatacaagcccggtatgagcccagaagaatgcagaagatttaccacagacgccatcgctctcgccatgagccgcgacggctcaagcggtggtgtgatctacctggtcacaataacagctgcaggagtcgatcacagggtgatcctgggaaatgagctacctaaattttatgacgaatag

SEQ ID NO: 132112 - DNA, 396 bp, Artificial Sequence
  derived and/or modified sequence
atggccgtggagttcgacggaggggtggtgatggggtccgacagccgagtctctgcaggagaggctgttgtgaacagagtcttcgacaaactgtcccctctacacgagagaatctactgcgctttatcagggtccgctgcggacgcccaggctgtggcagatatggcggcctatcagctggaactacatgggattgagctcgaagaaccccccttggtgctggcggctgctaatgtcgtccgcaacatctcttacaagtatcgtgaagacctcagcgcccatctgatggtcgctggatgggatcagagggaagggggacaggtttacggaacactgggaggtatgttgactcggcaaccgtttgcaataggaggaagcggaagcacattcatttag

SEQ ID NO: 132113 - DNA, 396 bp, Artificial Sequence
  derived and/or modified sequence
atggccgtcgaattcgatggtggcgtggtgatggggtccgattcaagggtgtctgcgggcgaggccgtcgttaacagagtgtttgacaaactgtcgccactgcatgagcacatctactgcgccctgtcggggtccgccgccgacgcacaggcagtggccgacatggcagcctatcagctcgagcttcatggcatcgagcttgaagaaccaccattggtcctggccgcagcaaacgttgtgcgaaacatatcctacaaatatagggaggacctgagcgctcatctcatggtcgctggatgggatcagagagaaggcggtcaggtttacggaacacttggcgggatgctgaccaggcagccttttgcaatcggaggatcgggaagcacttttatttag

SEQ ID NO: 132114 - DNA, 591 bp, Artificial Sequence
  derived and/or modified sequence
atggctgtggagttcgacgggggcgtggtgatggggtccgattccagagtgagcgccggcgaagctgttgtgaacagggtgtttgacaagctatctcccctccacgagcacatttattgtgctctaagcggctctgctgccgacgcccaggctgtagccgatatggcagcctaccaattggagctgcatggaatcgaactggaggagcctccacttgtgctcgctgctgctaacgtcgtgagaaacatctcttacaagtaccgggaagatctcagcgcccacctgatggtcgccggatgggaccagcgagagggaggtcaagtttatggtactctgggcggaatgttgacccgccaacctttcgctatagggggctcaggctccacttttatttacgggtacgtggacgctgcatataagcccgggatgagtcctgaggaatgccgccgatttactacagatgccatcgcccttgccatgtcacgtgacggctctagcggcggtgtcatttaccttgtcacaataactgctgccggggttgatcacagagtgattctgggaaacgagttacccaaattttacgacgaatag

SEQ ID NO: 132115 - DNA, 660 bp, Artificial Sequence
  derived and/or modified sequence
atgttaagggcaggagccccaaccggtgacttgcccagggctggagaggttcacacaggcaccactatcatggctgtcgagttcgacggtggggtcgtgatgggctcggactccagggtaagcgccggggaagctgtggtcaatcgagtctttgacaaactgtcccctctgcacgagcgcatctattgcgctctgagcggatcggctgctgacgcccaggcagttgctgacatggctgcctatcaactggagttgcacggaatagagctggaagagcctccactggtgctcgcagcagcgaatgtggttcgtaacatttcctacaagtatcgggaagatctgagtgcccacctgatggttgcaggctgggatcagcgtgagggcgggcaggtctatggtaccctgggcggcatgctcacaaggcagccctttgcaatcggcggctcgggttctacattcatatacgggtacgtggatgccgcctacaagcctgggatgtctcctgaagagtgtcggcgatttacaacagacgctattgctcttgctatgtctagagacggtagttcagggggtgtcatctatctcgtgactattactgcagcaggtgtggatcacagggtcattctcggtaatgaactccctaagttctacgacgaatag

SEQ ID NO: 132116 - DNA, 591 bp, Artificial Sequence
  derived and/or modified sequence
atggccgtggagttcgatggcggagttgtgatggggagcgacagtagagtgagtgcaggagaagctgtcgtgaacagggtgttcgacaaactttcgccacttcacgagcgaatttactgtgccttgtcaggttctgcagcagacgcccaggcagtcgccgatatggccgcctaccagctggagctgcacggcatcgaactcgaggaacctcctctggtattggccgctgcaaatgtggtgcgcaacatatcgtataaatatagagaagatttgagtgcacacttaatggttgcgggttgggaccagcgagaaggcggccaggtgtatggcacccttggcggcatgttgacccggcagccatttgctataggtgggtccggctccacatttatatacggctacgtcgacgcagcctacaagccgggaatgtctcccgaggagtgtaggcgcttcacaactgacgcaatagctcttgccatgagtagagacggctctagtggtggcgtcatctatttggtgaccatcaccgctgccggtgtggatcaccgggtcatactaggaaatgaacttccgaaattttacgatgaatag

SEQ ID NO: 132117 - DNA, 660 bp, Artificial Sequence
  derived and/or modified sequence
atgctgcgagccggagctccaacaggagatttaccccgggcaggagaagtccacaccgggactactatcatggccgtggagtttgacggtggagtcgttatgggctcagattcaagagtgtccgccggtgaggcagtggtgaacagggtattcgacaagctgagcccactccacgaacacatctactgtgctctcagcggtagcgccgcagacgcgcaggcggtggcagacatggccgcataccagctggagctccacgggattgaattagaagaaccacctctggttcttgcggccgccaatgtggtgaggaatatctcgtacaagtaccgcgaggatctgtcggctcatctgatggtggcaggatgggaccagagagaaggagggcaggtgtatggcactttgggtggaatgctgactcggcaaccttttgccatcggggggagtgggtcaacttttatctatggatacgtagacgctgcctataagccaggaatgagcccagaagagtgccggcgctttaccacagatgcaattgcactggcgatgagcagggacggtagtagtgggggggtgatctatctggttactattacagcagccggtgtcgaccatagggtgatcctgggtaatgaattgcctaaattttacgatgagtag

SEQ ID NO: 132118 - DNA, 396 bp, Artificial Sequence
  derived and/or modified sequence
atggctgtggagttcgacggtggggttgttatgggcagtgacagccgcgtatccgctggcgaagcagttgtcaacagggtatttgacaaattgagcccattacatgagcatatctattgcgccctcagcgggtcagcagctgatgcccaagccgtcgccgacatggccgcctaccagctggaactccacggtatagaactggaagagccacccctggtcttggcggcagcgaacgtcgttcggaatatatcttataagtatcgcgaggacctttcggcgcacctgatggtggcaggatgggatcagagagaaggcggccaggtctatgggacactgggggggatgctgacaaggcagcccttcgccatcgggggttccggatctactttcatctag

SEQ ID NO: 132119 - DNA, 660 bp, Artificial Sequence
  derived and/or modified sequence
atgctgcgggccggggcccccaccggggacctgccccgggccggggaggtgcacacaggcaccaccatcatggctgtggagtttgatggaggagtggtgatgggcagtgacagccgggtgtctgctggggaggccgtggtgaacagagtgtttgacaagctgagccccctgcacgagcgcatctactgtgccctgagcggcagcgctgctgatgcccaggccgtggccgacatggccgcctaccagctggagctgcacggcatcgagctggaggagccccccctggtgctggccgccgccaacgtggtgaggaacatctcctacaagtaccgggaggacctgagcgcccacctgatggtggccggctgggaccagcgggagggcggccaggtgtatggcaccctgggcggcatgctgacccggcagccctttgccatcggcggcagcggcagcaccttcatctacggctacgtggatgctgcctacaagccaggcatgagccctgaggagtgccgccgcttcaccacagatgccatcgccctggccatgagcagagatggcagcagtggaggagtcatctacctggtgaccatcacagctgctggggtggaccacagggtcatcctgggcaatgagctgcccaagttctatgatgaatag

SEQ ID NO: 132120 - DNA, 591 bp, Artificial Sequence
  derived and/or modified sequence
atggctgtggagtttgatggcggcgtggtgatgggcagtgacagccgggtgtctgctggggaggccgtggtgaacagagtgtttgacaagctgagccccctgcacgagcgcatctactgtgccctgagcggcagcgctgctgatgcccaggccgtggccgacatggccgcctaccagctggagctgcatggaattgagctggaggagccccccctggtgctggccgccgccaacgtggtgaggaacatctcctacaagtaccgggaggacctgagcgcccacctgatggtggccggctgggaccagcgggagggcggccaggtgtatggcaccctgggcggcatgctgacccggcagccctttgccatcggcggcagcggcagcaccttcatctacggctacgtggatgctgcctacaagccaggcatgagcccagaagaatgtcgccgcttcaccacagatgccatcgccctggccatgagcagagatggcagcagcggcggcgtcatctacctggtgaccatcacagctgctggggtggaccacagggtcatcctgggcaatgagctgcccaagttctatgatgaatag

SEQ ID NO: 132121 - DNA, 396 bp, Artificial Sequence
  derived and/or modified sequence
atggctgtggagtttgatggcggcgtggtgatgggcagtgacagccgggtgtctgctggggaggccgtggtgaacagagtgtttgacaagctgagccccctgcacgagcgcatctactgtgccctgagcggcagcgctgctgatgcccaggccgtggccgacatggccgcctaccagctggagctgcatggaattgagctggaggagccccccctggtgctggccgccgccaacgtggtgaggaacatctcctacaagtaccgggaggacctgagcgcccacctgatggtggccggctgggaccagcgggagggcggccaggtgtatggcaccctgggcggcatgctgacccggcagccctttgccatcggcggcagcggcagcaccttcatctag

SEQ ID NO: 132122 - DNA, 396 bp, Artificial Sequence
  derived and/or modified sequence
atggctgtggagtttgatggcggcgtggtgatgggcagtgacagccgggtgtctgctggggaggccgtggtgaacagagtgtttgacaagctgagccccctgcacgagcacatctactgtgccctgagcggcagcgctgctgatgcccaggccgtggccgacatggccgcctaccagctggagctgcatggaattgagctggaggagccccccctggtgctggccgccgccaacgtggtgaggaacatctcctacaagtaccgggaggacctgagcgcccacctgatggtggccggctgggaccagcgggagggcggccaggtgtatggcaccctgggcggcatgctgacccggcagccctttgccatcggcggcagcggcagcaccttcatctag

SEQ ID NO: 132123 - DNA, 591 bp, Artificial Sequence
  derived and/or modified sequence
atggctgtggagtttgatggcggcgtggtgatgggcagtgacagccgggtgtctgctggggaggccgtggtgaacagagtgtttgacaagctgagccccctgcacgagcacatctactgtgccctgagcggcagcgctgctgatgcccaggccgtggccgacatggccgcctaccagctggagctgcatggaattgagctggaggagccccccctggtgctggccgccgccaacgtggtgaggaacatctcctacaagtaccgggaggacctgagcgcccacctgatggtggccggctgggaccagcgggagggcggccaggtgtatggcaccctgggcggcatgctgacccggcagccctttgccatcggcggcagcggcagcaccttcatctacggctacgtggatgctgcctacaagccaggcatgagcccagaagaatgtcgccgcttcaccacagatgccatcgccctggccatgagcagagatggcagcagcggcggcgtcatctacctggtgaccatcacagctgctggggtggaccacagggtcatcctgggcaatgagctgcccaagttctatgatgaatag

SEQ ID NO: 132124 - DNA, 660 bp, Artificial Sequence
  derived and/or modified sequence
atgctgcgggccggggcccccaccggggacctgccccgggccggggaggtgcacacaggcaccaccatcatggctgtggagtttgatggaggagtggtgatgggcagtgacagccgggtgtctgctggggaggccgtggtgaacagagtgtttgacaagctgagccccctgcacgagcacatctactgtgccctgagcggcagcgctgctgatgcccaggccgtggccgacatggccgcctaccagctggagctgcacggcatcgagctggaggagccccccctggtgctggccgccgccaacgtggtgaggaacatctcctacaagtaccgggaggacctgagcgcccacctgatggtggccggctgggaccagcgggagggcggccaggtgtatggcaccctgggcggcatgctgacccggcagccctttgccatcggcggcagcggcagcaccttcatctacggctacgtggatgctgcctacaagccaggcatgagccctgaggagtgccgccgcttcaccacagatgccatcgccctggccatgagcagagatggcagcagtggaggagtcatctacctggtgaccatcacagctgctggggtggaccacagggtcatcctgggcaatgagctgcccaagttctatgatgaatag

SEQ ID NO: 132125 - DNA, 660 bp, Artificial Sequence
  derived and/or modified sequence
atgctgcgggccggcgcccccaccggcgacctgccccgggccggcgaggtgcacacaggaactaccattatggctgtggaattcgacgggggggtagtcatgggctctgactcgagagttagcgcaggggaagccgtcgtcaacagggtttttgataagctcagccccttacatgagcgcatctattgcgctttatctggctcagcagcagacgctcaggctgtagctgacatggccgcctatcagttagaactacacggaattgagctcgaggaaccacccctagtcctagccgccgcaaatgtagtaagaaacatctcttataaataccgggaagatctgtcagctcacctgatggtggcaggctgggaccagagggagggaggacaggtttatggcactctcggtggcatgctcacgaggcagccatttgccattggcggatccggttctaccttcatctacggctatgtggacgcagcttacaagccaggtatgtctccggaggaatgtcgaaggtttacgaccgacgccatcgcactggcaatgtcccgcgacgggtcaagcggcggagtgatatacttggtgacaattaccgctgcaggcgtggaccacagggtgatattgggcaatgagctcccaaagttttacgatgagtag

SEQ ID NO: 132126 - DNA, 660 bp, Artificial Sequence
  derived and/or modified sequence
atgctgcgggccggcgcccccaccggcgacctgccccgggccggcgaagtccatactggcactactattatggcagttgaatttgatgggggcgtcgtaatgggctccgattcccgtgtctctgctggcgaagccgtggtcaacagagtgttcgataagctgagtcctctgcatgagagaatttactgcgccctgtctggtagtgcagctgatgctcaagcggtggccgatatggccgcttaccagctcgaactccatggcatcgaactggaagagcccccactcgtgctggccgccgctaacgtagtcaggaacatatcgtacaagtaccgcgaggatctcagcgcacacttgatggtggcagggtgggaccaacgagagggcgggcaggtgtatggcacgttggggggaatgttgactaggcagccctttgccatcgggggctcagggtcaaccttcatttacggctatgttgacgctgcatacaagcccggcatgagcccagaagagtgtaggcgatttactactgacgccattgcactggctatgagtcgggacggcagtagcgggggggttatctacttggtaacaatcaccgcggccggtgtcgaccatcgggtcatcctgggcaatgaactccccaagttctatgatgagtag

SEQ ID NO: 132127 - DNA, 660 bp, Artificial Sequence
  derived and/or modified sequence
atgctgcgggccggcgcccccaccggcgacctgccccgggccggcgaggtgcacacagggaccactatcatggctgtggagttcgatggaggagtcgtgatggggtcagattccagagtgtctgctggggaggctgtggttaaccgagtatttgacaaacttagcccactgcatgaacgcatatactgtgctctcagtggctctgcggccgatgcacaggcggtggcagacatggcggcctaccagctggaactgcatggtattgagctggaggagccaccactagtgctggccgctgccaacgtggtgaggaacatatcctacaaataccgggaagatctcagcgcccatctgatggtcgccgggtgggaccaacgagagggggggcaggtgtatggaaccttggggggtatgcttaccagacagcccttcgcaattggagggagcggatcaacattcatatatggctatgtggatgctgcctacaagccaggcatgtctccggaagaatgtagacgttttactacagacgccatcgcactcgccatgtcaagagatggctccagtggaggagtaatctacttagtgacgattacagcagcaggggtcgatcaccgtgtgatactgggaaatgaacttcctaaattttacgatgaatag

SEQ ID NO: 132128 - DNA, 591 bp, Artificial Sequence
  derived and/or modified sequence
atggccgtggagttcgacggcggcgtggtgatgggcagcgacagcagagtttcagcaggtgaggccgtggttaatcgggtgttcgataagctcagcccactccatgaacgcatttactgcgccctgagcggttcggctgccgacgcccaggcagtagctgacatggcagcctatcagctggagttacacgggatcgagctggaagaaccgcctttggtgctggccgctgccaacgtggtgcggaatatttcttacaaatatcgagaggatctgtctgctcatctgatggtagcagggtgggatcagagagagggcggacaggtttacggtactctgggtggcatgttaaccaggcagccttttgccataggtggtagtggatccaccttcatttacggttacgtggacgccgcgtacaagcctggaatgtcgcctgaggagtgtagaaggtttaccaccgatgcaattgccctggctatgagcagggatgggtcatctggaggtgtcatctatctggttacaataaccgccgccggagtggaccaccgtgtcattctgggaaatgagcttcctaagttttacgacgagtag

SEQ ID NO: 132129 - DNA, 591 bp, Artificial Sequence
  derived and/or modified sequence
atggccgtggagttcgacggcggcgtggtgatgggcagcgacagccgcgtaagcgcaggagaggcagtggtaaatagggtctttgacaagttgagcccccttcacgaaagaatatactgtgccttgtcgggatcagccgctgacgctcaggctgtggctgatatggcagcctaccagctggaattgcatggcatcgaattagaggaaccccctctggtattagccgccgccaacgtagtcagaaatatcagttacaagtatcgtgaagacttaagtgcacatcttatggttgccggatgggaccagcgggaagggggccaggtatacggcaccctgggaggaatgctaacgagacagccctttgccatcggcggctccggctccacattcatatacggctacgtggatgccgcctataagccaggcatgtctcccgaagaatgcagacgcttcacgacggacgccatcgcccttgcaatgtcccgagatggatcttcaggaggcgtaatttacttagtgacaatcacggctgccggggtggaccatcgggtcatactgggcaatgagctgcctaagttctatgacgaatag

SEQ ID NO: 132130 - DNA, 591 bp, Artificial Sequence
  derived and/or modified sequence
atggccgtggagttcgacggcggcgtggtgatgggcagcgacagcagagtttctgcgggtgaagcagtggttaatcgtgtattcgataaactcagtcccctccacgagaggatctactgtgcccttagcgggagtgccgcagacgcgcaggctgtcgcagatatggccgcctaccagcttgagctccacggcatcgagcttgaggaaccccccctggtccttgccgctgccaacgtagtgcgcaacatttcctataagtatagggaggatctgtctgcccacctgatggtggccggatgggaccagcgcgagggcgggcaagtctatggtacactcggaggcatgctcactcggcaacccttcgccatcggggggtcggggtcaacattcatctatggatacgtggatgccgcatacaagcctggcatgagcccagaggaatgcaggaggttcacaaccgacgctattgccttggcaatgagcagagacggtagttccgggggcgtgatctaccttgtgaccatcacagctgctggggtcgatcatcgggtcatcctcggaaatgaactgcccaaattttacgacgagtag

SEQ ID NO: 132131 - DNA, 396 bp, Artificial Sequence
  derived and/or modified sequence
atggccgtggagttcgacggcggcgtggtgatgggcagcgacagcagggtttcagccggcgaagccgttgtcaatagggtgttcgacaagttgagcccactgcatgagcggatctattgtgccttgagcggatccgcagcagatgcccaggcggttgcagatatggctgcttaccagctggagttacatgggatcgagctcgaggagcctcccctggtgcttgcagcggctaatgtcgttcgtaacatatcttacaaatacagggaagacctatccgcacacctgatggttgcaggctgggaccagcgagagggcggccaggtctatggcactttgggcggtatgcttacccgccagccttttgccatcggcggttcgggtagtacattcatctag

SEQ ID NO: 132132 - DNA, 396 bp, Artificial Sequence
  derived and/or modified sequence
atggccgtggagttcgacggcggcgtggtgatgggcagcgacagcagagtctcagccggtgaggcagtcgttaatcgcgtcttcgacaagttgtcccccttgcacgagaggatttactgcgccctgtctggaagcgccgccgacgcccaggcagtcgctgacatggcagcctatcagctggagttgcacggaattgagcttgaggagccaccactggtcctagctgcagccaacgtggtgaggaatatatcatacaagtatcgcgaggatctttccgctcatctgatggttgccgggtgggatcagagagaaggcgggcaggtgtatggaaccctggggggtatgttaacacggcagccgtttgctattggagggtcaggaagtacatttatctag

SEQ ID NO: 132133 - DNA, 396 bp, Artificial Sequence
  derived and/or modified sequence
atggccgtggagttcgacggcggcgtggtgatgggcagcgacagccgcgttagcgccggagaagcagtggttaatcgggtattcgataaactgagcccactgcacgagaggatttactgtgctctgtctggaagtgcggctgacgcacaagcagtggcagacatggccgcctatcagctggaattgcacggaatagagctggaagaaccgcccctagtgctggccgccgcaaatgttgtcaggaacataagttacaaatacagagaggacctcagtgcccatctgatggtcgcagggtgggaccagcgggagggcggccaggtatacgggactctgggcggcatgctcaccaggcagccctttgcaatcgggggatcaggatctacgttcatttag

SEQ ID NO: 132134 - DNA, 396 bp, Artificial Sequence
  derived and/or modified sequence
atggccgtggagttcgacggcggcgtggtgatgggcagcgacagccgagtttctgctggggaggctgtggtgaatcgggtgtttgataaactgtcaccgctccacgagagaatttactgtgcgctttctggctctgctgccgatgctcaggcagtggccgacatggcagcttaccagctcgagctccacggtatcgaactcgaggagccccccctcgtgttggcggccgctaacgtcgtccggaacatctcatacaaatacagagaggatctctcagcccatctcatggtagctggatgggaccagcgtgaaggaggacaggtctacgggaccctcggcgggatgctcacaaggcaaccattcgctatcggaggctcagggagcacgtttatttag

SEQ ID NO: 132135 - DNA, 396 bp, Artificial Sequence
  derived and/or modified sequence
atggccgtggagttcgacggcggcgtggtgatgggcagcgacagccgtgtctccgccggggaggcggttgtcaatagggtatttgacaagctctcaccgctgcatgagcatatttactgcgccctgtccggtagcgccgccgacgctcaggctgtcgctgacatggctgcctaccagctcgagctgcatgggattgaactggaggagccacccttagtgctggcagctgccaatgtggtgcggaacatcagctataaataccgggaggacttatcggcgcatctcatggtggctgggtgggaccagcgcgagggtggtcaggtttacgggaccctggggggcatgctaacaagacagcctttcgctatcggaggttccggtagcacgttcatctag

SEQ ID NO: 132136 - DNA, 591 bp, Artificial Sequence
  derived and/or modified sequence
atggccgtggagttcgacggcggcgtggtgatgggcagcgacagcagggtgtccgccggcgaggcagtggtcaacagggtatttgacaaactgtcccctttacatgagcgaatttattgcgccctgagcggatcagctgctgacgctcaagctgttgcagatatggctgcctaccagctagagctgcatgggatcgagctagaggagccaccactggtactagctgccgcaaatgtggtgagaaatattagctacaagtacagagaagacctgtcagctcatctgatggttgcagggtgggaccaacgcgaaggaggacaggtgtacgggacactgggtggcatgctgacaagacagccatttgccattggcggctctgggtctactttcatttacggatatgtggacgcggcgtataaaccagggatgtcccctgaggaatgtcggcgattcacaacagacgccattgctctcgccatgagcagggatggctcatctggtggagtgatatacctggttacaataactgccgctggtgtcgaccatagggtcatcctgggcaacgagcttccgaaattctatgacgaatag

SEQ ID NO: 132137 - DNA, 660 bp, Artificial Sequence
  derived and/or modified sequence
atgctgcgggccggcgcccccaccggcgacctgccccgggccggcgaagttcataccggcacaacgattatggcagtggaattcgatggaggcgttgtgatgggtagcgattcaagggtgagtgccggcgaggcggtggtcaacagggtgtttgataagctcagtccactccacgaacgaatctactgcgccctctcaggaagcgcagctgacgcgcaagctgtggctgacatggcagcatatcagctggagctccatggaatagagctagaggagcctcccctggtgctggctgccgcaaacgtagtgaggaatatatcatacaagtatcgagaggatctgtccgctcatttaatggtggctggctgggatcagcgcgagggcggtcaagtgtacgggacccttggaggcatgcttacacgccagccatttgctattgggggttctggttcaaccttcatttacggatacgttgatgccgcatataagccaggaatgtcccccgaagagtgcaggcggtttactacggacgcaatcgcactggccatgtcacgcgatgggtcttccggaggggtcatatatctggtaacaatcaccgctgctggggtcgaccatagagtgattctgggtaatgagctccccaaattctatgacgagtag

SEQ ID NO: 132138 - DNA, 591 bp, Artificial Sequence
  derived and/or modified sequence
atggccgtggagttcgacggcggcgtggtgatgggcagcgacagccgcgtttctgccggagaagcggttgtcaacagggtcttcgataaactgtccccgctgcacgagcacatctactgtgctctctccggaagtgcggcggatgcccaggctgtagcagatatggcagcttaccagcttgagctccacggcatagaacttgaggagcctcccctggttcttgccgcggcaaatgtcgtccgtaatatcagctacaagtaccgggaggatcttagcgcccatcttatggtggccggttgggaccagagggaaggcgggcaggtgtacggaaccctgggcgggatgctaacccgccaacccttcgcaatcggcggcagcggatcaacatttatctacggctatgtcgatgctgcgtacaagccaggaatgagcccggaagaatgccgcaggtttaccactgacgctatcgcccttgctatgagccgagatgggtctagcggaggagtaatttatctcgtgactattacagcagcaggcgtcgatcaccgggtgatcctcggtaatgaattacctaaattttatgatgaatag

SEQ ID NO: 132139 - DNA, 660 bp, Artificial Sequence
  derived and/or modified sequence
atgctgcgggccggcgcccccaccggcgacctgccccgggccggcgaggtgcacacaggtactactatcatggccgtcgaattcgatggcggggttgtcatgggttcagatagccgcgtcagtgccggggaggccgtggtcaatagggtttttgataagctgagtcccctgcacgagcatatctattgtgccctaagtggatcagcagcagacgctcaggccgtagccgatatggccgcctatcagttagagctgcacggaatagagctcgaggagccgccactggtcctagctgccgccaatgtcgtacgaaatataagctacaaatacagagaggacttgagtgcacacctcatggtggccggttgggaccaacgggaagggggtcaagtctacggcaccctgggaggaatgctgacgagacaaccctttgctatcggtgggtcaggctcaacattcatctacggttacgtggacgcagcttataaaccagggatgtctccggaagagtgtagaaggttcaccacagatgcaatcgcgctggctatgagccgggatggcagctccggtggggtgatttatctcgttacaattaccgcagccggcgtggaccaccgtgtcattctcggcaatgagcttcctaagttctatgatgaatag

SEQ ID NO: 132140 - DNA, 591 bp, Artificial Sequence
  derived and/or modified sequence
atggccgtggagttcgacggcggcgtggtgatgggcagcgacagccgagtgagcgccggcgaggccgtggtgaacagggtgttcgacaaactttcccccctacacgagcacatctactgcgctctctctgggtcggccgcagatgcccaggccgtggctgatatggctgcctaccaacttgagctccatggcatcgagcttgaagagccacctctggtgctcgccgccgccaacgtggtgcggaacattagttacaagtatagagaagatctcagcgcgcaccttatggttgcgggctgggaccaaagggaaggtggacaggtttacggaacgttgggcggaatgctgacccggcaacctttcgcaattggggggtcgggcagcacttttatctatggctacgtggacgctgcctacaagccggggatgagccccgaagagtgcaggcggttcactacagacgccatcgcgttagcgatgtcccgagatggatcgagcgggggagtaatatacctggtgactattactgctgctggagtggaccaccgcgtgatcctcgggaacgagctgcccaaattctatgatgagtag

SEQ ID NO: 132141 - DNA, 660 bp, Artificial Sequence
  derived and/or modified sequence
atgctgcgggccggcgcccccaccggcgacctgccccgggccggcgaggtacacaccggcaccactattatggccgtagagttcgatggtggagtggtgatgggctctgattccagggtgagtgcaggcgaggcggtagtcaatagagttttcgacaagctgtcgccgctccacgagcacatctactgcgccctgagcggcagtgccgcagacgcccaggctgtcgcagacatggccgcatatcaactggaattgcatggcattgaactggaggagccacccctcgtgctcgctgccgccaatgtggtccgaaacatctcttataagtacagagaggatctctcagcacaccttatggtggccgggtgggaccagagagaaggaggtcaggtgtacggaacacttggcggtatgctgaccagacagccctttgccattgggggctcggggtcaacgttcatctacgggtatgttgatgctgcctacaagcccggaatgtccccagaagagtgccgccgcttcactacagacgccatcgccttagccatgtcgcgcgacggttcttctggaggcgtgatctatttggtgacaatcacagctgccggtgtcgatcaccgggttatcctaggaaatgagctgcctaagttttatgacgaatag

SEQ ID NO: 132142 - DNA, 396 bp, Artificial Sequence
  derived and/or modified sequence
atggccgtggagttcgacggcggcgtggtgatgggcagcgacagcagagtctcagccggggaggcggtggtcaacagagtcttcgataagctgagccctctgcacgagcgaatttactgtgctctgtccggtagcgcggccgatgcacaagccgtcgccgacatggctgcctatcagttggagttgcacgggattgagctcgaggaaccacctctggtcctagccgccgcaaatgtcgtgaggaacattagctacaaataccgtgaggatcttagtgcccacctgatggtagcgggctgggaccagcgggaaggggggcaggtttacggcacccttggggggatgttgacccggcagccattcgcaattggagggagcgggagtacctttatatag

SEQ ID NO: 132143 - DNA, 396 bp, Artificial Sequence
  derived and/or modified sequence
atggccgtggagttcgacggcggcgtggtgatgggcagcgacagccgggtgtctgccggtgaggcagtcgtgaatcgggtatttgacaaattgtctccactccacgagcatatatactgcgcactgagcgggtcagctgcagacgcacaggccgtcgctgatatggccgcctaccagcttgagctgcacggtattgagctcgaggagccaccattggttctggctgcagccaatgttgtgaggaatatcagctataagtaccgggaggacttgtccgcccatctcatggttgcgggctgggaccagcgagaaggcggccaggtctacggaactctcggaggtatgctcactcgccagcccttcgccatcggaggatctggttccactttcatttag

SEQ ID NO: 132144 - DNA, 591 bp, Artificial Sequence
  derived and/or modified sequence
atggccgtggagttcgacggcggcgtggtgatgggcagcgacagccgcgtctcagctggagaagccgttgtcaatagggtgtttgataagctgtctcccctacacgagcacatttactgtgccctgagcggctccgccgcagacgcacaggcagtggccgacatggctgcgtaccaactcgagctccacgggatagaactagaagaaccacccttggtgctggctgctgctaacgtggttaggaatatcagctacaagtatcgggaagatctcagtgcacatttgatggtggcaggatgggatcaaagggagggcgggcaggtgtacgggaccctgggaggcatgctgaccagacagccatttgccataggcggcagtggaagcaccttcatctatggatatgtggatgccgcatacaagcccggcatgagcccggaggagtgtaggcgattcaccaccgacgctattgcactggctatgtcgagagatggcagctctggcggcgtcatttatctggtgacgataacagctgcgggggttgatcaccgcgtgatcctcggaaacgagctccctaagttctatgatgaatag

SEQ ID NO: 132145 - DNA, 660 bp, Artificial Sequence
  derived and/or modified sequence
atgctgcgggccggcgcccccaccggcgacctgccccgggccggcgaagtccatacgggaaccaccattatggccgtcgagtttgatggcggggtcgtgatgggctcagactcgagagtctcggcaggggaggctgtggtcaacagggtatttgataagctcagcccactacatgagaggatttactgcgctttgtcaggcagcgccgctgacgcgcaggccgtggctgatatggccgcataccagctggagttgcatggtattgaacttgaggaacctcccctggtgttagcggcagccaatgtggtcaggaacatcagttataagtatcgtgaggatctctccgcccacctgatggtcgcaggatgggatcagcgcgagggcggacaggtatatgggaccctgggcggcatgttaactcggcagcccttcgccataggcgggtctggcagtacctttatttacggctacgtggacgccgcatacaaaccggggatgtcccctgaagagtgtcggcgattcacgacagacgccattgctctggctatgtccagagacggatcatcaggcggagtgatctacttagtgacgatcacagctgccggagttgaccatagagtgattctgggtaatgagttgccgaagttctacgacgagtag

SEQ ID NO: 132146 - DNA, 591 bp, Artificial Sequence
  derived and/or modified sequence
atggccgtggagttcgacggcggcgtggtgatgggcagcgacagccgggtttcggccggggaagccgtcgtgaaccgggtgttcgataagctgtcccctttacatgaaagaatctattgcgctctctcaggttccgccgccgacgcacaagcagtggccgatatggccgcttaccaactggagctccatgggatcgaactggaagaacctcctctagtccttgcggctgcgaacgttgtacggaatatctcctataagtacagggaagacctgtccgcccacctgatggttgctggctgggaccagcgagagggtggccaggtgtatgggacgctcggcggcatgctcacgcgacaaccttttgccattggagggagtggtagcacattcatctacggatacgtcgacgctgcgtacaagccaggtatgagtcccgaggaatgtaggcgctttactacagatgctattgccttagcaatgtcccgggatggctcctcgggaggagtgatctacctggtgacgatcactgccgccggagttgaccacagagtgatcctgggaaacgagctacctaagttttatgacgaatag

SEQ ID NO: 132147 - DNA, 660 bp, Artificial Sequence
  derived and/or modified sequence
atgctgcgggccggcgcccccaccggcgacctgccccgggccggcgaggtgcacaccggcaccacaatcatggctgtcgaattcgatggcggagtggtgatgggctcagattcaagggtgagcgccggggaagctgtagtaaatagggttttcgacaaactatctccactgcacgagcacatttactgtgctcttagtgggtcggcagcggacgcacaggcagtcgccgacatggcagcctatcagctggagctccacggcattgaactggaggaacccccgttggtactggccgcagcaaatgtagttagaaacatctcatataaatacagagaggatctatcggcacaccttatggtggctgggtgggatcaaagagagggcggtcaagtttatggaacactcggcggaatgctcacacgccagccattcgccataggaggttcagggtctactttcatttatggatacgtagacgcggcttacaagccggggatgtccccagaagagtgccggcgatttaccacggatgccatcgcattagcaatgtcccgcgacggcagttcaggaggtgttatctatctggtcactattactgctgcaggcgtagaccacagggtgatcctgggtaatgagctgcccaaattctacgacgagtag

SEQ ID NO: 132148 - DNA, 396 bp, Artificial Sequence
  derived and/or modified sequence
atggccgtggagttcgacggcggcgtggtgatgggcagcgacagcagggtaagcgccggcgaagcagtggtgaaccgtgtcttcgacaaactgagcccacttcacgaacatatctactgcgccttgtcaggatctgctgcagatgcccaggctgtggcagacatggctgcctatcagcttgaactgcatggaatcgaactggaggaaccacctctggtgctcgcggcggccaacgtcgtgagaaatatatcctacaagtacagagaagatttgtcagcccatttgatggtggcagggtgggatcagcgagaaggagggcaggtgtatggcacactaggcggtatgttgaccagacagccgttcgctattggagggtctgggtctacattcatttag

SEQ ID NO: 132149 - DNA, 660 bp, Artificial Sequence
  derived and/or modified sequence
atgctgcgagcaggagcacctactggcgaccttccgagagccggagaagtccacactggaaccactatcatggctgtggaattcgatggcggtgtggtgatgggcagtgactcgcgtgtgagtgcaggcgaagctgtggtcaatcgggtgtttgataagttatctccattgcacgagcgaatatactgtgccctgagcgggagtgcggcagatgcccaagccgtagcagacatggccgcttatcagttagagcttcatgggattgagttagaagagcctcctctggtgctcgcagcagccaatgtcgtacggaatatctcttataagtatcgcgaggacctgagcgctcatcttatggtcgcgggatgggaccagagagaagggggtcaggtttatgggacactgggcggaatgctgacgaggcagccctttgctataggtggcagtgggtccactttcatatatggatatgtggatgcagcatataagcctgggatgagccccgaggaatgtcggagattcacgacagatgcgattgctctggcaatgtcgcgcgatggaagcagcggtggagtgatttatctcgttacaatcaccgccgcaggagtggaccaccgggttattttgggtaacgagctgcccaagttttatgacgaatag

SEQ ID NO: 132150 - DNA, 660 bp, Artificial Sequence
  derived and/or modified sequence
atgctccgtgctggggcacctactggcgacctccctcgcgctggcgaagtacacactgggactactatcatggctgtggagtttgatggcggtgtggtgatgggctctgatagccgggtctctgctggcgaggccgtggtgaaccgagtgttcgataaactgagtccacttcatgaaaggatatattgcgcactgtctgggtccgccgctgatgctcaggctgtcgcagacatggccgcatatcagctggaactgcacggcatcgagcttgaagaaccgccactggtcctggcagcagccaatgtggtgcggaacatctcgtacaagtatagagaagacttgtcagcccatcttatggttgcaggctgggaccagcgcgagggtggccaagtatatgggactctcggtggaatgttgaccagacagccatttgctatcggcggttctggaagcactttcatctacggttacgtagacgcagcgtacaagcccggtatgtcaccagaagaatgtagaaggttcaccactgacgccatcgcgctggccatgtccagggacgggtcctcaggcggtgtaatatatttggtcaccataaccgctgcgggtgtcgatcaccgcgtgattctcggaaatgaactacccaaattctacgacgaatag

SEQ ID NO: 132151 - DNA, 660 bp, Artificial Sequence
  derived and/or modified sequence
atgttacgagctggcgcaccaaccggagacctcccgagagcaggagaggtacacaccggaactaccatcatggccgtcgagttcgatggtggcgtcgtcatggggtccgacagtcgcgtgtcagcaggagaagctgtagttaatcgggtatttgacaaactgagccctctgcacgagcgtatctactgcgcgctctccggtagcgccgctgatgcacaagctgttgctgatatggctgcctaccagctcgaactgcacggaatcgagcttgaagagcctcctttagtcttggccgctgctaacgtagtaagaaatatctcttacaaatatcgggaggacctgtcagcacatttaatggtagctggttgggaccagcgagagggcggacaggtatatggtaccctcggaggcatgctgacacgccagccatttgcaatcggtgggtccgggagcacctttatctacggatacgtggatgcagcctacaagccagggatgagtcccgaggaatgtcggaggttcaccacagacgccatcgctctggccatgagccgcgatggatcttctggtggcgtgatctacctggttaccatcaccgccgctggagtagaccacagagtaatactcggaaatgaactgcctaaattctacgacgaatag

SEQ ID NO: 132152 - DNA, 591 bp, Artificial Sequence
  derived and/or modified sequence
atggcagtggagtttgatggaggagtagtcatgggctccgacagcagagtgagtgctggtgaggcggtagtgaacagggtgttcgataagttgagccctttgcacgagcgcatctactgcgccttaagcgggtcagcagccgacgcacaagcagtagctgacatggccgcttaccagctggaattgcacgggatcgagctcgaagaacctcctcttgtgctcgctgctgccaatgttgtgcggaacattagctataagtacagagaggacctgagtgcccacctcatggttgccggatgggaccagcgggaaggcggacaggtttacgggactctgggaggcatgttaacacgtcagccatttgccattggaggcagtggaagcacgttcatttacggttacgtagatgcggcatacaagccgggtatgagcccggaggagtgccgccgatttacgactgacgcaatcgcgctggccatgagccgggacggtagttctggaggagttatctatctggttacaatcactgccgctggcgtcgatcaccgggtgattctggggaacgagctaccgaagttctacgacgagtag

SEQ ID NO: 132153 - DNA, 591 bp, Artificial Sequence
  derived and/or modified sequence
atggccgtagagttcgacggaggagttgtgatggggtctgacagccgggtgagcgccggtgaggccgtcgtcaatcgtgtgtttgacaaactgagccccctgcacgaacggatatactgtgccctcagcggctccgccgctgatgcccaggccgttgcagacatggcggcttatcaactggaactgcacggcatagaacttgaagagcccccactggtgctggccgctgcgaacgtggtgcgcaacatctcttacaagtatcgcgaggacttgtccgctcacttgatggtcgcgggatgggatcagagggagggcggacaggtttacggcaccctcggtgggatgcttacacgccaacctttcgcgattgggggatccggatctaccttcatctatgggtatgtggatgcggcatacaagccagggatgtccccagaagagtgtcgaagatttacgaccgatgctattgccctcgcaatgtcacgagatggctctagtggcggagtcatctatctggtaacaatcaccgccgctggcgttgaccacagagtgatcctgggaaacgagctgcctaaattttacgatgagtag

SEQ ID NO: 132154 - DNA, 591 bp, Artificial Sequence
  derived and/or modified sequence
atggccgtggagtttgacgggggagttgtcatgggatctgactcgagggtcagtgcaggcgaggctgttgttaatagagtgttcgataagttatcccccctgcacgagcggatctattgcgccctgtctgggtccgcggctgacgcacaggctgtggcagatatggccgcataccaactggagctccacggcatcgaactggaggaaccgcctctcgtacttgccgctgcaaatgtagtgcgcaatatcagttataagtacagagaggacctgagcgcccacctgatggtggccggatgggaccagcgggagggcggtcaggtgtacggaacgctgggcggtatgctgactcgacagcccttcgccattggcggatccggctctacctttatatacggttacgtggacgccgcatataagccaggtatgtcccccgaagaatgtcgcagattcacaacagacgccattgccctggccatgagcagggacggatcgtcaggcggagtgatataccttgtcacaatcacagcagcaggcgtcgaccacagagttatattgggaaacgagctcccgaagttctacgacgagtag

SEQ ID NO: 132155 - DNA, 396 bp, Artificial Sequence
  derived and/or modified sequence
atggccgttgaatttgacgggggtgtggttatgggaagcgacagcagagtgagcgcgggtgaggcagtggtgaacagagttttcgacaaactgtcacccctacatgagaggatatactgtgcacttagcggctctgccgctgatgcccaggcggttgccgacatggcggcttaccaactcgagctccacggcatcgagctggaggaacctcctctggtgcttgccgcagcgaacgtggtgcgcaacatatcctacaaatacagagaggatctgtctgcccacttgatggtggcaggatgggaccagagagagggtggtcaggtatacggaacattggggggaatgctgacacggcagccttttgccattgggggatcgggtagcacttttatctag

SEQ ID NO: 132156 - DNA, 396 bp, Artificial Sequence
  derived and/or modified sequence
atggctgtggagttcgatggtggggtggttatgggctcagacagccgcgtgtccgctggagaagcagtggtcaacagggtatttgataaattgagcccactgcacgaaaggatctattgcgccctcagcgggagcgcggcagacgctcaggcggtagcggacatggctgcctatcagctcgagcttcacggcattgagttagaagagcctcccctggtactggccgcagctaatgtggttcggaatatatcctataaatatcgggaagacctctctgctcatcttatggtcgctggatgggaccagagggagggcggacaggtgtatgggaccctaggcggaatgctcacaagacagccttttgccataggcggatctggcagcactttcatctag

SEQ ID NO: 132157 - DNA, 396 bp, Artificial Sequence
  derived and/or modified sequence
atggccgtggagttcgatggtggcgtggtcatgggaagtgactccagggtatcagccggagaagccgtcgtcaaccgggtgttcgacaagctgtctcccctgcatgagagaatctattgcgcattaagtggttccgctgccgatgcacaagccgtggctgacatggcagcctaccagcttgagctccacggcatcgagttagaagagccaccccttgttctcgccgcagctaacgtggtccggaacatctcatacaaataccgagaagatctctcagcccacctcatggtcgctggctgggaccagagagaaggcggtcaagtttatggcacactcggcggtatgctaactcgccagccatttgcaattggcggtagtgggtcaacatttatttag

SEQ ID NO: 132158 - DNA, 396 bp, Artificial Sequence
  derived and/or modified sequence
atggcagtagaatttgacggcggagtggtcatgggatcagatagtcgagtgtccgcaggagaggctgtggttaatagagtgttcgacaaattgagccccctgcatgaacggatatactgcgccctcagtgggtccgcagctgacgctcaagccgtagccgacatggcggcatatcagcttgagctgcatgggatagagctcgaggagccccctttggtattggctgctgctaatgtggtaagaaatatcagctacaagtaccgggaagatctttccgcccacctgatggtggccggatgggatcagcgcgagggcggtcaggtctacggaacactaggaggcatgctgacccggcagcctttcgcaatcgggggttctggaagtacttttatttag

SEQ ID NO: 132159 - DNA, 396 bp, Artificial Sequence
  derived and/or modified sequence
atggccgtcgagtttgacggaggtgttgtgatgggaagcgatagccgggtgagcgcaggggaagccgttgtaaacagagtgtttgacaaactgtctcctctgcatgagcacatttattgcgcattgtccggttctgccgcagacgctcaggcagtagcagatatggcagcctatcagttagaactgcatggcatcgagttggaagagcctcccttggtgcttgccgctgctaatgtggttaggaacatttcatataaatatcgagaagacctgagtgctcatctcatggtcgccggatgggaccaaagagaggggggtcaggtttacggaacgctgggcggaatgcttactagacagccatttgcgattggaggaagcggctctactttcatctag

SEQ ID NO: 132160 - DNA, 591 bp, Artificial Sequence
  derived and/or modified sequence
atggcagtcgagttcgacggcggagtcgtgatgggctccgacagccgggttagcgctggagaagctgtggtcaatagggtgtttgataagctgagcccccttcacgaaaggatatattgcgctttgagcgggagtgccgctgacgctcaggccgttgccgacatggctgcatatcagcttgagctgcatggcatcgaactggaggaaccgccactggtgctggccgctgccaatgtcgtcagaaatattagttacaagtaccgcgaggacctctcagcacatctaatggtcgctgggtgggaccagagagaaggtggtcaggtgtacggaacactgggcggtatgctgacaagacagccattcgcaatcggcggatccggatctacattcatctatggatatgttgacgcagcctacaaaccgggtatgtccccagaagagtgtcgcagatttaccaccgatgctatcgctctggcaatgtccagggatggaagttccggaggcgtcatatatctggtgaccattaccgcagcgggtgtagatcacagggtcatcctcgggaacgagttacctaagttttatgatgagtag

SEQ ID NO: 132161 - DNA, 660 bp, Artificial Sequence
  derived and/or modified sequence
atgctccgcgcaggggctccaaccggtgatttaccacgcgctggggaggtccacactgggacgaccatcatggccgtcgaatttgacgggggtgtcgtgatgggttccgacagcagagtttccgccggagaggctgttgtgaatcgcgtttttgataaactctcacctcttcacgaacgcatctactgtgccctcagcggaagcgcggcagacgcacaagctgtggccgatatggccgcttatcaactggagctgcacggaattgagttggaagaaccgcctctagtccttgccgcagcaaacgtcgtgaggaatatcagttataagtaccgagaggacctgtcagcacacttaatggtcgctggctgggatcagagggagggcggtcaagtatatgggaccctcggcggtatgctcaccaggcagcccttcgccatcggaggctcggggtccactttcatctacggctacgtagacgcagcctacaagcccggaatgagtccagaggaatgtaggcgattcacaactgatgctatagccctcgcaatgtcccgggatggctcatcaggcggagtcatctacttggtgaccataacagccgcaggggtggatcacagggtgattctgggtaacgaactccctaagttctacgatgagtag

SEQ ID NO: 132162 - DNA, 591 bp, Artificial Sequence
  derived and/or modified sequence
atggccgtggaattcgacggaggtgtggttatgggatcggactcacgggtaagcgccggagaagcagtcgtgaatcgagtgttcgataaactcagtccgcttcatgaacatatttactgcgcactgtccgggtccgctgccgacgctcaggccgtggcggacatggcggcatatcaactggaattgcacggcatcgagctggaggaaccgccactggtgttagccgctgccaatgtcgtaagaaatatatcttacaaatatcgggaggacctttctgcccacctgatggttgctgggtgggatcaaagagaggggggacaggtgtacggaactctgggcggaatgctcacaaggcagcccttcgctattggcggaagcggaagcaccttcatttacggttacgtggacgcagcctataaaccagggatgtcgccggaagaatgcaggaggttcaccacagacgccatcgctctggctatgagccgagatggaagtagcggcggtgtaatctacctggtaaccataaccgccgctggcgtcgatcacagagtcatcctgggcaatgagctacctaaattttacgatgagtag

SEQ ID NO: 132163 - DNA, 660 bp, Artificial Sequence
  derived and/or modified sequence
atgctgcgcgcaggcgctcccactggagacctccccagagccggtgaggtgcatacaggcactacaattatggctgtggagtttgatgggggagttgtgatgggatccgactcaagagtgagcgctggcgaagccgtggtgaatagagtatttgataagctgtctccccttcatgagcacatctattgcgccctatctggttcagcagctgacgcccaggccgtggctgatatggccgcataccagctcgagctccacggcatcgaacttgaggagccgccactggtgctggctgctgctaacgtggtgcgcaacatcagttacaagtatcgcgaggacctgagcgctcatttaatggtcgccggatgggatcaacgcgagggcggtcaggtgtatggaacactaggaggcatgctcactcgccagcctttcgcgatcggaggtagtgggtcaactttcatctacgggtacgttgacgctgcttacaaacccggaatgtctcctgaggaatgcagacgatttaccaccgatgccatcgcccttgccatgagccgcgacggctcatccggaggggtgatttacttagttaccattactgctgccggagttgatcatcgcgtcattttgggcaatgagttgcccaaattttacgacgaatag

SEQ ID NO: 132164 - DNA, 591 bp, Artificial Sequence
  derived and/or modified sequence
atggcggtagagttcgatggaggcgtcgtcatgggatctgatagcagagtgagcgcgggagaggccgttgtgaaccgcgtgttcgataaattgtcacctctgcacgagcacatctattgtgcgctgtccgggagcgcagcagatgctcaagccgttgccgacatggccgcataccagttagagctgcatggaattgagcttgaggagccacccttggttctagctgctgccaacgtggtgagaaacatcagttataaatatcgggaggatttatctgcgcacctgatggtggccggttgggaccagagagaagggggacaggtgtacggcacactcggcggtatgttgacccggcagcccttcgctattgggggaagtggatctacattcatatatggttatgtggacgctgcctacaagccaggtatgagcccagaggaatgcagacgatttacaaccgacgccatcgccctcgcaatgtctagagacggatcaagcggcggtgttatttatctggtgactattaccgcggcaggagtggaccatagggttatcctcggaaacgagctgccgaagttttatgatgaatag

SEQ ID NO: 132165 - DNA, 660 bp, Artificial Sequence
  derived and/or modified sequence
atgttacgcgcaggggcacctaccggtgacctcccacgcgcaggagaggtgcataccggaacaacaattatggccgtggaatttgacggcggagtggtaatgggatccgactcccgcgtatccgccggagaagccgtcgtcaaccgagtcttcgataagctcagccccctacatgagcacatctactgtgctctgtccgggtccgccgctgacgcccaggctgtagccgacatggccgcttatcaacttgagctgcacggcatcgaactggaggaacctccactggtcttggcagccgctaatgttgtccggaacatcagctacaaatatagagaagatctgagcgcccacctgatggtggctggttgggatcaacgggagggcggacaggtttatggcacactagggggtatgctgacccgtcagccctttgctatcggaggcagtggaagtactttcatctacggctatgtcgatgctgcctacaaacctggcatgagtcctgaggagtgcaggcgtttcactaccgatgctattgccctggccatgtctagagatggttcctccggcggagttatatatttagtaaccataacggccgctggcgtggaccaccgcgtaattctgggaaacgagctccctaagttttatgatgaatag

SEQ ID NO: 132166 - DNA, 396 bp, Artificial Sequence
  derived and/or modified sequence
atggccgttgaatttgacggtggtgtggtgatgggaagcgacagccgcgtcagcgctggggaggccgtagtgaaccgggtgttcgataaactatctccactccatgaacgaatttactgtgccctatcgggcagcgctgcagatgcccaggctgtggctgatatggcagcttatcagctggagctccacggaattgagctggaggagccacctctggtattagccgctgccaacgttgtgcgtaacattagctacaaatatagagaggacttatccgcccacctcatggtcgcgggatgggaccagcgtgagggtgggcaagtttatgggacactcggaggaatgctgacgagacagccctttgcaattggcggatccggttctacatttatctag

SEQ ID NO: 132167 - DNA, 396 bp, Artificial Sequence
  derived and/or modified sequence
atggctgtagaattcgacgggggtgtagtgatggggagcgattctcgggtcagtgctggcgaggcggtggtcaaccgcgtctttgacaagttgagtcctctgcacgagcatatctattgtgctctctctgggagcgccgctgacgcacaggctgtggccgacatggccgcttatcagctcgaactgcatggcatcgagcttgaggagccaccactagtgttggcagcagccaacgtggtgcggaatatctcatacaagtatagggaggacctgtcagcacatctgatggtcgctggctgggatcagagggaaggcggacaggtttatggcacgcttggcggtatgctaactcgccaaccatttgccatcggaggctcaggatctacattcatctag

SEQ ID NO: 132168 - DNA, 591 bp, Artificial Sequence
  derived and/or modified sequence
atggccgtggagttcgacgggggtgtagtgatgggcagtgactcccgggtgagcgccggtgaagcggtcgtgaacagagtgttcgacaagctatcgccgctgcatgagcatatttactgcgcgctgtccggctcagccgcagatgctcaagctgttgctgacatggccgcataccagcttgaactgcatgggattgagctggaggagcccccactggtactagccgctgcaaacgtggttagaaacatttcctataaatatagggaggatttatcagctcatctgatggttgccggatgggatcagcgcgaaggcggacaagtatacgggacgttagggggaatgttaaccagacagccatttgctatcggcggtagcggcagtacctttatctacggctatgtagacgcagcttataagccaggaatgagtcctgaggaatgcaggcgctttacaaccgacgccatcgctctagctatgtcacgggacggcagctccgggggtgtaatttacctggtcactataacagccgctggagtcgaccatagggttatcttgggaaatgaactacccaagttctatgacgagtag

SEQ ID NO: 132169 - DNA, 660 bp, Artificial Sequence
  derived and/or modified sequence
atgctccgggcaggtgcccctacaggagacctgccacgcgcaggcgaagtgcatacaggcacaacaatcatggccgtcgagttcgacggcggagtggtcatgggctcggattctcgggtgagcgcgggagaggccgtagtcaatagagtgtttgataagctgtctccgctacatgagagaatctactgtgcactgtctggctcagccgcagacgcacaggcagtggctgacatggcagcctatcagcttgagttacacggcattgaactggaggaacctccacttgtcttagccgctgccaatgtggtccgcaatataagttacaaatatcgcgaggatctcagcgcccacctcatggtggccggatgggatcagcgggagggtggccaggtttatggaacactgggagggatgttaacgcgccagccttttgctatcgggggatctggctccaccttcatatatggatatgtggacgccgcatataagcctgggatgagtcccgaggagtgccggaggtttaccacagatgcaattgcgctcgctatgagcagagacggatcctccggaggtgtgatttacctggtcactattacagccgctggagtggatcatagagtcatccttggaaatgaactgcctaagttctacgatgaatag

SEQ ID NO: 132170 - DNA, 591 bp, Artificial Sequence
  derived and/or modified sequence
atggccgttgagttcgatggcggagtcgtgatgggctcggactcaagggtgtccgctggggaggccgtcgtgaatcgggtgttcgataaattgtccccgttacatgaaaggatctattgtgccctgtctggctccgccgctgatgcacaggcggttgccgatatggcggcttatcagctggaattacatggcattgaactagaggagccaccacttgtgcttgcagcggcaaacgttgtgcgtaatattagttacaaatacagagaggatctatctgcccacctgatggtcgccggatgggatcagagggagggcggacaagtttacggaaccctgggcggaatgctgaccaggcagcccttcgccatcggcggatcaggatcaacctttatctacggttacgtcgatgccgcttacaaacccggaatgtcaccagaggaatgtcgtagattcacaacagacgccatcgccctcgccatgagccgggacggcagttctggaggtgtcatttatctggtgaccatcactgcagctggagtcgatcacagggtcatcctgggaaacgagctcccaaaattttacgacgagtag

SEQ ID NO: 132171 - DNA, 660 bp, Artificial Sequence
  derived and/or modified sequence
atgctgcgcgctggtgccccaaccggcgaccttcccagagctggcgaggtacacaccgggaccacaattatggccgttgaattcgacgggggtgtggtcatgggcagtgacagcagggtatctgccggagaagcagtggtaaatcgcgtgtttgacaagctgtccccactacacgaacacatatattgcgcccttagtggtagtgcggcagatgcacaggcagtggccgatatggctgcataccaactagagctgcatggtatcgaattggaagaaccccctctggttctcgctgcagcaaacgtggtgcgcaatatctcgtacaaatatcgcgaagatttatccgcccacctcatggtcgccggatgggaccagagggagggagggcaggtgtatggcacactaggtggcatgctgactaggcagccattcgctatcggtggatcgggtagtactttcatctacggttacgtggatgccgcttacaaacccggaatgagcccagaggagtgtcgaaggtttactaccgatgccatagccctggctatgtcccgggatgggtcctcaggcggagtcatctaccttgtaaccatcacggccgcaggcgtggaccatcgtgtgatcctgggcaatgaactgcctaagttttatgacgaatag

SEQ ID NO: 132172 - DNA, 396 bp, Artificial Sequence
  derived and/or modified sequence
atggccgtggagtttgacggcggtgtggtgatgggatcggattctcgcgtgagcgctggcgaggcggtggtcaaccgggtgtttgataagctgagtcctctccatgagcatatatattgcgctttgagcggttctgctgcggacgctcaggctgtggctgacatggcagcgtaccagctggagctgcatgggattgagctggaggaacctcctcttgtgctggcggctgcaaatgtcgtaaggaacatctcatataaatatcgggaagatttgtcagcacatctgatggtagccggatgggatcagcgggaagggggtcaggtgtacggcaccctaggagggatgttgacaaggcaaccatttgcaattggaggttccggaagtacctttatttag

SEQ ID NO: 132173 - DNA, 782 bp, Artificial Sequence
  derived and/or modified sequence
gcgcgttgtgcgctgtcccaggttggaaaccagtgccccaggcggcgaggagagcggtgccttgcagggatgctgcgggcgggagcaccaaccggggacttaccccgggcgggagaagtccacaccgggaccaccatcatggcagtggagtttgacgggggcgttgtgatgggttctgattcccgagtgtctgcaggcgaggcggtggtgaaccgagtgtttgacaagctgtccccgctgcacgagcgcatctactgtgcactctctggttcagctgctgatgcccaagccgtggccgacatggccgcctaccagctggagctccatgggatagaactggaggaacctccacttgttttggctgctgcaaatgtggtgagaaatatcagctataaatatcgagaggacttgtctgcacatctcatggtagctggctgggaccaacgtgaaggaggtcaggtatatggaaccctgggaggaatgctgactcgacagccttttgccattggtggctccggcagcacctttatctatggttatgtggatgcagcatataagccaggcatgtctcccgaggagtgcaggcgcttcaccacagacgctattgctctggccatgagccgggatggctcaagcgggggtgtcatctacctggtcactattacagctgccggtgtggaccatcgagtcatcttgggcaatgaactgccaaaattctatgatgagtgaaccttccccagacttctctttcttattttgtaataaactctctagggccaaaa

SEQ ID NO: 132174 - DNA, 792 bp, Artificial Sequence
  derived and/or modified sequence
ggaccatcacactggggaccggcttctctgctctcccgttatgggggtcgggggaatgatgggtcaagggtcttccgaagaaagcgagaaaggaacaggcgccttcaaaagcccacttggcgatgggttacagtaagagaccaccatcatggcagtggagtttgacgggggcgttgtgatgggttctgattcccgagtgtctgcaggcgaggcggtggtgaaccgagtgtttgacaagctgtccccgctgcacgagcgcatctactgtgcactctctggttcagctgctgatgcccaagccgtggccgacatggccgcctaccagctggagctccatgggatagaactggaggaacctccacttgttttggctgctgcaaatgtggtgagaaatatcagctataaatatcgagaggacttgtctgcacatctcatggtagctggctgggaccaacgtgaaggaggtcaggtatatggaaccctgggaggaatgctgactcgacagccttttgccattggtggctccggcagcacctttatctatggttatgtggatgcagcatataagccaggcatgtctcccgaggagtgcaggcgcttcaccacagacgctattgctctggccatgagccgggatggctcaagcgggggtgtcatctacctggtcactattacagctgccggtgtggaccatcgagtcatcttgggcaatgaactgccaaaattctatgatgagtgaaccttccccagacttctctttcttattttgtaataaactctctagggccaaaa

SEQ ID NO: 132175 - DNA, 439 bp, Artificial Sequence
  derived and/or modified sequence
gccaggcgagccaggaaggaccagcgggcgaggtgaccaccatcatggcagtggagtttgacgggggcgttgtgatgggttctgattcccgagtgtctgcaggcgaggcggtggtgaaccgagtgtttgacaagctgtccccgctgcacgagcgcatctactgtgcactctctggttcagctgctgatgcccaagccgtggccgacatggccgcctaccagctggagctccatgggatagaactggaggaacctccacttgttttggctgctgcaaatgtggtgagaaatatcagctataaatatcgagaggacttgtctgcacatctcatggtagctggctgggaccaacgtgaaggaggtcaggtatatggaaccctgggaggaatgctgactcgacagccttttgccattggtggctccggcagcacctttatcta

SEQ ID NO: 132176 - DNA, 439 bp, Artificial Sequence
  derived and/or modified sequence
gccaggcgagccaggaaggaccagcgggcgaggtgaccaccatcatggcagtggagtttgacgggggcgttgtgatgggttctgattcccgagtgtctgcaggcgaggcggtggtgaaccgagtgtttgacaagctgtccccgctgcacgagcacatctactgtgcactctctggttcagctgctgatgcccaagccgtggccgacatggccgcctaccagctggagctccatgggatagaactggaggaacctccacttgttttggctgctgcaaatgtggtgagaaatatcagctataaatatcgagaggacttgtctgcacatctcatggtagctggctgggaccaacgtgaaggaggtcaggtatatggaaccctgggaggaatgctgactcgacagccttttgccattggtggctccggcagcacctttatcta

SEQ ID NO: 132177 - DNA, 792 bp, Artificial Sequence
  derived and/or modified sequence
ggaccatcacactggggaccggcttctctgctctcccgttatgggggtcgggggaatgatgggtcaagggtcttccgaagaaagcgagaaaggaacaggcgccttcaaaagcccacttggcgatgggttacagtaagagaccaccatcatggcagtggagtttgacgggggcgttgtgatgggttctgattcccgagtgtctgcaggcgaggcggtggtgaaccgagtgtttgacaagctgtccccgctgcacgagcacatctactgtgcactctctggttcagctgctgatgcccaagccgtggccgacatggccgcctaccagctggagctccatgggatagaactggaggaacctccacttgttttggctgctgcaaatgtggtgagaaatatcagctataaatatcgagaggacttgtctgcacatctcatggtagctggctgggaccaacgtgaaggaggtcaggtatatggaaccctgggaggaatgctgactcgacagccttttgccattggtggctccggcagcacctttatctatggttatgtggatgcagcatataagccaggcatgtctcccgaggagtgcaggcgcttcaccacagacgctattgctctggccatgagccgggatggctcaagcgggggtgtcatctacctggtcactattacagctgccggtgtggaccatcgagtcatcttgggcaatgaactgccaaaattctatgatgagtgaaccttccccagacttctctttcttattttgtaataaactctctagggccaaaa

SEQ ID NO: 132178 - DNA, 782 bp, Artificial Sequence
  derived and/or modified sequence
gcgcgttgtgcgctgtcccaggttggaaaccagtgccccaggcggcgaggagagcggtgccttgcagggatgctgcgggcgggagcaccaaccggggacttaccccgggcgggagaagtccacaccgggaccaccatcatggcagtggagtttgacgggggcgttgtgatgggttctgattcccgagtgtctgcaggcgaggcggtggtgaaccgagtgtttgacaagctgtccccgctgcacgagcacatctactgtgcactctctggttcagctgctgatgcccaagccgtggccgacatggccgcctaccagctggagctccatgggatagaactggaggaacctccacttgttttggctgctgcaaatgtggtgagaaatatcagctataaatatcgagaggacttgtctgcacatctcatggtagctggctgggaccaacgtgaaggaggtcaggtatatggaaccctgggaggaatgctgactcgacagccttttgccattggtggctccggcagcacctttatctatggttatgtggatgcagcatataagccaggcatgtctcccgaggagtgcaggcgcttcaccacagacgctattgctctggccatgagccgggatggctcaagcgggggtgtcatctacctggtcactattacagctgccggtgtggaccatcgagtcatcttgggcaatgaactgccaaaattctatgatgagtgaaccttccccagacttctctttcttattttgtaataaactctctagggccaaaa

SEQ ID NO: 132179 - DNA, 660 bp, Artificial Sequence
  derived and/or modified sequence
atgctgagagccggcgcccccaccggcgacctgcccagagccggcgaggtgcacaccggcaccaccatcatggccgtggagttcgacggcggcgtggtgatgggcagcgacagcagagtgagcgccggcgaggccgtggtgaacagagtgttcgacaagctgagccccctgcacgagagaatctactgcgccctgagcggcagcgccgccgacgcccaggccgtggccgacatggccgcctaccagctggagctgcacggcatcgagctggaggagccccccctggtgctggccgccgccaacgtggtgagaaacatcagctacaagtacagagaggacctgagcgcccacctgatggtggccggctgggaccagagagagggcggccaggtgtacggcaccctgggcggcatgctgaccagacagcccttcgccatcggcggcagcggcagcaccttcatctacggctacgtggacgccgcctacaagcccggcatgagccccgaggagtgcagaagattcaccaccgacgccatcgccctggccatgagcagagacggcagcagcggcggcgtgatctacctggtgaccatcaccgccgccggcgtggaccacagagtgatcctgggcaacgagctgcccaagttctacgacgagtag

SEQ ID NO: 132180 - DNA, 591 bp, Artificial Sequence
  derived and/or modified sequence
atggccgtggagttcgacggcggcgtggtgatgggcagcgacagcagagtgagcgccggcgaggccgtggtgaacagagtgttcgacaagctgagccccctgcacgagagaatctactgcgccctgagcggcagcgccgccgacgcccaggccgtggccgacatggccgcctaccagctggagctgcacggcatcgagctggaggagccccccctggtgctggccgccgccaacgtggtgagaaacatcagctacaagtacagagaggacctgagcgcccacctgatggtggccggctgggaccagagagagggcggccaggtgtacggcaccctgggcggcatgctgaccagacagcccttcgccatcggcggcagcggcagcaccttcatctacggctacgtggacgccgcctacaagcccggcatgagccccgaggagtgcagaagattcaccaccgacgccatcgccctggccatgagcagagacggcagcagcggcggcgtgatctacctggtgaccatcaccgccgccggcgtggaccacagagtgatcctgggcaacgagctgcccaagttctacgacgagtag

SEQ ID NO: 132181 - DNA, 396 bp, Artificial Sequence
  derived and/or modified sequence
atggccgtggagttcgacggcggcgtggtgatgggcagcgacagcagagtgagcgccggcgaggccgtggtgaacagagtgttcgacaagctgagccccctgcacgagagaatctactgcgccctgagcggcagcgccgccgacgcccaggccgtggccgacatggccgcctaccagctggagctgcacggcatcgagctggaggagccccccctggtgctggccgccgccaacgtggtgagaaacatcagctacaagtacagagaggacctgagcgcccacctgatggtggccggctgggaccagagagagggcggccaggtgtacggcaccctgggcggcatgctgaccagacagcccttcgccatcggcggcagcggcagcaccttcatctag

SEQ ID NO: 132182 - DNA, 396 bp, Artificial Sequence
  derived and/or modified sequence
atggccgtggagttcgacggcggcgtggtgatgggcagcgacagcagagtgagcgccggcgaggccgtggtgaacagagtgttcgacaagctgagccccctgcacgagcacatctactgcgccctgagcggcagcgccgccgacgcccaggccgtggccgacatggccgcctaccagctggagctgcacggcatcgagctggaggagccccccctggtgctggccgccgccaacgtggtgagaaacatcagctacaagtacagagaggacctgagcgcccacctgatggtggccggctgggaccagagagagggcggccaggtgtacggcaccctgggcggcatgctgaccagacagcccttcgccatcggcggcagcggcagcaccttcatctag

SEQ ID NO: 132183 - DNA, 591 bp, Artificial Sequence
  derived and/or modified sequence
atggccgtggagttcgacggcggcgtggtgatgggcagcgacagcagagtgagcgccggcgaggccgtggtgaacagagtgttcgacaagctgagccccctgcacgagcacatctactgcgccctgagcggcagcgccgccgacgcccaggccgtggccgacatggccgcctaccagctggagctgcacggcatcgagctggaggagccccccctggtgctggccgccgccaacgtggtgagaaacatcagctacaagtacagagaggacctgagcgcccacctgatggtggccggctgggaccagagagagggcggccaggtgtacggcaccctgggcggcatgctgaccagacagcccttcgccatcggcggcagcggcagcaccttcatctacggctacgtggacgccgcctacaagcccggcatgagccccgaggagtgcagaagattcaccaccgacgccatcgccctggccatgagcagagacggcagcagcggcggcgtgatctacctggtgaccatcaccgccgccggcgtggaccacagagtgatcctgggcaacgagctgcccaagttctacgacgagtag

SEQ ID NO: 132184 - DNA, 660 bp, Artificial Sequence
  derived and/or modified sequence
atgctgagagccggcgcccccaccggcgacctgcccagagccggcgaggtgcacaccggcaccaccatcatggccgtggagttcgacggcggcgtggtgatgggcagcgacagcagagtgagcgccggcgaggccgtggtgaacagagtgttcgacaagctgagccccctgcacgagcacatctactgcgccctgagcggcagcgccgccgacgcccaggccgtggccgacatggccgcctaccagctggagctgcacggcatcgagctggaggagccccccctggtgctggccgccgccaacgtggtgagaaacatcagctacaagtacagagaggacctgagcgcccacctgatggtggccggctgggaccagagagagggcggccaggtgtacggcaccctgggcggcatgctgaccagacagcccttcgccatcggcggcagcggcagcaccttcatctacggctacgtggacgccgcctacaagcccggcatgagccccgaggagtgcagaagattcaccaccgacgccatcgccctggccatgagcagagacggcagcagcggcggcgtgatctacctggtgaccatcaccgccgccggcgtggaccacagagtgatcctgggcaacgagctgcccaagttctacgacgagtag

SEQ ID NO: 132185 - protein, 273 aa, Artificial Sequence
  derived and/or modified sequence
MLKPALEPRGGFSFENCQRNASLERVLPGLKVPHARKTGTTIAGLVFQDGVILGADTRATNDSVVADKSCEKIHFIAPKIYCCGAGVAADAEMTTRMVASKMELHALSTGREPRVATVTRILRQTLFRYQGHVGASLIVGGVDLTGPQLYGVHPHGSYSRLPFTALGSGQDAALAVLEDRFQPNMTLEAAQGLLVEAVTAGILGDLGSGGNVDACVITKTGAKLLRTLSSPTEPVKRSGRYHFVPGTTAVLTQTVKPLTLELVEETVQAMEVE

SEQ ID NO: 132186 - DNA, 822 bp, Artificial Sequence
  derived and/or modified sequence
atgctaaaacccgcactggaacctagagggggcttctcattcgaaaattgccagcgtaatgcaagcctcgaaagggtactgccgggcctgaaggtgccccacgcacggaagactggcaccacaattgctggactcgtctttcaggacggagtgatactgggtgcagatacgagagctaccaacgatagcgtcgtcgccgataaatcttgcgagaaaatccattttatcgcccctaagatatactgctgtggggctggtgtggcagcggacgcagagatgacaacacgcatggtagcctccaagatggagttacatgccctctcgaccggaagagagcctagggtggccactgtgacgcgcatcttgagacagactcttttccgctaccaggggcacgttggggcttccctaatcgtgggaggcgtggacctgaccggaccacagctgtacggggtgcatccacatggtagctactcgaggctgccatttaccgcactgggttccgggcaggatgctgcgctggctgtgctcgaggaccgcttccaacctaatatgaccctcgaagctgcacaggggctccttgtggaggccgtaacggcaggaattctaggagacttagggtcggggggcaatgtggatgcctgtgtgataaccaagactggcgccaagctgctgcgtaccttgagttcccctaccgagcctgtcaaaaggagcggtagatatcacttcgtgccgggcactacggctgttctgacgcagacagtaaaacccttgacgctcgaactggttgaagaaactgttcaagccatggaggtggagtag

SEQ ID NO: 132187 - DNA, 822 bp, Artificial Sequence
  derived and/or modified sequence
atgctgaagccagccctggagccccggggcggcttctcctttgagaactgccagagaaatgccagcctggagcgggtgctgcccggcctgaaggtgccccacgccaggaagacaggcaccaccatcgccggcctggtgttccaggatggagtcatcctgggcgctgacacccgggccaccaatgattctgtggtggccgacaagagctgtgagaagatccacttcatcgcccccaagatctactgctgcggggccggcgtggccgcagatgctgagatgaccaccaggatggtggccagcaagatggagctgcacgccctgagcacaggccgggagccccgggtggccaccgtgacccgcatcctgcggcagaccctcttccgctaccagggccacgtgggcgccagcctcatcgtgggcggcgtggacctgaccggcccccagctgtatggagtgcacccccacggcagctacagccggctgcccttcaccgccctgggcagcggccaggatgctgccctggccgtgctggaggaccgcttccagcccaacatgaccctggaggccgcccagggcctgctggtggaggccgtgacagctggcatcctgggggacctgggcagcggcggcaatgtggatgcctgtgtgatcaccaagacaggagccaagctgctgcggaccctgagcagccccacagagcctgtgaagaggagcggccgctaccactttgtgcccggcaccacagctgtgctgacccagacagtgaagcccctgaccctggagctggtggaggagaccgtgcaggccatggaggtggagtag

SEQ ID NO: 132188 - DNA, 822 bp, Artificial Sequence
  derived and/or modified sequence
atgctgaagcccgccctggagccccggggcggcttcagcttcgagaactgccagcgcaatgcgtcgctggagcgagtgctgcctggccttaaggtgccccacgctcgcaagaccggaaccaccattgctggtctagtttttcaggatggggtgattctcggagcggataccagggctacaaacgacagcgtcgtagccgataagtcttgcgaaaagatccattttatcgcccccaaaatctattgttgtggggcgggtgtggctgctgacgcagaaatgacgaccaggatggtggcgagcaagatggagttgcatgctctttcgaccgggcgcgagccaagagttgcaaccgttacaaggattctccgccagactttatttcgttatcagggtcatgtgggggcttcccttatcgtcggaggcgttgatctcacaggccctcaactctacggggtacaccctcatggctcatattctaggttacccttcacagctcttggaagtgggcaggatgcagctctggcagtgctggaggatcgttttcagccaaatatgacactcgaagccgcgcaaggactgctggtggaggccgtgaccgcaggaatccttggggatctggggtctggaggcaatgtggatgcatgcgtgattaccaaaacaggggcaaaactcctgcgcactttgtcttctccaacggagcctgtgaagcggagtggaaggtaccactttgtccctggaaccaccgcggttctcactcaaacggtcaagccactgaccctcgagttggtagaagaaacagtgcaagctatggaggtcgagtag

SEQ ID NO: 132189 - DNA, 822 bp, Artificial Sequence
  derived and/or modified sequence
atgttgaaacctgctctggaaccccgtgggggtttttcttttgaaaactgtcagaggaacgcatctcttgaacgcgtgttgcctgggctgaaggtgccacatgctagaaagaccggcactacaatcgcagggctcgtctttcaagatggggtgattctgggtgcagacacccgggcaacaaacgattccgtcgttgcggataagtcctgtgagaaaatccacttcatagccccaaagatctactgttgcggagctggcgtggcagctgatgctgaaatgaccactcgaatggtggcatccaagatggagttgcatgccctgtcaactggacgcgaaccacgggtcgccacggtcacccgcattttgcggcagaccctttttcgctaccaaggccacgtgggtgcttcccttatcgttgggggagtggacctcactgggccacaactgtacggggtccacccacacgggagctactcaagactgcccttcacagctcttgggtccggtcaagacgccgcattggcggtccttgaagacagattccaaccgaatatgacactagaggccgctcagggtctgctggtcgaagcagtcactgccggaatacttggcgatttagggagcgggggaaacgtggacgcatgtgtgattacgaaaactggtgccaagctcttgagaactctgagcagtcctaccgaaccagtcaagcggagcggacgctatcatttcgtgccgggaaccaccgctgtattgacccaaactgtcaaacccctgacgctggaactggttgaggagaccgttcaggcgatggaggtggagtag

SEQ ID NO: 132190 - DNA, 1218 bp, Artificial Sequence
  derived and/or modified sequence
aagagcaaggggctcagatggagggggaggaggacctgaacaagtccagaagggaagagatttgtccctctatccaacagagtacccagtgagcagcacagagggcacagcaagggacatcacccggttccccaaatgctcagagccacaagtgaagccaaaagtgaaagacaagatgcagaaaaccgccacgggcctttgaggaagggtaaaggcgaaagcgaaagcaggaagtacagacgtgaagcctagcagaggactttttagctgctcactggccccgcttgtctggccgactcatccgcccgcgacccctaatcccctctgcctgccccaagatgctgaagccagccctggagccccgagggggcttctccttcgagaactgccaaagaaatgcatcattggaacgcgtcctcccggggctcaaggtccctcacgcacgcaagaccgggaccaccatcgcgggcctggtgttccaagacggggtcattctgggcgccgatacgcgagccactaacgattcggtcgtggcggacaagagctgcgagaagatccacttcatcgcccccaaaatctactgctgtggggctggagtagccgcggacgccgagatgaccacacggatggtggcgtccaagatggagctacacgcgttatctacgggccgcgagccccgcgtggccacggtcactcgcatcctgcgccagacgctcttcaggtaccagggccacgtgggtgcatcgctgatcgtgggcggcgtagacctgactggaccgcagctctacggtgtgcatccccatggctcctacagccgtctgcccttcacagccctgggctctggtcaggacgcggccctggcggtgctagaagaccggttccagccgaacatgacgctggaggctgctcaggggctgctggtggaagccgtcaccgccgggatcttgggtgacctgggctccgggggcaatgtggacgcatgtgtgatcacaaagactggcgccaagctgctgcggacactgagctcacccacagagcccgtgaagaggtctggccgctaccactttgtgcctggaaccacagctgtcctgacccagacagtgaagccactaaccctggagctagtggaggaaactgtgcaggctatggaggtggagtaagctgaggcttagagcttggaacaagggggaataaacccagaaaatacagttaaacaga

SEQ ID NO: 132191 - DNA, 822 bp, Artificial Sequence
  derived and/or modified sequence
atgctgaagcccgccctggagcccagaggcggcttcagcttcgagaactgccagagaaacgccagcctggagagagtgctgcccggcctgaaggtgccccacgccagaaagaccggcaccaccatcgccggcctggtgttccaggacggcgtgatcctgggcgccgacaccagagccaccaacgacagcgtggtggccgacaagagctgcgagaagatccacttcatcgcccccaagatctactgctgcggcgccggcgtggccgccgacgccgagatgaccaccagaatggtggccagcaagatggagctgcacgccctgagcaccggcagagagcccagagtggccaccgtgaccagaatcctgagacagaccctgttcagataccagggccacgtgggcgccagcctgatcgtgggcggcgtggacctgaccggcccccagctgtacggcgtgcacccccacggcagctacagcagactgcccttcaccgccctgggcagcggccaggacgccgccctggccgtgctggaggacagattccagcccaacatgaccctggaggccgcccagggcctgctggtggaggccgtgaccgccggcatcctgggcgacctgggcagcggcggcaacgtggacgcctgcgtgatcaccaagaccggcgccaagctgctgagaaccctgagcagccccaccgagcccgtgaagagaagcggcagataccacttcgtgcccggcaccaccgccgtgctgacccagaccgtgaagcccctgaccctggagctggtggaggagaccgtgcaggccatggaggtggagtag

SEQ ID NO: 132192 - protein, 440 aa, Artificial Sequence
  derived and/or modified sequence
MGQSQSGGHGPGGGKKDDKDKKKKYEPPVPTRVGKKKKKTKGPDAASKLPLVTPHTQCRLKLLKLERIKDYLLMEEEFIRNQEQMKPLEEKQEEERSKVDDLRGTPMSVGTLEEIIDDNHAIVSTSVGSEHYVSILSFVDKDLLEPGCSVLLNHKVHAVIGVLMDDTDPLVTVMKVEKAPQETYADIGGLDNQIQEIKESVELPLTHPEYYEEMGIKPPKGVILYGPPGTGKTLLAKAVANQTSATFLRVVGSELIQKYLGDGPKLVRELFRVAEEHAPSIVFIDEIDAIGTKRYDSNSGGEREIQRTMLELLNQLDGFDSRGDVKVIMATNRIETLDPALIRPGRIDRKIEFPLPDEKTKKRIFQIHTSRMTLADDVTLDDLIMAKDDLSGADIKAICTEAGLMALRERRMKVTNEDFKKSKENVLYKKQEGTPEGLYL

SEQ ID NO: 132193 - protein, 367 aa, Artificial Sequence
  derived and/or modified sequence
MEEEFIRNQEQMKPLEEKQEEERSKVDDLRGTPMSVGTLEEIIDDNHAIVSTSVGSEHYVSILSFVDKDLLEPGCSVLLNHKVHAVIGVLMDDTDPLVTVMKVEKAPQETYADIGGLDNQIQEIKESVELPLTHPEYYEEMGIKPPKGVILYGPPGTGKTLLAKAVANQTSATFLRVVGSELIQKYLGDGPKLVRELFRVAEEHAPSIVFIDEIDAIGTKRYDSNSGGEREIQRTMLELLNQLDGFDSRGDVKVIMATNRIETLDPALIRPGRIDRKIEFPLPDEKTKKRIFQIHTSRMTLADDVTLDDLIMAKDDLSGADIKAICTEAGLMALRERRMKVTNEDFKKSKENVLYKKQEGTPEGLYL

SEQ ID NO: 132194 - DNA, 1323 bp, Artificial Sequence
  derived and/or modified sequence
atgggtcagtctcaaagcgggggccatggcccaggaggtgggaagaaggacgataaggacaagaagaaaaaatacgagcccccagttccgaccagggttgggaagaagaaaaagaagaccaaggggccagacgccgcctccaagctccctctggtgacacctcatacccagtgcaggctgaagctcctgaagttggaacggataaaggactatttgctcatggaagaagaatttatcagaaaccaggagcagatgaaacctctggaggagaaacaagaggaggagaggtctaaggtggatgatctgaggggcacaccaatgagcgttggtactttggaagaaatcattgacgacaatcatgcgatcgtgtcaaccagcgtgggcagcgagcactacgtttccatcctgtcatttgtggataaagacctgctggagccagggtgtagtgttctgctgaaccacaaagtacatgccgttatcggtgtgctaatggatgatacggatcctctcgtgacagttatgaaggtggagaaggccccccaggaaacttacgcggatattggagggctggacaatcagatccaggagatcaaagagagcgtagaattgccactgactcaccctgagtattacgaagagatggggattaaacctcctaagggcgtaatcctctacgggcctcccggtactggaaaaacgctcctagcaaaagccgttgccaaccagactagcgcaacattccttagggtggtggggtccgagctgatacagaagtacttaggggacggacctaaacttgtccgagaactgtttagagtggcagaggaacatgccccaagtatagtctttattgacgagattgatgctataggcaccaagcgctacgattctaacagtgggggcgaaagggaaattcagaggaccatgcttgaactgttgaatcagctggacggcttcgattcacgtggggatgtgaaggtgatcatggcaaccaatcggatcgaaactctagatccggctctgatcaggccgggcaggatcgatcgaaagattgagttcccgttacccgatgaaaagacaaaaaagaggatattccagatccacacgagtaggatgactttagccgacgacgtgaccctagacgacctgataatggctaaagatgacctctcgggtgctgacattaaggcaatttgtacagaggcaggcctcatggctctgagggaacgcaggatgaaggtgactaatgaggattttaagaagtctaaggaaaatgtgctgtacaaaaaacaagaaggtacacctgaggggctgtatctttag

SEQ ID NO: 132195 - DNA, 1104 bp, Artificial Sequence
  derived and/or modified sequence
atggaggaggagttcatcaggaaccaggaacagatgaagcccctcgaggagaagcaagaagaggaaagaagcaaagtagatgacctcagagggaccccaatgtctgtcggaactctcgaggaaattatcgacgacaatcacgccatcgttagcacctccgtgggatcagaacattatgtttcaatactgagttttgtggacaaggacctgcttgagcctggctgcagcgtgctcttaaatcacaaagtacatgcggtgatcggcgtattgatggacgacacagaccccctggtaaccgtgatgaaggtagagaaggcaccccaagagacttacgcagacatagggggattagacaatcagatccaggagataaaagaatctgtggagctgccactgactcaccctgagtactatgaagaaatgggcattaagccccctaaaggcgtcatcctgtatggtccgcccgggaccggtaagactttactggccaaggccgtggccaaccaaactagcgccacctttctgagggttgtcggctctgaattaatacagaaatacctaggagatgggcctaagctcgtgcgcgagcttttcagggtggcagaagagcacgccccaagcatcgtctttatagacgaaatcgatgctattgggaccaaaaggtatgatagtaatagtggcggcgagagagaaatccaacggaccatgttggagctgctgaatcagctcgatggatttgactcccggggagacgtcaaggtcatcatggccaccaacagaattgagactctggaccccgccctgatccgaccggggaggatcgacaggaaaatagaatttccactgcctgatgagaagacaaagaaaaggattttccaaattcatacttctaggatgaccctggctgacgacgtaaccctggacgacctgatcatggctaaggacgacttgagcggggcagacattaaggcaatctgtaccgaagccggactgatggcgctgcgcgagcggaggatgaaagtgaccaacgaggatttcaaaaaatcgaaggaaaatgtgttatataagaagcaggagggaacccccgagggtctttacctgtag

SEQ ID NO: 132196 - DNA, 1323 bp, Artificial Sequence
  derived and/or modified sequence
atgggccagagccagagcggcggccacggccctgggggcggcaagaaggatgacaaggacaagaagaagaagtatgagccccctgtgcccaccagggtgggcaagaagaagaagaagaccaagggcccagatgctgccagcaagctgcccctggtgaccccccacacccagtgccgcctgaagctgctgaagctggagcgcatcaaggactacctgctgatggaggaggagttcatccggaaccaggagcagatgaagcccctggaggagaagcaggaggaggagaggagcaaggtggatgacctgcggggcacccccatgtctgtgggcaccctggaggagatcattgatgacaaccacgccatcgtgtccacctctgtgggcagcgagcactacgtgtccatcctgagctttgtggacaaggacctgctggagcccggctgcagcgtgctgctgaaccacaaggtgcacgccgtcatcggcgtgctgatggatgacacagaccccctggtgacagtgatgaaggtggagaaggccccccaggagacctatgctgacattggaggcctggacaaccagatccaggagatcaaggagagcgtggagctgcccctgacccaccctgagtactatgaggagatgggcatcaagccacccaagggcgtcatcctgtatggccccccaggcaccgggaagaccctgctggccaaggctgtggccaaccagaccagcgccaccttcctgcgggtggtgggcagcgagctgatccagaagtacctgggagatggccccaagctggtgcgggagctgttccgggtggccgaggagcacgcccccagcatcgtgttcattgatgaaattgatgccatcggcaccaagagatatgacagcaacagcggcggggagcgggagatccagaggaccatgctggagctgctgaaccagctggatggctttgacagcagaggagatgtgaaggtgatcatggccaccaaccgcatcgagaccctggaccctgccctgatccggcccggcagaattgacaggaagattgagttccccctgcctgatgagaagaccaagaagaggatcttccagatccacaccagcaggatgaccctggctgatgatgtgaccctggatgacctgatcatggccaaggatgacctgtctggagctgacatcaaggccatctgcacagaggccggcctgatggccctgcgggagaggaggatgaaggtgaccaatgaagacttcaagaagagcaaagaaaatgtgctgtacaagaagcaggagggcaccccagagggcctgtacctgtag

SEQ ID NO: 132197 - DNA, 1104 bp, Artificial Sequence
  derived and/or modified sequence
atggaggaggagttcatccggaaccaggagcagatgaagcccctggaggagaagcaggaggaggagaggagcaaggtggatgacctgcggggcacccccatgtctgtgggcaccctggaggagatcattgatgacaaccacgccatcgtgtccacctctgtgggcagcgagcactacgtgtccatcctgagctttgtggacaaggacctgctggagcccggctgcagcgtgctgctgaaccacaaggtgcatgctgtgattggagtgctgatggatgacacagaccccctggtgacagtgatgaaggtggagaaggccccccaggagacctacgccgacatcggcggcctggacaaccagatccaggagatcaaggagagcgtggagctgcccctgacccaccctgagtactatgaggagatgggcatcaagccacccaagggcgtcatcctgtatggccccccaggcaccgggaagaccctgctggccaaggctgtggccaaccagaccagcgccaccttcctgcgggtggtgggcagcgagctgatccagaagtacctgggagatggccccaagctggtgcgggagctgttccgggtggccgaggagcacgcccccagcatcgtgttcattgatgaaattgatgccatcggcaccaagagatatgacagcaacagcggcggggagcgggagatccagaggaccatgctggagctgctgaaccagctggatggctttgacagcagaggagatgtgaaggtgatcatggccaccaacagaattgagaccctggaccctgccctgatccggcccggcagaattgacaggaagattgagttccccctgcctgatgagaagaccaagaagaggatcttccagatccacaccagcaggatgaccctggctgatgatgtgaccctggatgacctgatcatggccaaggatgacctgagcggggctgacatcaaggccatctgcacagaagctggcctgatggccctgcgggagaggaggatgaaggtgaccaatgaagacttcaagaagagcaaagaaaatgtgctgtacaagaagcaggagggcaccccagagggcctgtacctgtag

SEQ ID NO: 132198 - DNA, 1323 bp, Artificial Sequence
  derived and/or modified sequence
atgggccagagccagagcggcggccacggccccggcggcggcaagaaagatgataaagataaaaaaaagaagtacgaaccacccgtgcctactcgcgtgggcaagaagaagaagaagacaaagggtcctgacgccgcctcaaaactccctcttgtgaccccgcatactcagtgtagactcaaactgctgaagctggagcgcataaaagattacctgctgatggaagaagagttcattcggaatcaggaacaaatgaagccattggaagagaagcaggaggaggagcggagcaaggtggacgacctcagggggacacccatgtcagtcgggactctggaagaaatcatagatgataatcatgctattgtgtctaccagcgtgggttcagaacattatgtgtcaatcctgtccttcgtagataaagatctgttagagcctgggtgtagcgtccttctgaaccacaaagtccatgccgttatcggcgtgctcatggatgacaccgaccctttagttactgtcatgaaagtggaaaaagccccccaggagacctacgccgatatcggggggctggataatcagatccaggaaataaaagagtccgtggagttgccgctaacacatcccgaatactacgaagaaatgggaattaaacccccaaagggcgtaattctgtatggacctccaggaactggtaagacactccttgccaaagccgtggctaatcagacctctgcaacttttctgcgagtcgtgggtagcgagctcatacagaaatacctaggtgatggaccaaaactagtgagagagctcttccgagtagccgaagagcacgccccctctatcgtcttcatagatgaaatagacgcaattgggaccaagaggtacgattctaactctggcggcgagcgggaaatccagcgaacaatgctcgaactgttaaaccagttagacgggttcgactctcgcggcgatgttaaagttattatggcgacaaacagaatcgagactctggaccctgccttaattagaccaggtagaatcgaccggaaaatcgagtttcctctgcccgacgaaaaaaccaaaaaaaggatctttcagatccacacaagccgtatgactctagctgacgacgtgaccctagatgacctgatcatggcaaaggatgacctctctggcgccgatatcaaggccatttgtaccgaggcagggctcatggctttacgagagaggcgaatgaaggtaacgaacgaagactttaagaagtcaaaagagaatgtgctatataaaaagcaggagggaaccccagaagggttgtacttgtag

SEQ ID NO: 132199 - DNA, 1104 bp, Artificial Sequence
  derived and/or modified sequence
atggaggaggagttcatccggaaccaggagcagatgaagcccctggaagagaagcaagaagaggaaaggtcgaaggtggacgatctgcgcggtacccctatgtcagtgggcacccttgaagagattatcgatgataatcacgcaatagtgtcgacttcagtaggtagcgaacactatgtgtccatcctgtccttcgtcgataaagacttactcgagcccggatgttccgtgctgttaaatcataaggtccatgctgtgatcggagtgttgatggacgacaccgatcctctagtcaccgtgatgaaggtggagaaagctccacaggagacctatgcagacataggtggcttagacaaccagattcaagagatcaaggagagcgttgaacttcccctaacccacccagagtattatgaggagatggggatcaagccaccaaaaggtgttatcttgtacgggcctcctggaaccggtaagacgctgctcgctaaggccgtggccaatcagacctctgctacatttcttcgtgtggtagggagcgagttaattcagaagtacttgggagatgggcctaagctagtccgggagttgtttcgggtggccgaagagcacgcaccgtccatcgtcttcattgacgagattgatgcaataggaacaaaacgctatgattccaatagtggcggcgagcgggagattcaacggacaatgttggaactccttaatcagttggacggcttcgattcaagaggagatgttaaggtgattatggccactaaccgcatcgaaacactggaccctgccctcattcgacccggacgtatcgaccgaaaaattgaatttccgctgccggacgagaagacgaaaaagcgcattttccagatccacacttcacgaatgaccctggcagatgatgttacgctagatgatctgatcatggctaaagatgacctaagtggagcggatatcaaagccatctgtaccgaggcgggactcatggcattaagagagagaaggatgaaggttacaaacgaagattttaaaaaaagcaaagaaaatgtgctatataagaagcaggaaggaactccagagggcctgtacttgtag

SEQ ID NO: 132200 - DNA, 1323 bp, Artificial Sequence
  derived and/or modified sequence
atggggcagagccagtctggtggtcacgggccaggaggcggtaagaaggatgacaaagacaaaaaaaagaagtatgagccccctgtaccaaccagggttggcaaaaaaaagaaaaaaactaaaggacccgatgccgcatccaagctgcctcttgtaaccccgcacacccagtgccgcctgaagctgctcaaactggaacgcattaaagattatcttctgatggaagaagagtttattcgtaaccaggagcaaatgaagcccctggaggagaagcaagaagaagaacgaagcaaagttgacgacttaagggggacgcctatgtcagtgggcaccctcgaggaaatcattgacgacaatcacgcaatagtctcaaccagtgtcggatccgagcactatgtgagcattctgtcctttgttgataaggacctattagagcctgggtgctctgttctgctcaatcataaggtgcacgccgttataggtgtcctcatggatgacaccgatcctctggtgacagtgatgaaggtcgaaaaagccccacaggagacttatgcagatatcggaggacttgacaaccaaatccaggagattaaggagtccgtagagctgcctctgacacatcctgagtactacgaagagatggggatcaaacctccaaagggcgtaatcttgtacggaccgccagggaccggtaaaacgttgctggccaaggctgtagccaaccagacctctgctacatttctcagagttgtgggctctgagctcatccagaaatatctgggggacggtcctaagcttgtcagagaattattcagggtggctgaagagcatgctccaagtatcgtctttatcgacgagatagacgccatcggcactaaaaggtacgactccaattccggaggagaacgagagatccaaaggaccatgttggagctgctgaaccagctcgacggatttgactccaggggggacgtgaaagtgattatggcaactaatcggatcgaaaccctggaccccgctctgatccgccctggtagaatcgataggaagattgaatttcctcttcctgatgagaagacaaaaaagagaatcttccagatccatacgagccggatgacattagccgacgatgtgaccctggatgacctcattatggcaaaagatgatctttccggcgctgacatcaaagccatatgtacagaggcaggcctcatggcgctgagagaacggcgaatgaaggtgaccaatgaggattttaaaaaatccaaggagaacgtgctttataagaaacaggagggaacgcctgaggggctgtacctttag

SEQ ID NO: 132201 - DNA, 1104 bp, Artificial Sequence
  derived and/or modified sequence
atggaggaggaattcatcaggaaccaggagcagatgaagcctctagaggagaagcaggaggaggaaagaagcaaggtcgacgatctccgagggactccaatgagcgtagggaccctggaagagatcatagacgacaaccacgctattgtttccacaagtgtgggaagcgagcactatgtgagcatcttatcctttgtcgataaggatctgttggaacccggttgtagcgtgctattgaaccacaaagtgcatgcggtcatcggtgtgcttatggacgataccgaccctctggtaaccgtgatgaaggtcgagaaggccccacaggaaacgtacgcagatatcgggggactggacaatcagatacaggaaatcaaagagagcgtcgagcttccacttacccatcccgaatattacgaggagatgggcatcaaacctcccaaaggggttatcctctatgggcctcccggaaccgggaagactcttttagctaaggcagtagcaaaccagaccagcgcaacatttttgcgagtggtcggttcggagttgattcagaagtatcttggcgacgggcctaaactggtcagagaactttttcgagtcgctgaggagcatgccccttcaatcgttttcatcgacgagattgatgctatcggaacaaagcgctacgactccaactctgggggagagcgagaaattcagagaactatgctggagttactaaaccagctggatggattcgacagtcgaggggatgtaaaggtcatcatggccacaaaccggatagaaactctggacccggctctcatacgtccaggacgtattgatcgcaagatagaattccccctgccagacgaaaagaccaagaagcgaatcttccagatacataccagccgcatgaccctcgccgatgacgttacattggatgacctgatcatggctaaggatgacttaagtggggcagatataaaagcaatctgcaccgaggcaggcctgatggccctgcgcgagaggcggatgaaagtgaccaatgaagacttcaaaaagagcaaggagaacgttctgtacaaaaagcaggagggcacaccggaaggcctctatctttag

SEQ ID NO: 132202 - DNA, 1641 bp, Artificial Sequence
  derived and/or modified sequence
tggttcctatcagcttccgtagcgtccctaacgacttccgcctctggcgggccgcagtggtggaggaacttccggcagcggcagctcaagtggccaaggcaagatgggtcaaagtcagagtggtggtcatggtcctggaggtggcaagaaggatgacaaggacaagaaaaagaaatatgaacctcctgtaccaactagagtggggaaaaagaagaagaaaacaaagggaccagatgctgccagcaaactgccactggtgacacctcacactcagtgccggttaaaattactgaagttagagagaattaaagactatcttctcatggaggaagaattcattagaaatcaggaacaaatgaaaccattagaagaaaagcaagaggaggaaagatcaaaagtggatgatctgagggggaccccgatgtcagtaggaaccttggaagagatcattgatgacaatcatgccatcgtgtctacatctgtgggctcagaacactacgtcagcattctttcatttgtagacaaggatctgctggaacctggctgctcggtcctgctcaaccacaaggtgcatgccgtgataggggtgctgatggatgacacggatcccctggtcacagtgatgaaggtagaaaaggccccccaggagacctatgcagatattggggggttggacaaccaaattcaggaaattaaggaatctgtggagcttcctctcacccatcctgaatattatgaagagatgggtataaagcctcctaagggggtcattctctatggtccacctggcacaggtaaaaccttgttagccaaagcagtagcaaaccaaacctcagccactttcttgagagtggttggctctgaacttattcagaagtacctaggtgatgggcccaaactcgtacgggaattgttccgagttgctgaagaacatgcaccgtccatcgtgtttattgatgaaattgacgccattgggacaaaaagatatgactccaattctggtggtgagagagaaattcagcgaacaatgttggaactgctgaaccagttggatggatttgattctaggggagatgtgaaagttatcatggccacaaaccgaatagaaactttggatccagcacttatcagaccaggccgcattgacaggaagattgagttccccctgcctgatgaaaagacgaagaagcgcatctttcagattcacacaagcaggatgacgctggctgatgatgtaaccctggacgacctgatcatggctaaagatgacctctctggtgctgacatcaaggcaatctgtacagaagctggtctgatggccttaagagaacgtagaatgaaagtaacaaatgaagacttcaaaaaatctaaagaaaatgttctttataagaaacaggaaggcacccctgaggggctgtatctctaatgaaccatggctgtcatcaggaaaatggttgggagatttctcaatccctgaaagggatgaggttgggggagttgcccagaggaatccctgttcccactgatttttattagcaaaacatcctgtgtcttttggagtacgatgtgtaagtgcccattgggtggcctgttggtcactgtgcagcagtctgcttcccaataaagcgtgctctttcacaa

SEQ ID NO: 132203 - DNA, 1389 bp, Artificial Sequence
  derived and/or modified sequence
gctcaagtggccaaggcaagatgggtcaaagtcagagtggtggtcatggtcctggaggtggcaagaaggatgacaagtgacacctcacactcagtgccggttaaaattactgaagttagagagaattaaagactatcttctcatggaggaagaattcattagaaatcaggaacaaatgaaaccattagaagaaaagcaagaggaggaaagatcaaaagtggatgatctgagggggaccccgatgtcagtaggaaccttggaagagatcattgatgacaatcatgccatcgtgtctacatctgtgggctcagaacactacgtcagcattctttcatttgtagacaaggatctgctggaacctggctgctcggtcctgctcaaccacaaggtgcatgccgtgataggggtgctgatggatgacacggatcccctggtcacagtgatgaaggtagaaaaggccccccaggagacctatgcagatattggggggttggacaaccaaattcaggaaattaaggaatctgtggagcttcctctcacccatcctgaatattatgaagagatgggtataaagcctcctaagggggtcattctctatggtccacctggcacaggtaaaaccttgttagccaaagcagtagcaaaccaaacctcagccactttcttgagagtggttggctctgaacttattcagaagtacctaggtgatgggcccaaactcgtacgggaattgttccgagttgctgaagaacatgcaccgtccatcgtgtttattgatgaaattgacgccattgggacaaaaagatatgactccaattctggtggtgagagagaaattcagcgaacaatgttggaactgctgaaccagttggatggatttgattctaggggagatgtgaaagttatcatggccacaaaccgaatagaaactttggatccagcacttatcagaccaggccgcattgacaggaagattgagttccccctgcctgatgaaaagacgaagaagcgcatctttcagattcacacaagcaggatgacgctggctgatgatgtaaccctggacgacctgatcatggctaaagatgacctctctggtgctgacatcaaggcaatctgtacagaagctggtctgatggccttaagagaacgtagaatgaaagtaacaaatgaagacttcaaaaaatctaaagaaaatgttctttataagaaacaggaaggcacccctgaggggctgtatctctaatgaaccatggctgtcatcaggaaaatggttgggagatttctcaatccctgaaagggatgaggttgggggagttgcccagaggaatccctgttcccactgatttttattagcaaaacatcctgtgtcttttggagtacgatgtg

SEQ ID NO: 132204 - DNA, 1323 bp, Artificial Sequence
  derived and/or modified sequence
atgggccagagccagagcggcggccacggccccggcggcggcaagaaggacgacaaggacaagaagaagaagtacgagccccccgtgcccaccagagtgggcaagaagaagaagaagaccaagggccccgacgccgccagcaagctgcccctggtgaccccccacacccagtgcagactgaagctgctgaagctggagagaatcaaggactacctgctgatggaggaggagttcatcagaaaccaggagcagatgaagcccctggaggagaagcaggaggaggagagaagcaaggtggacgacctgagaggcacccccatgagcgtgggcaccctggaggagatcatcgacgacaaccacgccatcgtgagcaccagcgtgggcagcgagcactacgtgagcatcctgagcttcgtggacaaggacctgctggagcccggctgcagcgtgctgctgaaccacaaggtgcacgccgtgatcggcgtgctgatggacgacaccgaccccctggtgaccgtgatgaaggtggagaaggccccccaggagacctacgccgacatcggcggcctggacaaccagatccaggagatcaaggagagcgtggagctgcccctgacccaccccgagtactacgaggagatgggcatcaagccccccaagggcgtgatcctgtacggcccccccggcaccggcaagaccctgctggccaaggccgtggccaaccagaccagcgccaccttcctgagagtggtgggcagcgagctgatccagaagtacctgggcgacggccccaagctggtgagagagctgttcagagtggccgaggagcacgcccccagcatcgtgttcatcgacgagatcgacgccatcggcaccaagagatacgacagcaacagcggcggcgagagagagatccagagaaccatgctggagctgctgaaccagctggacggcttcgacagcagaggcgacgtgaaggtgatcatggccaccaacagaatcgagaccctggaccccgccctgatcagacccggcagaatcgacagaaagatcgagttccccctgcccgacgagaagaccaagaagagaatcttccagatccacaccagcagaatgaccctggccgacgacgtgaccctggacgacctgatcatggccaaggacgacctgagcggcgccgacatcaaggccatctgcaccgaggccggcctgatggccctgagagagagaagaatgaaggtgaccaacgaggacttcaagaagagcaaggagaacgtgctgtacaagaagcaggagggcacccccgagggcctgtacctgtag

SEQ ID NO: 132205 - DNA, 1104 bp, Artificial Sequence
  derived and/or modified sequence
atggaggaggagttcatcagaaaccaggagcagatgaagcccctggaggagaagcaggaggaggagagaagcaaggtggacgacctgagaggcacccccatgagcgtgggcaccctggaggagatcatcgacgacaaccacgccatcgtgagcaccagcgtgggcagcgagcactacgtgagcatcctgagcttcgtggacaaggacctgctggagcccggctgcagcgtgctgctgaaccacaaggtgcacgccgtgatcggcgtgctgatggacgacaccgaccccctggtgaccgtgatgaaggtggagaaggccccccaggagacctacgccgacatcggcggcctggacaaccagatccaggagatcaaggagagcgtggagctgcccctgacccaccccgagtactacgaggagatgggcatcaagccccccaagggcgtgatcctgtacggcccccccggcaccggcaagaccctgctggccaaggccgtggccaaccagaccagcgccaccttcctgagagtggtgggcagcgagctgatccagaagtacctgggcgacggccccaagctggtgagagagctgttcagagtggccgaggagcacgcccccagcatcgtgttcatcgacgagatcgacgccatcggcaccaagagatacgacagcaacagcggcggcgagagagagatccagagaaccatgctggagctgctgaaccagctggacggcttcgacagcagaggcgacgtgaaggtgatcatggccaccaacagaatcgagaccctggaccccgccctgatcagacccggcagaatcgacagaaagatcgagttccccctgcccgacgagaagaccaagaagagaatcttccagatccacaccagcagaatgaccctggccgacgacgtgaccctggacgacctgatcatggccaaggacgacctgagcggcgccgacatcaaggccatctgcaccgaggccggcctgatggccctgagagagagaagaatgaaggtgaccaacgaggacttcaagaagagcaaggagaacgtgctgtacaagaagcaggagggcacccccgagggcctgtacctgtag

SEQ ID NO: 132206 - protein, 433 aa, Artificial Sequence
  derived and/or modified sequence
MPDYLGADQRKTKEDEKDDKPIRALDEGDIALLKTYGQSTYSRQIKQVEDDIQQLLKKINELTGIKESDTGLAPPALWDLAADKQTLQSEQPLQVARCTKIINADSEDPKYIINVKQFAKFVVDLSDQVAPTDIEEGMRVGVDRNKYQIHIPLPPKIDPTVTMMQVEEKPDVTYSDVGGCKEQIEKLREVVETPLLHPERFVNLGIEPPKGVLLFGPPGTGKTLCARAVANRTDACFIRVIGSELVQKYVGEGARMVRELFEMARTKKACLIFFDEIDAIGGARFDDGAGGDNEVQRTMLELINQLDGFDPRGNIKVLMATNRPDTLDPALMRPGRLDRKIEFSLPDLEGRTHIFKIHARSMSVERDIRFELLARLCPNSTGAEIRSVCTEAGMFAIRARRKIATEKDFLEAVNKVIKSYAKFSATPRYMTYN

SEQ ID NO: 132207 - protein, 130 aa, Artificial Sequence
  derived and/or modified sequence
MPDYLGADQRKTKEDEKDDKPIRALDEGDIALLKTYGQSTYSRQIKQVEDDIQQLLKKINELTGIKESDTGLAPPALWDLAADKQTLQSEQPLQVARCTKIINADSEDPKYIINVKQFAKFVVDLSDQVA

SEQ ID NO: 132208 - protein, 296 aa, Artificial Sequence
  derived and/or modified sequence
MRVGVDRNKYQIHIPLPPKIDPTVTMMQVEEKPDVTYSDVGGCKEQIEKLREVVETPLLHPERFVNLGIEPPKGVLLFGPPGTGKTLCARAVANRTDACFIRVIGSELVQKYVGEGARMVRELFEMARTKKACLIFFDEIDAIGGARFDDGAGGDNEVQRTMLELINQLDGFDPRGNIKVLMATNRPDTLDPALMRPGRLDRKIEFSLPDLEGRTHIFKIHARSMSVERDIRFELLARLCPNSTGAEIRSVCTEAGMFAIRARRKIATEKDFLEAVNKVIKSYAKFSATPRYMTYN

SEQ ID NO: 132209 - DNA, 1545 bp, Artificial Sequence
  derived and/or modified sequence
gaagacaccaccggaagcaaggaaggtgctgtgtaatcattaaggagcggaggcttttggagctgctaaaatgccggattacctcggtgccgatcagcggaagaccaaagaggatgagaaggacgacaagcccatccgagctctggatgagggggatattgccttgttgaaaacttatggtcagagcacttactctaggcagatcaagcaagttgaagatgacattcagcaacttctcaagaaaattaatgagctcactggtattaaagaatctgacactggcctggccccaccagcactctgggatttggctgcagataagcagacactccagagtgaacagcctttacaggttgccaggtgtacaaagataatcaatgctgattcggaggacccaaaatacattatcaacgtaaagcagtttgccaagtttgtggtggaccttagtgatcaggtggcacctactgacattgaagaagggatgagagtgggcgtggatagaaataaatatcaaattcacattccattgcctcctaagattgacccaacagttaccatgatgcaggtggaagagaaacctgatgtcacatacagtgatgttggtggctgtaaggaacagattgagaaactgcgagaagtagttgaaaccccattacttcatccagagaggtttgtgaaccttggcattgagcctcccaagggcgtgctgctctttggtccacccggtacaggcaagacactctgtgcgcgggcagttgctaatcggactgatgcgtgcttcattcgagttattggatctgagcttgtacagaaatacgtcggtgagggggctcgaatggttcgtgaactctttgaaatggccagaacaaaaaaagcctgccttatcttctttgatgaaattgatgctattggaggggctcgttttgatgatggtgctggaggtgacaatgaagtgcagagaacaatgttggaactgatcaatcagcttgatggttttgatcctcgaggcaatattaaagtgctgatggccactaacagacctgatactttggatccagcactgatgaggccagggagattggatagaaaaattgaatttagcttgcccgatctagagggtcggacccacatatttaagattcacgctcgttcaatgagtgttgaaagagatatcagatttgaactgttagcacgactgtgtccaaatagcactggtgctgagattagaagcgtctgcacagaggctggtatgtttgccatcagagcacggcgaaaaattgctaccgagaaggatttcttggaagctgtaaataaggtcattaagtcttatgccaaattcagtgctactcctcgttacatgacatacaactgaaccctgaaggctttcaagtgaaaactttaaattggaatcctaaccttatatagacttgttaataaccaattcataaacaaataaatggcttcaaaattgtatgcttttttccatatctcttcttgtaatataataaaaggtgatttctaatgttaaaaaaaaaaaaaaaaaaa

SEQ ID NO: 132210 - DNA, 1302 bp, Artificial Sequence
  derived and/or modified sequence
atgcctgattacctaggggctgatcaacgaaaaactaaagaggacgagaaggatgataagcctatcagggccctggacgagggggacatcgcacttctgaagacttacggacagagcacttactctcggcagattaaacaggtggaggatgacattcagcagctacttaaaaagattaacgagttgaccggtattaaggaaagtgacactggactcgccccacccgccttgtgggaccttgctgccgacaaacaaactttgcagtctgaacagccgctgcaggtcgctagatgcacaaaaataatcaacgctgactcggaggaccccaaatatatcattaacgtcaagcagttcgctaagtttgtggttgacctctctgatcaggtagctccaactgatatagaggagggaatgcgggtgggcgtggacagaaataagtatcaaattcacataccactcccccctaagatagatccaacagtcacaatgatgcaggtggaagagaaaccggatgtcacctacagtgacgtgggagggtgcaaagagcagatcgagaaactgcgggaggtggtggagacgcccctcctgcaccccgagcggtttgtgaacttgggcatcgagccacctaaaggagtgctgctatttgggccccccggcacgggaaaaaccctatgcgcccgtgcggttgctaaccgcacagacgcctgcttcatcagggtgattggctcagaactggttcagaagtatgtgggggaaggtgcacgtatggtgcgggagctgtttgaaatggcacggaccaaaaaggcctgcttgatttttttcgatgagatagacgccattggcggcgctcgcttcgacgatggcgcaggtggagacaacgaagtccagcggacaatgctggagctcataaaccagctggatggattcgatccaagagggaacattaaggtgctaatggccactaacaggcccgacacactagatcccgcactgatgaggcccgggcgcctggaccgaaagattgaattctccctgcctgatctagaggggaggacgcacatcttcaagatacacgcacgctctatgagtgtggaacgtgacatcaggtttgaactactggcgcgcctgtgtcctaatagtacgggggcagaaattaggtctgtgtgcactgaggctggcatgttcgccattcgcgccagacgcaagatcgcaaccgaaaaggactttctcgaggccgtcaataaggtcatcaaatcttatgctaagtttagcgcgacacctaggtacatgacctataattag

SEQ ID NO: 132211 - DNA, 1302 bp, Artificial Sequence
  derived and/or modified sequence
atgccggactacctgggtgcagatcagcggaaaacgaaagaggacgaaaaggatgacaaaccgattcgcgcactggacgaaggcgacatcgccctgctgaaaacctatggccagtctacctatagtcgtcagattaagcaggtagaggacgacattcagcagttacttaagaaaatcaacgaactcacggggatcaaagagagtgacactggtttggcccctccagcactgtgggatctagccgcggataagcagacattacaaagcgagcagccccttcaggtcgctaggtgtacaaaaataatcaacgctgattccgaggaccccaagtatatcattaatgttaagcaatttgcaaagtttgtggtcgacctcagcgatcaggtggcacccaccgacattgaggagggcatgcgggttggggtggatcgcaataagtaccaaatacacatcccacttccgcctaaaattgaccctaccgtgaccatgatgcaggtcgaggaaaagccagatgtaacctacagcgacgtgggcggttgtaaggagcaaatcgagaaacttagagaagtcgttgaaacccctctgctccatccagaaagatttgtgaacttgggtatcgagccacccaagggagttctcctctttgggccacccggcaccggcaaaacactctgtgctcgagcagttgcaaaccgcacagacgcctgtttcattcgggtgatcggatctgaacttgtgcagaagtatgtgggtgaaggagcccgaatggtgagagagctgtttgagatggccaggacaaaaaaagcctgcctgatttttttcgacgagattgatgccatcggaggcgccaggttcgacgatggagccggaggagataatgaagtgcaaaggacaatgctggagctcatcaatcaactcgatggcttcgacccaagaggtaatataaaggtcctgatggccactaaccggcctgacaccctggatcctgccttgatgagacccggacggctggaccgaaagatagaattttctctcccagacctcgagggtcgaacccacatcttcaaaattcacgctcgctctatgtcagtcgaacgagatattagatttgagctgctggccaggttgtgtcctaacagcacaggcgccgaaatccgatctgtctgcacagaggctggcatgttcgctattcgggctaggagaaagatagcgaccgaaaaggatttcctagaagcagtgaataaagtgattaagtcttacgccaagttctctgctaccccgcgttacatgacttataattag

SEQ ID NO: 132212 - DNA, 891 bp, Artificial Sequence
  derived and/or modified sequence
atgcgggttggcgtggatcgcaacaagtatcagatccacataccccttccacccaagatcgatccaaccgttactatgatgcaggtggaggaaaagcctgacgttacgtattcagacgtcggtgggtgtaaggagcagatcgagaagctgagggaggttgtagagacacccttgctacaccccgaacgttttgtaaacctcggaatcgaaccccctaagggggtgctcctcttcggccccccggggaccggcaagacactgtgcgcgagagccgtggcaaacaggactgatgcctgcttcatccgcgtaatcgggtcggagctcgtacagaaatacgttggtgaaggcgcccgcatggtgagagaattgttcgagatggcaagaactaagaaggcttgtctgatcttttttgacgaaatcgatgctatcggtggtgcccgctttgacgatggggccgggggcgacaatgaagtgcaaagaaccatgctggagctcattaaccaactcgatgggtttgatccgagaggaaacatcaaggtgttgatggctacaaacaggccggatacactagaccccgccctaatgcgtccgggtaggctggatcgaaagatcgagttcagccttcctgacctggaggggaggacacatatcttcaagattcatgcgcgatccatgtcagtcgaacgcgacatacgcttcgagctactggcgcggctgtgtccaaactctacaggggctgagattcgctccgtttgtacggaggccggcatgtttgccattagggcccggagaaaaatagccacagagaaggacttcctagaggcagtaaacaaggtaattaagagttacgctaagttttcggcaacaccccgctatatgacctacaactag

SEQ ID NO: 132213 - DNA, 1302 bp, Artificial Sequence
  derived and/or modified sequence
atgccagactacctgggcgctgaccagaggaagaccaaggaggatgagaaggatgacaagcccatccgggccctggatgaaggagacatcgccctgctgaagacctacggccagagcacctacagccggcagatcaagcaggtggaggatgacatccagcagctgctgaagaagatcaatgagctgaccggcatcaaggagagtgacaccggcctggcccccccagccctgtgggacctggccgctgacaagcagaccctgcagagcgagcagcccctgcaggtggcccgctgcaccaagatcatcaatgctgacagcgaggaccccaagtacatcatcaacgtgaagcagtttgccaagtttgtggtggacctgagtgaccaggtggcccccacagacatcgaggagggcatgagggtgggcgtggacaggaacaagtaccagatccacatccccctgccccccaagattgaccccaccgtgaccatgatgcaggtggaggagaagccagatgtgacctacagtgatgtgggcggctgcaaggagcagatcgagaagctgcgggaggtggtggagacccccctgctgcaccctgagagatttgtgaacctgggcatcgagccccccaagggcgtgctgctgtttggacctcctggcaccgggaagaccctgtgtgcccgggctgtggccaacagaacagatgcctgcttcatccgggtgattggcagcgagctggtgcagaagtatgtgggggagggcgccaggatggtgcgggagctgtttgagatggcccggaccaagaaggcctgcctgatcttctttgatgaaattgatgccatcggcggggccaggtttgatgatggagctggaggagacaatgaggtgcagaggaccatgctggagctgatcaaccagctggatggctttgacccccggggcaacatcaaggtgctgatggccaccaacagaccagacaccctggaccctgccctgatgaggcctggccgcctggacaggaagattgagttcagcctgcctgacctggagggccgcacccacatcttcaagatccacgcccgctccatgtctgtggagcgggacatccgctttgagctgctggcccggctgtgccccaacagcactggagctgagatccgctctgtgtgcacagaggccggcatgtttgccatccgggcccggaggaagatcgccacagagaaggacttcctggaggccgtgaacaaggtgatcaagagctatgccaagttcagcgccaccccccgctacatgacctacaactag

SEQ ID NO: 132214 - DNA, 891 bp, Artificial Sequence
  derived and/or modified sequence
atgagggtgggcgtggacaggaacaagtaccagatccacatccccctgccccccaagattgaccccaccgtgaccatgatgcaggtggaggagaagccagatgtgacctacagtgatgtgggcggctgcaaggagcagatcgagaagctgcgggaggtggtggagacccccctgctgcaccctgagagatttgtgaacctgggcatcgagccccccaagggcgtgctgctgtttggccccccaggcaccgggaagaccctgtgtgcccgggctgtggccaacagaacagatgcctgcttcatccgggtcatcggcagcgagctggtgcagaagtatgtgggggagggcgccaggatggtgcgggagctgtttgagatggcccggaccaagaaggcctgcctgatcttctttgatgaaattgatgccatcggcggggccaggtttgatgatggagctggaggagacaatgaggtgcagaggaccatgctggagctgatcaaccagctggatggctttgacccccggggcaacatcaaggtgctgatggccaccaacagaccagacaccctggaccctgccctgatgaggcctggccgcctggacaggaagattgagttcagcctgcctgacctggagggccgcacccacatcttcaagatccacgcccgctccatgtctgtggagcgggacatccgctttgagctgctggcccggctgtgccccaacagcactggagctgagatccgctctgtgtgcacagaagctggcatgtttgccatccgggcccggaggaagatcgccacagagaaggacttcctggaggccgtgaacaaggtgatcaagagctatgccaagttcagcgccaccccccgctacatgacctacaactag

SEQ ID NO: 132215 - DNA, 1302 bp, Artificial Sequence
  derived and/or modified sequence
atgcccgactacctgggcgccgaccagcggaagaccaaggaggacgaaaaagacgataagcctattagagcactggatgaaggggatattgccctcctgaaaacctatgggcagtctacctattcaaggcagataaaacaagtagaggatgacatacagcagctgctcaaaaagatcaatgagctcactggaatcaaggaaagtgacacgggcttggcacctcccgccctctgggacctggccgcggacaaacaaactctccaatctgagcaaccattgcaagtggccaggtgcaccaagattattaatgcggactcagaggacccgaagtacatcatcaacgtgaaacagtttgccaagtttgtggtggacctgtctgaccaggtggcccctacggacatcgaggaggggatgagagtgggtgtggaccgcaataaatatcaaatccacatacccctgcctccgaagatcgacccaaccgtgacaatgatgcaggtggaggagaaacccgatgtaacatattcagatgtgggtgggtgtaaggaacagatcgaaaagctcagagaagtggtggagacaccccttttacaccccgagcgcttcgtgaacctgggcatcgagccacctaaaggtgtacttctgttcggtccaccaggcaccggaaagacactctgtgctcgggccgtcgcaaacagaactgacgcttgtttcatccgcgtgatcggttccgagttagtccagaaatacgttggcgaaggtgctcggatggtcagggagctgtttgaaatggctcgtaccaaaaaggcgtgcctgatcttctttgacgaaatcgacgcaataggcggcgctcgctttgatgatggagccggcggagataatgaagttcagcggactatgctggaattgattaaccaattagacggattcgatcccagaggaaatatcaaagtgcttatggctacaaaccggcccgacaccctcgaccccgccctgatgcgacccgggagacttgataggaaaattgaattctccttgcctgacctcgagggtagaacccatatctttaagatccacgcacgctcgatgtctgtggagcgtgacattagattcgagctcttagccaggttgtgccccaactccactggcgccgaaatccgctcagtgtgcaccgaggccggaatgtttgctatcagagcccgccggaaaatcgctacggaaaaggacttcctggaggcagtgaataaggtgatcaagagctacgctaagtttagtgccacacccagatatatgacatataactag

SEQ ID NO: 132216 - DNA, 1302 bp, Artificial Sequence
  derived and/or modified sequence
atgcccgactacctgggcgccgaccagcggaagaccaaggaggacgagaaagacgacaagcctattagagccttggatgagggtgatattgctctcctgaaaacatatggccagagtacttacagccgtcagattaagcaagtcgaagatgatatccagcagttgttaaaaaaaatcaatgaactgactggcatcaaagaatcagacacggggttggcaccccctgccctgtgggacctggcagccgataaacaaaccctacagtccgagcagcccctgcaggtggctcggtgtacaaagataataaacgctgacagtgaagatcctaagtatatcatcaacgttaagcagtttgcaaagttcgtggtcgatctatcagatcaggttgccccaacagatatcgaagaaggtatgagggtgggggttgatagaaataagtaccagattcacatcccacttccacctaaaatcgatcccacagtcacaatgatgcaggtcgaggagaagccagatgtcacctactccgacgtcggcgggtgcaaagagcaaatagaaaagttgcgcgaagtggtggagactccactccttcatcccgagagattcgtcaatctgggcatagagcctccaaagggcgtgttgttgtttggccctccgggaaccggaaagaccctgtgcgcccgggcagtggccaatcggactgacgcctgcttcatccgcgtaatcggctccgaattagtccagaaatatgtcggagagggtgccaggatggtgcgagagctatttgaaatggcgcgcactaagaaggcatgcctcattttctttgacgagatcgatgccattgggggcgcccggtttgatgatggagcaggcggcgacaacgaagttcagcggacaatgctcgagcttatcaatcagctcgacgggtttgacccccgtgggaacattaaagtgctcatggccacaaatcgtccagacacacttgatcctgcgctcatgagaccagggagactggacagaaaaattgagtttagcttacccgatctggagggaagaacacatattttcaagatccatgcaaggtccatgagtgtggaacgggacattagattcgaattgctggcccggctgtgcccgaatagcactggagccgaaatcagaagcgtctgtaccgaggcaggcatgttcgcaatacgcgccaggagaaagattgccacagagaaagatttccttgaggccgtcaacaaagtgatcaagtcttacgctaagttttccgctactcccagatacatgacatataactag

SEQ ID NO: 132217 - DNA, 891 bp, Artificial Sequence
  derived and/or modified sequence
atgcgggtgggcgtggaccggaacaagtaccagatccacatcccccttcccccaaagattgatcctactgtcacaatgatgcaggtagaagaaaagccagatgtgacttactccgacgtgggcgggtgtaaagagcaaatagaaaaactgcgggaagttgtggagacccccttactgcaccccgagcgctttgtcaatctgggcatagagccccctaagggcgtactcctcttcggacctccaggaactggtaaaactctgtgtgctagagccgtagctaacagaaccgatgcatgctttatcagggtgatcggcagcgaactcgtgcagaaatacgtgggggagggagccaggatggtgagggaactcttcgagatggccagaacaaagaaagcatgtctgatttttttcgatgagattgatgccatcggtggggcgaggtttgatgacggcgctggaggcgacaatgaggtgcaacggaccatgctggagttgatcaaccaactggatggtttcgatcctagaggaaacatcaaagtgttaatggctaccaacaggcccgatacactcgaccccgccctgatgagaccaggtagacttgaccgcaagatcgaattctccctgccagatctcgaaggcagaacacatatctttaagatccatgcccggagcatgtcagttgaacgcgacatccgcttcgaattgctggcgcgcctttgccccaattctacgggggccgagattaggtctgtgtgtaccgaggcggggatgttcgcaatccgggctaggcgtaaaatcgctacagagaaggactttcttgaggcagtcaataaggttatcaaatcttacgcaaagttttctgcaaccccacgttatatgacatataattag

SEQ ID NO: 132218 - DNA, 1302 bp, Artificial Sequence
  derived and/or modified sequence
atgcctgattaccttggcgcagatcagagaaagactaaggaagacgaaaaagatgacaagcctatccgtgccctcgacgagggggacattgcactgttgaagacctatggccagtctacttactcgcgacagatcaagcaggtggaagacgacattcagcaactgctcaagaaaattaacgagctcaccgggatcaaagaatccgacaccggcctggcgcctcctgccctctgggatttggcggcagacaaacagaccctgcaatcagagcaacccctgcaggtcgctcggtgtacaaagattatcaatgcggacagtgaggaccccaagtacattatcaatgtgaaacagttcgcaaaattcgtggtcgacctgtccgatcaagtagcaccaacagacattgaggagggcatgcgcgtaggtgtggataggaacaagtaccagatccacatcccactgcctcctaaaatcgatcccacagttaccatgatgcaggtagaagagaagccggacgtgacttatagtgacgtgggagggtgcaaagagcagatcgagaaacttagggaggtcgtggaaacccccttgctgcatccagagagatttgtgaacctggggatcgaacctcctaaaggcgttctcctattcggccctcccggaactggaaaaacactctgcgccagggccgtcgcgaatagaacagacgcctgtttcattagagtgattggatcagaacttgttcagaaatacgtgggagaaggcgctagaatggtgcgggaactctttgagatggctagaacgaaaaaagcgtgtctcattttcttcgacgagatcgatgctatcggcggtgctagattcgatgacggtgcagggggagataacgaggtacagcgtaccatgctggaattgatcaaccagttagacggctttgacccacgcggaaacattaaggtattaatggccactaatcggcctgatactcttgacccagccctgatgcgacctggcagactagacagaaagatcgagttttcattgcccgacttagaagggagaacacacatctttaagattcatgcacgctccatgtcagttgaaagagacatacgcttcgaactgctcgcccgtctgtgccctaatagcactggcgcagagatccgttcagtgtgcacggaagccggaatgttcgccattagagctcgcaggaagattgcaactgaaaaagactttctggaagctgtgaacaaagtgatcaaatcctacgctaaattcagtgcaacaccgcgttatatgacgtacaattag

SEQ ID NO: 132219 - DNA, 1302 bp, Artificial Sequence
  derived and/or modified sequence
atgcctgattacttaggagccgatcagcggaagactaaggaagacgagaaagacgacaagccaattcgcgcactcgacgaaggagacatcgcccttctgaaaacatatggtcaatctacttacagccgccagataaaacaggtggaggacgacattcagcagctcctcaaaaagataaatgagctcacaggaatcaaggaatccgacactgggctggctcctcctgccctgtgggaccttgcagccgacaagcaaacccttcaaagtgaacagcctcttcaggtcgcacgctgcactaaaataatcaacgctgattcagaagaccccaagtacatcatcaatgtgaaacagtttgctaaattcgtcgttgatctgtctgaccaggtagcgcctaccgacattgaagaaggaatgcgggtgggggttgatcggaacaagtaccagatccacatccccctcccacccaagatcgatcccacggttactatgatgcaggtggaagaaaaacctgatgtaacgtattccgacgtggggggatgtaaggagcagatcgagaaattgcgagaggtggtcgagacaccgctgctgcatcccgagcggtttgtaaacctcggcatcgaaccccctaagggagtacttctgttcggcccacctggaactggaaaaacattgtgcgctagggcagtggccaacagaacagacgcttgttttatccgcgtgatcggcagcgaactggtgcagaaatacgtcggggagggggctcggatggtaagggaactgtttgagatggcaaggacaaaaaaagcttgtctgatcttttttgacgagatcgacgctatcggcggagcacgctttgacgacggcgcagggggtgacaacgaagtccagagaacaatgttagagctgattaaccaactggatggtttcgatccgcgaggtaacattaaagtattaatggcaacaaatagaccggacactctggaccctgcgctgatgcgaccaggtagactagaccgaaaaatcgaattcagcctacccgacctggaggggcgaacgcatatcttcaagatccacgcacggagtatgtcagttgagagagacattaggttcgagctgctggctcggctgtgtcccaacagtactggcgcagagattaggagtgtctgcacagaggccggtatgtttgcaattcgcgcacgcagaaagattgcaacagaaaaagatttcctcgaggcagtgaacaaagtgataaagtcctacgctaagttcagtgccacccctcggtacatgacctacaattag

SEQ ID NO: 132220 - DNA, 891 bp, Artificial Sequence
  derived and/or modified sequence
atgagggtgggtgttgatagaaataagtaccagattcacattcctttgccacccaaaattgaccctactgtgacaatgatgcaggtggaagaaaagccagatgttacatactcagacgttggagggtgcaaagaacagattgagaaactccgcgaagtcgtggaaacaccgctgctgcacccagaacgatttgttaaccttggtatcgaaccacccaagggagtacttttgttcggtccccctgggactggcaaaacactgtgcgccagagctgtggcgaaccggaccgatgcgtgcttcatcagggtaatcggctcagaactcgtgcaaaagtacgttggagagggcgctcggatggtccgcgaactttttgagatggcgcgaaccaagaaagcttgtctgatcttttttgacgaaatcgacgcgataggcggtgcgcgatttgacgacggggctgggggagacaacgaagtgcaaagaaccatgttggagcttattaatcagctggatggcttcgacccgcgaggtaatatcaaagtgctaatggccactaaccggcctgacaccctggacccagctcttatgcggccaggccgactggatcgaaagatcgaatttagtctccctgacctcgaggggaggacacatatatttaaaattcatgccaggagcatgtcagtcgagagagatattaggttcgagctcctagcaagactttgtccgaattccaccggtgccgaaataaggtcagtgtgcacagaggcaggcatgtttgctattagagcgagaaggaagatcgccacggaaaaagacttccttgaggccgtgaacaaggttatcaagagctacgctaaattcagtgccacacctaggtacatgacatataattag

SEQ ID NO: 132221 - DNA, 1526 bp, Artificial Sequence
  derived and/or modified sequence
gaagacaccaccggaagcaaggaaggtgctgtgtaatcattaaggagcggaggcttttggagctgctaaaatgccggattacctcggtgccgatcagcggaagaccaaagaggatgagaaggacgacaagcccatccgagctctggatgagggggatattgccttgttgaaaacttatggtcagagcacttactctaggcagatcaagcaagttgaagatgacattcagcaacttctcaagaaaattaatgagctcactggtattaaagaatctgacactggcctggccccaccagcactctgggatttggctgcagataagcagacactccagagtgaacagcctttacaggttgccaggtgtacaaagataatcaatgctgattcggaggacccaaaatacattatcaacgtaaagcagtttgccaagtttgtggtggaccttagtgatcaggtggcacctactgacattgaagaagggatgagagtgggcgtggatagaaataaatatcaaattcacattccattgcctcctaagattgacccaacagttaccatgatgcaggtggaagagaaacctgatgtcacatacagtgatgttggtggctgtaaggaacagattgagaaactgcgagaagtagttgaaaccccattacttcatccagagaggtttgtgaaccttggcattgagcctcccaagggcgtgctgctctttggtccacccggtacaggcaagacactctgtgcgcgggcagttgctaatcggactgatgcgtgcttcattcgagttattggatctgagcttgtacagaaatacgtcggtgagggggctcgaatggttcgtgaactctttgaaatggccagaacaaaaaaagcctgccttatcttctttgatgaaattgatgctattggaggggctcgttttgatgatggtgctggaggtgacaatgaagtgcagagaacaatgttggaactgatcaatcagcttgatggttttgatcctagaggcaatattaaagtgctgatggccactaacagacctgatactttggatccagcactgatgaggccagggagattggatagaaaaattgaatttagcttgcccgatctagagggtcggacccacatatttaagattcacgctcgttcaatgagtgttgaaagagatatcagatttgaactgttagcacgactgtgtccaaatagcactggtgctgagattagaagcgtctgcacagaggctggtatgtttgccatcagagcacggcgaaaaattgctaccgagaaggatttcttggaagctgtaaataaggtcattaagtcttatgccaaattcagtgctactcctcgttacatgacatacaactgaaccctgaaggctttcaagtgaaaactttaaattggaatcctaaccttatatagacttgttaataaccaattcataaacaaataaatggcttcaaaattgtatgcttttttccatatctcttcttgtaatataataaaaggtgatttctaatgtt

SEQ ID NO: 132222 - DNA, 3054 bp, Artificial Sequence
  derived and/or modified sequence
agttttcctgtaaaaaggattatattccacgtcccagtgcaatacatagaacataacctttaaaagcagttctttttatattatctttaagttcttactgctttatgtattaatctgaacctaatcagtgattttcccaggagcgctatacttttaagtaaaaaatgaaaatacctgtatgaaccagtatcgacgactagtatatacatttgcggagaattacgtaatcagtccaaaaaccagcgtgccaaagcgtttccccagggctctgtccggactctgaagcactgcataaaggggtctgtctgagcccaatttacttccggtggggaagggaaagggaagacaccaccggaagcaaggaaggtgctgtgtaatcattaaggagcggaggcttttggagctgctaaaatgccggattacctcggtgccgatcagcggaagaccaaagaggatgagaaggacgacaagcccatccgagctctggatgagggggatattgccttgttgaaaacttatggtcagagcacttactctaggcagatcaagcaagttgaagatgacattcagcaacttctcaagaaaattaatgagctcactggtattaaagaatctgacactggcctggccccaccagcactctgggatttggctgcagataagcagacactccagagtgaacagcctttacaggttgccaggtgtacaaagataatcaatgctgattcggaggacccaaaatacattatcaacgtaaagcagtttgccaagtttgtggtggaccttagtgatcaggtggcacctactgacattgaagaagggatgagagtgggcgtggatagaaataaatatcaaattcacattccattgcctcctaagattgacccaacagttaccatgatgcaggtggaagagaaacctgatgtcacatacagtgatgttggtggctgtaaggaacagattgagaaactgcgagaagtagttgaaaccccattacttcatccagagaggtttgtgaaccttggcattgagcctcccaagggcgtgctgctctttggtccacccggtacaggcaagacactctgtgcgcgggcagttgctaatcggactgatgcgtgcttcattcgagttattggatctgagcttgtacagaaatacgtcggtgagggggctcgaatggttcgtgaactctttgaaatggccagaacaaaaaaagcctgccttatcttctttgatgaaattgatgctattggaggggctcgttttgatgatggtgctggaggtgacaatgaagtgcagagaacaatgttggaactgatcaatcagcttgatggttttgatcctagaggcaatattaaagtgctgatggccactaacagacctgatactttggatccagcactgatgaggccagggagattggatagaaaaattgaatttagcttgcccgatctagagggtcggacccacatatttaagattcacgctcgttcaatgagtgttgaaagagatatcagatttgaactgttagcacgactgtgtccaaatagcactggtgctgagattagaagcgtctgcacagaggctggtatgtttgccatcagagcacggcgaaaaattgctaccgagaaggatttcttggaagctgtaaataaggtcattaagtcttatgccaaattcagtgctactcctcgttacatgacatacaactgaaccctgaaggctttcaagtgaaaactttaaattggaatcctaaccttatatagacttgttaataaccaattcataaacaaataaatggcttcaaaattgtatgcttttttccatatctcttcttgtaatataataaaaggtgatttctaatgttattaggcagaaaagcttgttagaatatattttgactatttttttgacccacacccgtttaaggatttcacatcatacaaagcgcttgcttagatggcttctatcctaggcatatgctggccgggtgctctacatataaattctcattgtatcctcccatctgtccactgaggaagattatcaaatggatcttcatccaatggatgcataaactttcctacttacttgtagtggcaaagctggctttcaagtacaagtttgttggctccattacctatgctcctattatccgcttctgtcccgcaacaaagtagctcacttaggcgtatgaccacatgcattatgatagtttcccaccaccatattgaataataaaagctttggccaaagcttttttaaagtaggagaaacattggatgtatatgttttgcattgccatttgatttcaaattaatcaggaagaattagtgattttaatgagcagtaaagtggtgcaataaagcagaaagaaaaatgttcagccagaagtgaaagactagtaaaaaaagaaaaaaaaatatttgtacatatgatctaatttagaaagtccagaattggcttcatacagaaaagtgattactttcattttacaaattactttaaaattttggtaaagtttctgttaggcttctggtctacagtgaggtattttaaaaataaaggttatattagaatcctcaacatctctttaaaattacctcctgtgtaaccaccaccaaatcctatcttctaccacaattaccccttcccccaatgccaagaccaaagcacaataatgaatatttttattgaagttcgatattcataaataagttgcaaaataagagttggatatatttttaattcacaatagaaaaagttgacaacatagaaaatgctgctttgcactgaaatacttaaaattatgaaagttttcaagtaaagaaattaaagccttttataaaatccaaccaacattcttgatttttcatttttatgaacttgatcagaaaaattcatcttttttaaccctgccctaatttttcttgaggaattaaatagagcaaactattttcaggttatgcttacaataaaatatacttaagaaaatgactgaagatgtatgtttttgaatgttttgattaaataaatgtacacatttagaacaca

SEQ ID NO: 132223 - DNA, 1415 bp, Artificial Sequence
  derived and/or modified sequence
gaaggtgctgtgtaatcattaaggagcggaggcttttggagctgctaaaatgccggattacctcggtgccgatcagcggaagaccaaagaggatgagaaggacgacaagcccatccgagctctggatgagggggatattgccttgttgaaaacttatggtcagagcacttactctaggcagatcaagcaagttgaagatgacattcagcaacttctcaagaaaattaatgagctcactggtgtacaaagataatcaatgctgattcggaggacccaaaatacattatcaacgtaaagcagtttgccaagtttgtggtggaccttagtgatcaggtggcacctactgacattgaagaagggatgagagtgggcgtggatagaaataaatatcaaattcacattccattgcctcctaagattgacccaacagttaccatgatgcaggtggaagagaaacctgatgtcacatacagtgatgttggtggctgtaaggaacagattgagaaactgcgagaagtagttgaaaccccattacttcatccagagaggtttgtgaaccttggcattgagcctcccaagggcgtgctgctctttggtccacccggtacaggcaagacactctgtgcgcgggcagttgctaatcggactgatgcgtgcttcattcgagttattggatctgagcttgtacagaaatacgtcggtgagggggctcgaatggttcgtgaactctttgaaatggccagaacaaaaaaagcctgccttatcttctttgatgaaattgatgctattggaggggctcgttttgatgatggtgctggaggtgacaatgaagtgcagagaacaatgttggaactgatcaatcagcttgatggttttgatcctagaggcaatattaaagtgctgatggccactaacagacctgatactttggatccagcactgatgaggccagggagattggatagaaaaattgaatttagcttgcccgatctagagggtcggacccacatatttaagattcacgctcgttcaatgagtgttgaaagagatatcagatttgaactgttagcacgactgtgtccaaatagcactggtgctgagattagaagcgtctgcacagaggctggtatgtttgccatcagagcacggcgaaaaattgctaccgagaaggatttcttggaagctgtaaataaggtcattaagtcttatgccaaattcagtgctactcctcgttacatgacatacaactgaaccctgaaggctttcaagtgaaaactttaaattggaatcctaaccttatatagacttgttaataaccaattcataaacaaataaatggcttcaaaattgtatgcttttttccatatctcttcttgtaatataataaaaggtgatttctaatgttattaggcaga

SEQ ID NO: 132224 - DNA, 1302 bp, Artificial Sequence
  derived and/or modified sequence
atgcccgactacctgggcgccgaccagagaaagaccaaggaggacgagaaggacgacaagcccatcagagccctggacgagggcgacatcgccctgctgaagacctacggccagagcacctacagcagacagatcaagcaggtggaggacgacatccagcagctgctgaagaagatcaacgagctgaccggcatcaaggagagcgacaccggcctggccccccccgccctgtgggacctggccgccgacaagcagaccctgcagagcgagcagcccctgcaggtggccagatgcaccaagatcatcaacgccgacagcgaggaccccaagtacatcatcaacgtgaagcagttcgccaagttcgtggtggacctgagcgaccaggtggcccccaccgacatcgaggagggcatgagagtgggcgtggacagaaacaagtaccagatccacatccccctgccccccaagatcgaccccaccgtgaccatgatgcaggtggaggagaagcccgacgtgacctacagcgacgtgggcggctgcaaggagcagatcgagaagctgagagaggtggtggagacccccctgctgcaccccgagagattcgtgaacctgggcatcgagccccccaagggcgtgctgctgttcggcccccccggcaccggcaagaccctgtgcgccagagccgtggccaacagaaccgacgcctgcttcatcagagtgatcggcagcgagctggtgcagaagtacgtgggcgagggcgccagaatggtgagagagctgttcgagatggccagaaccaagaaggcctgcctgatcttcttcgacgagatcgacgccatcggcggcgccagattcgacgacggcgccggcggcgacaacgaggtgcagagaaccatgctggagctgatcaaccagctggacggcttcgaccccagaggcaacatcaaggtgctgatggccaccaacagacccgacaccctggaccccgccctgatgagacccggcagactggacagaaagatcgagttcagcctgcccgacctggagggcagaacccacatcttcaagatccacgccagaagcatgagcgtggagagagacatcagattcgagctgctggccagactgtgccccaacagcaccggcgccgagatcagaagcgtgtgcaccgaggccggcatgttcgccatcagagccagaagaaagatcgccaccgagaaggacttcctggaggccgtgaacaaggtgatcaagagctacgccaagttcagcgccacccccagatacatgacctacaactag

SEQ ID NO: 132225 - DNA, 891 bp, Artificial Sequence
  derived and/or modified sequence
atgagagtgggcgtggacagaaacaagtaccagatccacatccccctgccccccaagatcgaccccaccgtgaccatgatgcaggtggaggagaagcccgacgtgacctacagcgacgtgggcggctgcaaggagcagatcgagaagctgagagaggtggtggagacccccctgctgcaccccgagagattcgtgaacctgggcatcgagccccccaagggcgtgctgctgttcggcccccccggcaccggcaagaccctgtgcgccagagccgtggccaacagaaccgacgcctgcttcatcagagtgatcggcagcgagctggtgcagaagtacgtgggcgagggcgccagaatggtgagagagctgttcgagatggccagaaccaagaaggcctgcctgatcttcttcgacgagatcgacgccatcggcggcgccagattcgacgacggcgccggcggcgacaacgaggtgcagagaaccatgctggagctgatcaaccagctggacggcttcgaccccagaggcaacatcaaggtgctgatggccaccaacagacccgacaccctggaccccgccctgatgagacccggcagactggacagaaagatcgagttcagcctgcccgacctggagggcagaacccacatcttcaagatccacgccagaagcatgagcgtggagagagacatcagattcgagctgctggccagactgtgccccaacagcaccggcgccgagatcagaagcgtgtgcaccgaggccggcatgttcgccatcagagccagaagaaagatcgccaccgagaaggacttcctggaggccgtgaacaaggtgatcaagagctacgccaagttcagcgccacccccagatacatgacctacaactag

SEQ ID NO: 132226 - protein, 439 aa, Artificial Sequence
  derived and/or modified sequence
MNLLPNIESPVTRQEKMATVWDEAEQDGIGEEVLKMSTEEIIQRTRLLDSEIKIMKSEVLRVTHELQAMKDKIKENSEKIKVNKTLPYLVSNVIELLDVDPNDQEEDGANIDLDSQRKGKCAVIKTSTRQTYFLPVIGLVDAEKLKPGDLVGVNKDSYLILETLPTEYDSRVKAMEVDERPTEQYSDIGGLDKQIQELVEAIVLPMNHKEKFENLGIQPPKGVLMYGPPGTGKTLLARACAAQTKATFLKLAGPQLVQMFIGDGAKLVRDAFALAKEKAPSIIFIDELDAIGTKRFDSEKAGDREVQRTMLELLNQLDGFQPNTQVKVIAATNRVDILDPALLRSGRLDRKIEFPMPNEEARARIMQIHSRKMNVSPDVNYEELARCTDDFNGAQCKAVCVEAGMIALRRGATELTHEDYMEGILEVQAKKKANLQYYA

SEQ ID NO: 132227 - DNA, 1320 bp, Artificial Sequence
  derived and/or modified sequence
atgaatctgcttccaaacatcgagtcgccagtaacccgacaagagaaaatggccaccgtgtgggatgaagccgagcaggatggcataggggaagaggtgctcaaaatgtccacggaggagatcatccaaaggacacgcttgctggactcagagattaagatcatgaagtcagaggtgttgcgggtgactcatgagttgcaagctatgaaggacaaaataaaggagaattctgagaaaattaaggttaataaaaccctgccttacttggtttccaatgttatcgagctcctggacgttgacccgaacgatcaggaagaggatggcgctaatattgatctggattcccagagaaagggcaagtgtgcagttataaagactagtaccaggcaaacctattttttaccggtcatcggcttggtggatgccgagaagctgaaaccaggcgacctcgtcggagtcaataaggactcctatctgatcctggaaactcttcctaccgagtatgatagtcgtgtgaaagctatggaggtggacgagcgccccacagagcagtattcagacatcggcggacttgacaagcaaatccaggaactggtcgaggctatcgtgctgcctatgaaccacaaagagaaattcgagaaccttggtatccagccccctaaaggtgtgcttatgtacggcccgcctggcacaggaaagacccttctggctcgagcctgtgcagctcagaccaaggccacgtttctcaagctcgctggcccccagctcgtgcagatgttcattggggatggtgccaaacttgttagagacgcctttgctctagcaaaagaaaaagcaccttctatcattttcattgatgaacttgacgcaatcggaactaagaggttcgatagtgagaaggcaggcgacagggaagttcagagaaccatgttggagttgctcaaccagttagatggtttccagcccaacactcaagtgaaagtcattgcagccaccaatcgtgtcgacatcctcgatccagcactccttagatctggccgtctcgataggaaaattgaattcccaatgccaaacgaggaggctagagcacgtattatgcagattcactctcggaagatgaacgtgtcaccggatgtcaactacgaggaactcgctcgttgcaccgatgacttcaacggagctcaatgtaaggcagtgtgtgtcgaggccgggatgattgcgcttcgtaggggcgccactgagctcacgcacgaagactatatggagggaatattggaggtgcaagcgaagaaaaaagctaacctgcagtactacgcctag

SEQ ID NO: 132228 - DNA, 1320 bp, Artificial Sequence
  derived and/or modified sequence
atgaacctgctgcccaacatcgagagccctgtgacccggcaggagaagatggccaccgtgtgggatgaggccgagcaggacggcattggagaggaggtgctgaagatgagcacagaggagatcatccagaggacccggctgctggacagcgagatcaagatcatgaagtctgaggtgctgcgggtgacccatgagctgcaggccatgaaggacaagatcaaggaaaattctgagaagatcaaggtgaacaagaccctgccctacctggtgtccaatgtcatcgagctgctggatgtggaccccaatgaccaggaggaggatggagccaacatcgacctggacagccagaggaagggcaaatgtgccgtcatcaagaccagcacccggcagacctacttcctgcctgtgattggcctggtggatgctgagaagctgaagccaggggacctggtgggcgtgaacaaggacagctacctgatcctggagaccctgcccacagaatatgacagccgggtgaaggccatggaggtggatgagcggcccacagagcagtacagcgacatcggcggcctggacaagcagatccaggagctggtggaggccatcgtgctgcccatgaaccacaaggagaagtttgagaacctgggcatccagccccccaagggcgtgctgatgtatggccccccaggcaccgggaagaccctgctggcccgggcctgtgccgcccagaccaaggccaccttcctgaagctggccggcccccagctggtgcagatgtttattggagatggagccaagctggtgagagatgcctttgccctggccaaggagaaggcccccagcatcatcttcattgatgagctggatgccatcggcaccaagagatttgacagcgagaaggccggggaccgggaggtgcagaggaccatgctggagctgctgaaccagctggatggcttccagcccaacacccaggtgaaggtgattgctgccaccaacagagtggacatcctggaccctgccctgctgcggagcggccgcctggacaggaagattgagttccccatgcccaatgaggaggcccgggcccgcatcatgcagatccacagcaggaagatgaatgtgtccccagatgtgaactatgaggagctggcccgctgcacagatgacttcaacggggcccagtgcaaggctgtgtgtgtggaggccggcatgattgccctgcggcggggggccacagagctgacccatgaggactacatggagggcatcctggaggtgcaggccaagaagaaggccaacctgcagtactatgcctag

SEQ ID NO: 132229 - DNA, 1320 bp, Artificial Sequence
  derived and/or modified sequence
atgaacctgctgcccaacatcgagagccccgtgacccggcaggagaagatggcaaccgtttgggacgaggccgagcaggacggaataggggaggaggtgctcaagatgtccaccgaggaaataatccagagaacgcgtttgttggattccgaaatcaagatcatgaaaagcgaggttcttcgtgtgacccatgagttacaggccatgaaagacaagatcaaagagaacagcgaaaaaattaaagttaacaagactctcccctatcttgtttctaacgtcatcgagctgttagatgttgatcccaacgatcaggaggaggatggcgcaaacatcgatctcgatagccagcgtaaaggaaaatgcgcagtgatcaaaacatcaaccagacagacttattttctgcccgtgatcggcctagtagatgccgaaaagctgaaacctggcgatctcgttggcgtaaacaaggacagctacctgatcctggaaacactgcccaccgaatacgattccagggtgaaggccatggaggtcgacgagcgacctaccgaacagtattccgatatcggaggactggataagcagatacaggagctcgtggaggccattgtgctgcccatgaaccacaaagagaaattcgagaacttagggatccagcctcctaagggcgtcctcatgtatggaccccccggaaccggcaaaacattgttggcaagggcctgtgctgcacagactaaggccactttcttaaagctagctggtccccagcttgtccagatgtttattggggatggggccaaactggtgagggacgcattcgccctcgcgaaggaaaaggccccatcgatcattttcattgatgagttggacgctattgggaccaagaggttcgacagtgaaaaagcaggcgacagggaggtgcagcgaactatgctggaactgctgaaccaactcgacggctttcagcctaatacccaggtgaaggtgatagcggccacgaatagggtagatatactggacccagctctccttcggtccgggagactggacagaaaaatcgagttcccgatgccaaacgaggaagcccgcgccaggatcatgcaaattcacagcaggaagatgaacgttagcccagacgtgaactatgaggaactggcacgatgcaccgacgacttcaacggcgcacaatgtaaagctgtgtgtgtagaagctggcatgattgcgctaaggcgaggcgccaccgaactaacacatgaggattacatggaggggatactagaggtgcaggccaagaaaaaggcgaaccttcaatattacgcctag

SEQ ID NO: 132230 - DNA, 1320 bp, Artificial Sequence
  derived and/or modified sequence
atgaacttgctcccgaacatcgagagtcctgtaacacggcaggagaaaatggccacggtttgggatgaggccgagcaggatggcattggggaagaagtattgaagatgagtactgaggaaattatccaacgcaccagattgctggacagcgagatcaagatcatgaagagtgaggtgctccgcgtgacacacgaactgcaggctatgaaagataaaattaaagagaactctgagaagattaaggtgaataagactctcccatatttggtgagcaacgtgatagaactgctggacgtggatcccaatgaccaggaggaagacggcgcaaatatagacctggactcgcagcgaaagggaaagtgcgccgtgattaagactagcaccagacagacctattttctgccagtaatcggcctggtggacgcggaaaaactcaaacctggagacctggttggagtcaataaggattcctacttgatactggaaacattacctacagaatatgactcccgcgtaaaggccatggaggtggatgagcggcctactgaacaatacagcgacataggcggactggacaagcagatccaggaactggtggaggcgattgtgctgccaatgaatcacaaggagaaatttgagaacctgggtatacagccccctaagggagtattgatgtatggtccacccggaacaggcaagaccctccttgcaagagcttgcgctgcccaaaccaaggccacgtttctgaaactggcaggcccacagctggttcagatgtttattggggacggggctaagctggtgagagacgcatttgcactcgccaaagaaaaggctccgagtattatctttattgatgaactggatgcaataggcacaaaacggtttgactccgagaaggccggagacagggaagtccagaggacaatgctggaactgctgaatcagctagacgggtttcagccaaacacccaggtgaaggtaatcgccgctactaaccgggtggatattctggatcccgcacttcttagatcgggtagattagaccggaaaatcgagttccccatgccaaatgaggaggcacgtgccaggattatgcagatccacagtcggaaaatgaacgtctcacctgacgtcaactatgaagagttagctcgttgcaccgatgattttaacggtgctcagtgcaaggcggtatgcgtcgaggcaggcatgattgcccttcgaaggggcgcaacagaactaacacatgaggactatatggaaggaatcctggaggtacaggcaaaaaagaaggccaatctgcagtattacgcgtag

SEQ ID NO: 132231 - DNA, 1544 bp, Artificial Sequence
  derived and/or modified sequence
attcgctgctccgcagcacggccggagctggtcgggtcaagagtcgggatttgtggggagaggttttccactggtcaagagaaggctttaagaaagacggtattaatctcccgttgcggctcccgcctggtcccatcttctgcccgctcctccaggaaatgaatctgctgccgaatattgagagtccagtgactcggcaggagaagatggcgaccgtgtgggatgaggccgagcaagatggaattggggaggaggtgctcaagatgtccacggaggagatcatccagcgcacacggctgctggacagtgagatcaagatcatgaagagtgaagtgttgagagtcacccatgagctccaagccatgaaggacaagataaaagagaacagtgagaaaatcaaagtgaacaagaccctgccgtaccttgtctccaacgtcatcgagctcctggatgttgatcctaatgaccaagaggaggatggtgccaatattgacctggactcccagaggaagggcaagtgtgctgtgatcaaaacctctacacgacagacgtacttccttcctgtgattgggttggtggatgctgaaaagctaaagccaggagacctggtgggtgtgaacaaagactcctatctgatcctggagacgctgcccacagagtatgactcgcgggtgaaggccatggaggtagacgagaggcccacggagcaatacagtgacattgggggtttggacaagcagatccaggagctggtggaggccattgtcttgccaatgaaccacaaggagaagtttgagaacttggggatccaacctccaaaaggggtgctgatgtatgggcccccagggacggggaagaccctcctggcccgggcctgtgccgcacagactaaggccaccttcctaaagctggctggcccccagctggtgcagatgttcattggagatggtgccaagctagtccgggatgcctttgccctggccaaggagaaagcgccctctatcatcttcattgatgagttggatgccatcggcaccaagcgctttgacagtgagaaggctggggaccgggaggtgcagaggacaatgctggagcttctgaaccagctggatggcttccagcccaacacccaagttaaggtaattgcagccacaaacagggtggacatcctggaccccgccctcctccgctcgggccgccttgaccgcaagatagagttcccgatgcccaatgaggaggcccgggccagaatcatgcagatccactcccgaaagatgaatgtcagtcctgacgtgaactacgaggagctggcccgctgcacagatgacttcaatggggcccagtgcaaggctgtgtgtgtggaggcgggcatgatcgcactgcgcaggggtgccacggagctcacccacgaggactacatggaaggcatcctggaggtgcaggccaagaagaaagccaacctacaatactacgcctagggcacacaggccagccccagtctcacggctgaagtgcgcaataaaagatggtttagggtccctgcc

SEQ ID NO: 132232 - DNA, 1320 bp, Artificial Sequence
  derived and/or modified sequence
atgaacctgctgcccaacatcgagagccccgtgaccagacaggagaagatggccaccgtgtgggacgaggccgagcaggacggcatcggcgaggaggtgctgaagatgagcaccgaggagatcatccagagaaccagactgctggacagcgagatcaagatcatgaagagcgaggtgctgagagtgacccacgagctgcaggccatgaaggacaagatcaaggagaacagcgagaagatcaaggtgaacaagaccctgccctacctggtgagcaacgtgatcgagctgctggacgtggaccccaacgaccaggaggaggacggcgccaacatcgacctggacagccagagaaagggcaagtgcgccgtgatcaagaccagcaccagacagacctacttcctgcccgtgatcggcctggtggacgccgagaagctgaagcccggcgacctggtgggcgtgaacaaggacagctacctgatcctggagaccctgcccaccgagtacgacagcagagtgaaggccatggaggtggacgagagacccaccgagcagtacagcgacatcggcggcctggacaagcagatccaggagctggtggaggccatcgtgctgcccatgaaccacaaggagaagttcgagaacctgggcatccagccccccaagggcgtgctgatgtacggcccccccggcaccggcaagaccctgctggccagagcctgcgccgcccagaccaaggccaccttcctgaagctggccggcccccagctggtgcagatgttcatcggcgacggcgccaagctggtgagagacgccttcgccctggccaaggagaaggcccccagcatcatcttcatcgacgagctggacgccatcggcaccaagagattcgacagcgagaaggccggcgacagagaggtgcagagaaccatgctggagctgctgaaccagctggacggcttccagcccaacacccaggtgaaggtgatcgccgccaccaacagagtggacatcctggaccccgccctgctgagaagcggcagactggacagaaagatcgagttccccatgcccaacgaggaggccagagccagaatcatgcagatccacagcagaaagatgaacgtgagccccgacgtgaactacgaggagctggccagatgcaccgacgacttcaacggcgcccagtgcaaggccgtgtgcgtggaggccggcatgatcgccctgagaagaggcgccaccgagctgacccacgaggactacatggagggcatcctggaggtgcaggccaagaagaaggccaacctgcagtactacgcctag

SEQ ID NO: 132233 - protein, 406 aa, Artificial Sequence
  derived and/or modified sequence
MALDGPEQMELEEGKAGSGLRQYYLSKIEELQLIVNDKSQNLRRLQAQRNELNAKVRLLREELQLLQEQGSYVGEVVRAMDKKKVLVKVHPEGKFVVDVDKNIDINDVTPNCRVALRNDSYTLHKILPNKVDPLVSLMMVEKVPDSTYEMIGGLDKQIKEIKEVIELPVKHPELFEALGIAQPKGVLLYGPPGTGKTLLARAVAHHTDCTFIRVSGSELVQKFIGEGARMVRELFVMAREHAPSIIFMDEIDSIGSSRLEGGSGGDSEVQRTMLELLNQLDGFEATKNIKVIMATNRIDILDSALLRPGRIDRKIEFPPPNEEARLDILKIHSRKMNLTRGINLRKIAELMPGASGAEVKGVCTEAGMYALRERRVHVTQEDFEMAVAKVMQKDSEKNMSIKKLWK

SEQ ID NO: 132234 - DNA, 1332 bp, Artificial Sequence
  derived and/or modified sequence
aagacggctcggatgccggcggtctctgctgaagagagaagatggcgcttgacggaccagagcagatggagctggaggaggggaaggcaggcagcggactccgccaatattatctgtccaagattgaagaactccagctgattgtgaatgataagagccaaaacctccggaggctgcaggcacagaggaacgaactaaatgctaaagttcgcctattgcgggaggagctacagctgctgcaggagcagggctcctatgtgggggaagtagtccgggccatggataagaagaaagtgttggtcaaggtacatcctgaaggtaaatttgttgtagacgtggacaaaaacattgacatcaatgatgtgacacccaattgccgggtggctctaaggaatgacagctacactctgcacaagatcctgcccaacaaggtagacccattagtgtcactgatgatggtggagaaagtaccagattcaacttatgagatgattggtggactggacaaacagatcaaggagatcaaagaagtgatcgagctgcctgttaagcatcctgagctcttcgaagcactgggcattgctcagcccaagggagtgctgctgtatggacctccaggcactgggaagacactgttggcccgggctgtggctcatcatacggactgtacctttattcgtgtctctggctctgaactggtacagaaattcataggggaaggggcaagaatggtgagggagctgtttgtcatggcacgggaacatgctccatctatcatcttcatggacgaaatcgactccatcggctcctcgcggctggaggggggttctggaggggacagtgaagtgcagcgcacgatgctggagttgctcaaccagctcgacggctttgaggccaccaagaacatcaaggttatcatggctactaataggattgatatcctggactcggcactgcttcgcccagggcgcattgacagaaaaattgaattcccaccccccaatgaggaggcccggctggacattttgaagattcattctcggaagatgaacctgacccgggggatcaacctgagaaaaattgctgagctcatgccaggagcatcaggggctgaagtgaagggcgtgtgcacagaagctggcatgtatgccctgcgagaacggcgagtccatgtcactcaggaggactttgagatggcagtagccaaggtcatgcagaaggacagtgagaaaaacatgtccatcaagaaattatggaagtgagtggacagcctttgtgtgtatctctccaataaagctctgtgggccaagtcctctaggaaaaaaaaaaaaa

SEQ ID NO: 132235 - DNA, 1221 bp, Artificial Sequence
  derived and/or modified sequence
atggccctcgacgggccagagcaaatggagcttgaagagggcaaggcaggctcaggcctgagacagtactacctctctaagatagaggagctccaactgatcgtgaacgataagtcccagaacctgcgaaggctccaggctcaaaggaatgagctgaacgccaaggtgaggctgctgagggaagaactgcagctgctgcaggaacaaggctcttacgtgggagaagttgtgagagccatggacaaaaaaaaggtgctcgtgaaagtgcaccccgaaggcaagtttgttgtggacgtggacaaaaatattgatattaacgatgtgacccctaattgtagggtcgctctgaggaacgactcctataccctgcacaagatcctgcctaataaagttgatccactggtctcactgatgatggttgagaaggtgcccgattctacttatgaaatgattgggggcttggataaacagatcaaggagatcaaggaggtaatcgagctacctgtgaagcaccccgaactgttcgaggctctgggcattgcgcagccaaagggggtcttactgtacggcccaccaggcactggtaaaactctgctggctcgcgccgtggctcaccacacggactgcacgttcataagggtatccggatccgagcttgtgcagaagttcatcggggagggtgcgcgaatggtgcgagagctattcgtgatggccagggagcatgccccaagcataatcttcatggatgagattgactcaattggaagcagtcgtctggaggggggctctggaggagactccgaagtgcaacgcacgatgttggagttacttaaccagctggacggcttcgaagctaccaaaaatataaaagttattatggccaccaataggatcgacatactcgattcagcacttctaaggcctggaagaattgacaggaagattgagttcccacctcctaatgaggaagcaagactggacatcctgaaaatccattctcggaaaatgaacttgacgcgggggataaacttgcgcaagatagcagagctgatgcccggcgccagtggtgctgaagtcaagggagtttgcactgaggccgggatgtatgccttgcgagagaggagggtccacgttacccaggaggactttgaaatggccgtcgctaaagtgatgcagaaagacagtgagaaaaacatgagcatcaaaaaattgtggaaatag

SEQ ID NO: 132236 - DNA, 1221 bp, Artificial Sequence
  derived and/or modified sequence
atggccctggatggccctgagcagatggagctggaggagggcaaggccggcagcggcctgcggcagtactacctgagcaagattgaggagctgcagctgattgtgaatgacaagagccagaacctgcggcggctgcaggcccagagaaatgagctgaatgccaaggtgcggctgctgcgggaggagctgcagctgctgcaggagcagggcagctatgtgggggaggtggtgcgggccatggacaagaagaaggtgctggtgaaggtgcaccctgagggcaagtttgtggtggatgtggacaagaacatcgacatcaatgatgtgacccccaactgccgggtggccctgagaaatgacagctacaccctgcacaagatcctgcccaacaaggtggaccccctggtgtccctgatgatggtggagaaggtgcctgacagcacctatgagatgattggaggcctggacaagcagatcaaggagatcaaggaggtgattgagctgcctgtgaagcaccctgagctgtttgaggccctgggcatcgcccagcccaagggcgtgctgctgtatggccccccaggcaccgggaagaccctgctggcccgggctgtggcccaccacacagactgcaccttcatccgggtgtctggcagcgagctggtgcagaagttcatcggggagggcgccaggatggtgcgggagctgtttgtgatggcccgggagcacgcccccagcatcatcttcatggatgaaattgacagcatcggcagcagccggctggagggcggcagcggcggggacagcgaggtgcagaggaccatgctggagctgctgaaccagctggatggctttgaggccaccaagaacatcaaggtgatcatggccaccaacagaattgacatcctggacagcgccctgctgcggcccggcagaattgacaggaagattgagttccccccaccaaatgaggaggcccggctggacatcctgaagatccacagcaggaagatgaacctgacccggggcatcaacctgaggaagattgctgagctgatgcctggggccagcggggctgaggtgaagggcgtgtgcacagaggccggcatgtatgccctgcgggagcggcgggtgcacgtgacccaggaggactttgagatggctgtggccaaggtgatgcagaaggacagcgagaagaacatgagcatcaagaagctgtggaagtag

SEQ ID NO: 132237 - DNA, 1221 bp, Artificial Sequence
  derived and/or modified sequence
atggccctggacggccccgagcagatggagctggaggagggcaaggctggctccggcctcagacagtactacctgtcaaaaatcgaagaactgcaactgatcgtcaacgacaaaagtcagaatctaagacggctgcaagcccagagaaacgagttaaatgctaaggtaagactgttgagagaggaactgcagctgctccaggagcagggaagttatgtaggggaagtggtacgcgcgatggataaaaaaaaggtgctcgttaaagtgcaccctgaagggaagtttgtggttgacgtagataaaaatatcgacatcaacgacgtgacgcccaattgtcgtgtggcattgcggaatgactcctacacactgcacaaaatactccctaacaaagtcgacccccttgtctcccttatgatggtcgagaaggtccccgacagtacctatgagatgatagggggcctggataaacagatcaaagaaattaaggaggtgatcgagcttcccgtcaaacaccccgaactatttgaagctttgggtatagcacagccgaagggtgtactcctttatgggcccccaggcactggaaaaaccctcttggcccgtgccgtcgcccaccatacagactgcacgtttattcgcgtgtcgggatctgaactagttcagaaatttatcggtgaaggggctcggatggtcagggaactcttcgtgatggctcgagaacatgccccttccatcatatttatggatgagattgattccatcggctccagtcggctggaggggggctctggaggagattctgaagtccaacgcaccatgcttgagttactcaatcaactcgatggatttgaggcaaccaaaaatattaaggtgatcatggcaaccaacaggatcgacattctggattcagctctgcttcggcccgggaggatcgatagaaagattgaattcccacctcccaacgaggaggcacgcctggatattctgaagatacactctaggaagatgaatctcacacggggcatcaacctgcggaagatcgctgagttgatgccaggtgcatccggagcagaagttaaaggcgtgtgtaccgaggccgggatgtacgctttgcgggaacggcgggtacatgtcacccaggaagatttcgaaatggctgtggctaaagtcatgcagaaggatagcgagaaaaacatgtccataaagaaactttggaagtag

SEQ ID NO: 132238 - DNA, 1221 bp, Artificial Sequence
  derived and/or modified sequence
atggccttggacgggcctgagcagatggagttggaggaggggaaggcagggtcaggtctccgccagtattatctctccaagattgaggaactccagttaatcgtgaatgataagtcccagaacttgagacgattacaggcacagcggaacgagctgaatgcaaaagtcaggttgttacgggaggaattgcagctgttgcaggagcaggggagttatgtgggggaagtggtgagggccatggataagaagaaggtgctcgtgaaagtgcatccggaaggtaaattcgtggtagacgtggacaaaaacatcgacattaacgacgtaactcctaattgccgagtggccctcaggaacgattcttacactctccataagatactgcccaacaaggttgatccactggtgagcttgatgatggtagaaaaagttccagattcgacgtacgagatgattgggggtcttgacaaacaaataaaggagatcaaggaggttattgaactgccagtgaaacacccagaacttttcgaagccctgggaatcgcacagcctaagggcgtgctcctctatgggccacccggtaccggaaagacgctcctggcgagagccgtagcccaccacacagattgcacctttatccgcgttagcggcagcgaactggtgcaaaagttcataggtgagggagcgcgaatggtccgggaattgtttgtaatggccagggagcacgctcctagcattatcttcatggacgagattgactctataggctcttcaaggctagaagggggtagcggtggcgattcagaagtgcagaggactatgcttgagctgctgaatcagctggacggatttgaggccaccaagaatataaaggtaatcatggccaccaatcgcattgacatccttgattctgccctgcttcgcccagggcgtattgatcgcaaaattgagtttccccctcccaatgaggaggcacggctggatatcctcaagattcacagtcgtaagatgaatctgacacgcggtattaacctgcgtaagattgcagagctgatgccaggtgcgtctggagccgaagtcaaaggtgtatgtaccgaggcagggatgtatgcactgcgggaacgccgtgttcatgtgactcaggaggactttgagatggccgtcgcaaaggtgatgcagaaggactctgagaaaaatatgtccatcaagaagctatggaaatag

SEQ ID NO: 132239 - DNA, 1552 bp, Artificial Sequence
  derived and/or modified sequence
ggatgccggcggtctctgctgaagagagaagatggcgcttgacggaccagagcagcgccgccctcggtgagtcagggcaaggctgggagaggaagacgcggtagaagcggagtgagtgagggaagcgatgggcgcgggaatggccggcccacgggtcgcaggagacgggacgccagtcctttggctccgttccgctggctccttcgtcagtactgacacctcgggcttgtagagcacttcacgcagtgcaaagcgccccccgtctatatcatatcgcctctcggtcctcctaaaagtcgtatgagatggagctggaggaggggaaggcaggcagcggactccgccaatattatctgtccaagattgaagaactccagctgattgtgaatgataagagccaaaacctccggaggctgcaggcacagaggaacgaactaaatgctaaagttcgcctattgcgggaggagctacagctgctgcaggagcagggctcctatgtgggggaagtagtccgggccatggataagaagaaagtgttggtcaaggtacatcctgaaggtaaatttgttgtagacgtggacaaaaacattgacatcaatgatgtgacacccaattgccgggtggctctaaggaatgacagctacactctgcacaagatcctgcccaacaaggtagacccattagtgtcactgatgatggtggagaaagtaccagattcaacttatgagatgattggtggactggacaaacagatcaaggagatcaaagaagtgatcgagctgcctgttaagcatcctgagctcttcgaagcactgggcattgctcagcccaagggagtgctgctgtatggacctccaggcactgggaagacactgttggcccgggctgtggctcatcatacggactgtacctttattcgtgtctctggctctgaactggtacagaaattcataggggaaggggcaagaatggtgagggagctgtttgtcatggcacgggaacatgctccatctatcatcttcatggacgaaatcgactccatcggctcctcgcggctggaggggggttctggaggggacagtgaagtgcagcgcacgatgctggagttgctcaaccagctcgacggctttgaggccaccaagaacatcaaggttatcatggctactaataggattgatatcctggactcggcactgcttcgcccagggcgcattgacagaaaaattgaattcccaccccccaatgaggaggcccggctggacattttgaagattcattctcggaagatgaacctgacccgggggatcaacctgagaaaaattgctgagctcatgccaggagcatcaggggctgaagtgaagggcgtgtgcacagaagctggcatgtatgccctgcgagaacggcgagtccatgtcactcaggaggactttgagatggcagtagccaaggtcatgcagaaggacagtgagaaaaacatgtccatcaagaaattatggaagtgagtggacagcctttgtgtgtatctctccaataaagctctgtgggccaagtc

SEQ ID NO: 132240 - DNA, 1319 bp, Artificial Sequence
  derived and/or modified sequence
aagacggctcggatgccggcggtctctgctgaagagagaagatggcgcttgacggaccagagcagatggagctggaggaggggaaggcaggcagcggactccgccaatattatctgtccaagattgaagaactccagctgattgtgaatgataagagccaaaacctccggaggctgcaggcacagaggaacgaactaaatgctaaagttcgcctattgcgggaggagctacagctgctgcaggagcagggctcctatgtgggggaagtagtccgggccatggataagaagaaagtgttggtcaaggtacatcctgaaggtaaatttgttgtagacgtggacaaaaacattgacatcaatgatgtgacacccaattgccgggtggctctaaggaatgacagctacactctgcacaagatcctgcccaacaaggtagacccattagtgtcactgatgatggtggagaaagtaccagattcaacttatgagatgattggtggactggacaaacagatcaaggagatcaaagaagtgatcgagctgcctgttaagcatcctgagctcttcgaagcactgggcattgctcagcccaagggagtgctgctgtatggacctccaggcactgggaagacactgttggcccgggctgtggctcatcatacggactgtacctttattcgtgtctctggctctgaactggtacagaaattcataggggaaggggcaagaatggtgagggagctgtttgtcatggcacgggaacatgctccatctatcatcttcatggacgaaatcgactccatcggctcctcgcggctggaggggggttctggaggggacagtgaagtgcagcgcacgatgctggagttgctcaaccagctcgacggctttgaggccaccaagaacatcaaggttatcatggctactaataggattgatatcctggactcggcactgcttcgcccagggcgcattgacagaaaaattgaattcccaccccccaatgaggaggcccggctggacattttgaagattcattctcggaagatgaacctgacccgggggatcaacctgagaaaaattgctgagctcatgccaggagcatcaggggctgaagtgaagggcgtgtgcacagaagctggcatgtatgccctgcgagaacggcgagtccatgtcactcaggaggactttgagatggcagtagccaaggtcatgcagaaggacagtgagaaaaacatgtccatcaagaaattatggaagtgagtggacagcctttgtgtgtatctctccaataaagctctgtgggccaagtcctctagg

SEQ ID NO: 132241 - DNA, 1449 bp, Artificial Sequence
  derived and/or modified sequence
agaagcggagtgagtgagggaagcgatgggcgcgggaatggccggcccacgggtcgcaggagacgggacgccagtcctttggctccgttccgctggctccttcgtcagtactgacacctcgggcttgtagagcacttcacgcagtgcaaagcgccccccgtctatatcatatcgcctctcggtcctcctaaaagtcgtatgagatggagctggaggaggggaaggcaggcagcggactccgccaatattatctgtccaagattgaagaactccagctgattgtgaatgataagagccaaaacctccggaggctgcaggcacagaggaacgaactaaatgctaaagttcgcctattgcgggaggagctacagctgctgcaggagcagggctcctatgtgggggaagtagtccgggccatggataagaagaaagtgttggtcaaggtacatcctgaaggtaaatttgttgtagacgtggacaaaaacattgacatcaatgatgtgacacccaattgccgggtggctctaaggaatgacagctacactctgcacaagatcctgcccaacaaggtagacccattagtgtcactgatgatggtggagaaagtaccagattcaacttatgagatgattggtggactggacaaacagatcaaggagatcaaagaagtgatcgagctgcctgttaagcatcctgagctcttcgaagcactgggcattgctcagcccaagggagtgctgctgtatggacctccaggcactgggaagacactgttggcccgggctgtggctcatcatacggactgtacctttattcgtgtctctggctctgaactggtacagaaattcataggggaaggggcaagaatggtgagggagctgtttgtcatggcacgggaacatgctccatctatcatcttcatggacgaaatcgactccatcggctcctcgcggctggaggggggttctggaggggacagtgaagtgcagcgcacgatgctggagttgctcaaccagctcgacggctttgaggccaccaagaacatcaaggttatcatggctactaataggattgatatcctggactcggcactgcttcgcccagggcgcattgacagaaaaattgaattcccaccccccaatgaggaggcccggctggacattttgaagattcattctcggaagatgaacctgacccgggggatcaacctgagaaaaattgctgagctcatgccaggagcatcaggggctgaagtgaagggcgtgtgcacagaagctggcatgtatgccctgcgagaacggcgagtccatgtcactcaggaggactttgagatggcagtagccaaggtcatgcagaaggacagtgagaaaaacatgtccatcaagaaattatggaagtgagtggacagcctttgtgtgtatctctccaataaagctctgtgggccaagt

SEQ ID NO: 132242 - DNA, 1221 bp, Artificial Sequence
  derived and/or modified sequence
atggccctggacggccccgagcagatggagctggaggagggcaaggccggcagcggcctgagacagtactacctgagcaagatcgaggagctgcagctgatcgtgaacgacaagagccagaacctgagaagactgcaggcccagagaaacgagctgaacgccaaggtgagactgctgagagaggagctgcagctgctgcaggagcagggcagctacgtgggcgaggtggtgagagccatggacaagaagaaggtgctggtgaaggtgcaccccgagggcaagttcgtggtggacgtggacaagaacatcgacatcaacgacgtgacccccaactgcagagtggccctgagaaacgacagctacaccctgcacaagatcctgcccaacaaggtggaccccctggtgagcctgatgatggtggagaaggtgcccgacagcacctacgagatgatcggcggcctggacaagcagatcaaggagatcaaggaggtgatcgagctgcccgtgaagcaccccgagctgttcgaggccctgggcatcgcccagcccaagggcgtgctgctgtacggcccccccggcaccggcaagaccctgctggccagagccgtggcccaccacaccgactgcaccttcatcagagtgagcggcagcgagctggtgcagaagttcatcggcgagggcgccagaatggtgagagagctgttcgtgatggccagagagcacgcccccagcatcatcttcatggacgagatcgacagcatcggcagcagcagactggagggcggcagcggcggcgacagcgaggtgcagagaaccatgctggagctgctgaaccagctggacggcttcgaggccaccaagaacatcaaggtgatcatggccaccaacagaatcgacatcctggacagcgccctgctgagacccggcagaatcgacagaaagatcgagttccccccccccaacgaggaggccagactggacatcctgaagatccacagcagaaagatgaacctgaccagaggcatcaacctgagaaagatcgccgagctgatgcccggcgccagcggcgccgaggtgaagggcgtgtgcaccgaggccggcatgtacgccctgagagagagaagagtgcacgtgacccaggaggacttcgagatggccgtggccaaggtgatgcagaaggacagcgagaagaacatgagcatcaagaagctgtggaagtag

SEQ ID NO: 132243 - protein, 403 aa, Artificial Sequence
  derived and/or modified sequence
MAIPGIPYERRLLIMADPRDKALQDYRKKLLEHKEIDGRLKELREQLKELTKQYEKSENDLKALQSVGQIVGEVLKQLTEEKFIVKATNGPRYVVGCRRQLDKSKLKPGTRVALDMTTLTIMRYLPREVDPLVYNMSHEDPGNVSYSEIGGLSEQIRELREVIELPLTNPELFQRVGIIPPKGCLLYGPPGTGKTLLARAVASQLDCNFLKVVSSSIVDKYIGESARLIREMFNYARDHQPCIIFMDEIDAIGGRRFSEGTSADREIQRTLMELLNQMDGFDTLHRVKMIMATNRPDTLDPALLRPGRLDRKIHIDLPNEQARLDILKIHAGPITKHGEIDYEAIVKLSDGFNGADLRNVCTEAGMFAIRADHDFVVQEDFMKAVRKVADSKKLESKLDYKPV

SEQ ID NO: 132244 - DNA, 1212 bp, Artificial Sequence
  derived and/or modified sequence
atggcaattcctggaattccttatgagcgaaggttattgataatggccgacccaagggataaagcattacaggactatagaaaaaaactactggagcacaaggagattgatggcagattaaaggagctaagggaacaattaaaagagctaaccaaacagtacgagaagagtgaaaatgatctgaaagccttacaatcagtgggacaaatagtgggcgaagtactgaaacagctgacagaggagaagtttatcgtgaaagccaccaacggccctcgttatgtggtaggatgtagaagacagctggataagtctaagctgaagcctggaaccagggtcgccctcgacatgaccacactgacaattatgaggtacttgccccgcgaggtggacccccttgtgtacaacatgagtcacgaagaccctggtaacgtctcctactccgagattggagggctgtcagaacagattcgggagctcagagaggtcattgagctgccactgactaaccctgaactgtttcaacgcgtggggattatccctccaaaaggctgtctgctctatggcccgcctgggaccggaaaaacattacttgcaagagcagttgcgtctcagttagactgcaactttctgaaagttgtttcctccagcattgtagataagtatattggggagtctgcaagactgattcgcgagatgttcaactatgctagggatcatcaaccttgcatcatttttatggatgagattgatgccatcggtggacgaaggttctcagaaggtacctcagcagatagggaaatacaaagaacactcatggaactgctgaaccagatggacggctttgatactcttcacagggtgaagatgattatggccacgaaccgtcccgacactctggatcctgccctactaagacccggccgactggacagaaagatccatattgacctgccaaatgagcaggcgcgactcgacattcttaagattcatgctggccctatcaccaagcatggggaaatcgactacgaagctatagtcaaactgtccgatggcttcaacggtgctgatctccggaacgtctgtacggaggctgggatgttcgcaatccgggcggatcacgacttcgtggttcaagaagatttcatgaaagcagtccgaaaggtcgccgactccaagaaactggagtccaagctcgattacaaacctgtgtag

SEQ ID NO: 132245 - DNA, 1212 bp, Artificial Sequence
  derived and/or modified sequence
atggccatccctggcatcccctatgaaagaaggctgctgatcatggctgacccccgggacaaggccctgcaggactacaggaagaagctgctggagcacaaggagattgatggccgcctgaaggagctgcgggagcagctgaaggagctgaccaagcagtatgagaagtcagaaaatgacctgaaggccctgcagagcgtgggccagatcgtgggggaggtgctgaagcagctgacagaggagaagttcatcgtgaaggccaccaacggccccaggtatgtggtgggctgccggcggcagctggacaagagcaagctgaagccaggcaccagggtggccctggacatgaccaccctgaccatcatgagatacctgccccgggaggtggaccccctggtgtacaacatgagccatgaagatcctggaaatgtgtcctacagcgagattggaggcctgtctgagcagatccgggagctgcgggaggtgattgagctgcccctgaccaaccctgagctgttccagagggtgggcatcatcccccccaagggctgcctgctgtatggccccccaggcaccgggaagaccctgctggcccgggctgtggccagccagctggactgcaacttcctgaaggtggtgagcagcagcatcgtggacaagtacatcggggagagcgcccggctcatccgggagatgttcaactatgcccgggaccaccagccctgcatcatcttcatggatgaaattgatgccatcggcggccgccgcttcagcgagggcaccagcgctgaccgggagatccagaggaccctgatggagctgctgaaccagatggatggctttgacaccctgcaccgggtgaagatgatcatggccaccaacagaccagacaccctggaccctgccctgctgcggcccggccgcctggacaggaagatccacatcgacctgcccaatgagcaggcccggctggacatcctgaagatccatgctggccccatcaccaagcatggagaaattgattatgaggccatcgtgaagctgagtgatggcttcaatggagctgacctgagaaatgtgtgcacagaggccggcatgtttgccatccgggctgaccatgactttgtggtgcaggaggacttcatgaaggctgtgaggaaggtggccgacagcaagaagctggagagcaagctggactacaagcctgtgtag

SEQ ID NO: 132246 - DNA, 1212 bp, Artificial Sequence
  derived and/or modified sequence
atggccatccccggcatcccctacgagcggcggctgctgatcatggctgatccaagggataaagctttgcaggactatcgtaaaaaactacttgagcataaggaaatagacgggaggctcaaggaactacgcgagcagttaaaagagctgaccaaacagtatgaaaagagtgagaatgatctgaaggccttacaatctgtgggccagattgttggggaagtcctgaaacagctgaccgaagagaaatttatcgttaaggcgacgaacggtcctcggtacgtagttgggtgcagacgacagctggataaaagcaagctgaagcccgggactcgcgtcgcgctcgacatgacgacccttacaattatgaggtacttgcctcgggaagtcgaccctcttgtgtacaacatgtcccatgaagatccggggaacgttagctatagtgaaattggcggcctgtccgagcaaatcagggaactgcgggaagtaattgagctgcctctgacgaacccagaactgtttcaacgggtgggcataatccctccaaaaggctgcctgctttacggtcctcccggaacaggcaaaactcttttagcgagggcagttgcctctcagttagactgcaactttctgaaggtggtcagctcttcgatcgtcgataaatacatcggcgaaagcgccaggctcattcgcgaaatgtttaattatgcccgtgatcaccagccttgtatcatttttatggacgaaatagatgcgatcggtggccgccgcttttctgaaggcacttctgccgaccgagaaatccagaggactctcatggagctcctgaaccagatggacggattcgataccctgcacagggttaagatgatcatggccacaaatagacctgataccctagaccctgctctgttaagaccgggcaggttagacagaaaaatccacattgatttaccgaacgagcaggccaggcttgacattttgaaaatacacgccgggcccatcaccaagcacggcgagatcgactacgaggccattgtgaaactgtcagacggattcaacggtgcggatttgcggaatgtgtgtacagaagccggcatgttcgcaattcgggctgatcacgattttgtggtccaggaggatttcatgaaagcagtcaggaaggttgctgattctaagaagctcgagagcaagctggattacaaaccagtgtag

SEQ ID NO: 132247 - DNA, 1212 bp, Artificial Sequence
  derived and/or modified sequence
atggccataccaggaatcccctacgagcggagactgctcattatggccgatccccgtgataaagcactccaggactaccggaaaaaattacttgagcacaaagagatcgacggccgactgaaagaactccgggagcagctcaaagagctaaccaaacagtatgaaaagagtgagaatgacctgaaggccctccagtctgtggggcagatcgtgggagaggttctgaagcaactcaccgaggaaaagttcatcgttaaggctaccaacggccctaggtatgtagtgggctgtcggagacagttggacaagagtaagttgaaaccagggacaagagtggcactggacatgaccactctcactataatgagatatctcccaagagaggtcgaccccctggtatataatatgagccacgaagaccctgggaatgtgtcctatagtgagatcggtggtctttctgaacagattcgtgagctcagggaggtgattgaacttccactgaccaatcctgagctattccagcgggtgggcattatcccgcctaagggttgcttgctttatggaccaccaggtacaggcaagaccctgcttgcacgtgccgtagcatcacaactggattgtaacttcctcaaagtggtatccagttccattgtagacaagtatattggagagagcgcacggctgattcgggagatgttcaattatgctcgagatcatcagccctgtatcatcttcatggacgaaattgatgctattggcggacggagattttcggaaggaactagcgcagatagagaaattcagagaactctgatggaacttctcaatcaaatggacggcttcgatactctacatcgcgtgaaaatgattatggctactaaccggcctgacaccctggatcccgctctgctgcggcctggacgcctcgatcgcaaaatacatattgatttgcccaacgaacaggccagactggacatcctgaagattcatgccggaccaattaccaaacatggagaaattgattacgaagccattgttaagctcagtgatggatttaacggcgctgacttacgcaacgtgtgtacagaggctggcatgttcgcaattcgagccgaccatgattttgtcgtccaagaagatttcatgaaggcagtccgcaaggtggcggacagcaagaaactcgagtctaagctggattacaaacccgtgtag

SEQ ID NO: 132248 - DNA, 2188 bp, Artificial Sequence
  derived and/or modified sequence
acggccatggccattcccggcatcccctatgagagacggcttctcatcatggcggaccctagagataaggcgcttcaggactaccgcaagaagttgcttgaacacaaggagatcgacggccgtcttaaggagttaagggaacaattaaaagaacttaccaagcagtatgaaaagtctgaaaatgatctgaaggccctacagagtgttgggcagatcgtgggtgaagtgcttaaacagttaactgaagaaaaattcattgttaaagctaccaatggaccaagatatgttgtgggttgtcgtcgacagcttgacaaaagtaagctgaagccaggaacaagagttgctttggatatgactacactaactatcatgagatatttgccgagagaggtggatccactggtttataacatgtctcatgaggaccctgggaatgtttcttattctgagattggagggctatcagaacagatccgggaattaagagaggtgatagaattacctcttacaaacccagagttatttcagcgtgtaggaataatacctccaaaaggctgtttgttatatggaccaccaggtacgggaaaaacactcttggcacgagccgttgctagccagctggactgcaatttcttaaaggttgtatctagttctattgtagacaagtacattggtgaaagtgctcgtttgatcagagaaatgtttaattatgctagagatcatcaaccatgcatcatttttatggatgaaatagatgctattggtggtcgtcggttttctgagggtacttcagctgacagagagattcagagaacgttaatggagttactgaatcaaatggatggatttgatactctgcatagagttaaaatgatcatggctacaaacagaccagatacactggatcctgctttgctgcgtccaggaagattagatagaaaaatacatattgatttgccaaatgaacaagcaagattagacatactgaaaatccatgcaggtcccattacaaagcatggtgaaatagattatgaagcaattgtgaagctttcggatggctttaatggagcagatctgagaaatgtttgtactgaagcaggtatgttcgcaattcgtgctgatcatgattttgtagtacaggaagacttcatgaaagcagtcagaaaagtggctgattctaagaagctggagtctaaattggactacaaacctgtgtaatttactgtaagatttttgatggctgcatgacagatgttggcttattgtaaaaataaagttaaagaaaataatgtatgtattggtaatgatgtcattaaaagtatatgaataaaaatatgagtaacatcataaaaattagtaattcaacttttaagatacagaagaaatttgtatgtttgttaaagttgcatttattgcagcaagttacaaagggaaagtgttgaagcttttcatatttgctgcgtgagcattttgtaaaatattgaaagtggtttgagatagtggtataagaaagcatttcttatgacttattttgtatcatttgttttcctcatctaaaaagttgaataaaatctgtttgattcagttctcctacatatatattcttgtcttttctgagtatatttactgtggtcctttaggttctttagcaagtaaactatttgataacccagatggattgtggatttttgaatattattttaaaatagtacacatacttaatgttcataagatcatcttcttaaataaaacatggatgtgtgggtatgtctgtactcctcctttcagaaagtgtttacatattcttcatctactgtgattaagctcattgttggttaattgaaaatatacatgcacatccataactttttaaagagtatgattcaacgtaatatttgctaatatgtgactgggttttcttggtttatgtaagacgataggtccctgttgaggatgtggaggtctggaccctcttccaggaaaaattctaacatacaattttgcgtatactataatttcaggaaatttattgtttcccaagctcatccaaggactctttaggtatgtatggatacctggctaagagtgtatgatgtaggggatgtaggagtgtcagaaatgttcaaaacatgatttctgttacctatacatgattcttatatcatctggcaataaaagctataacaaa

SEQ ID NO: 132249 - DNA, 1212 bp, Artificial Sequence
  derived and/or modified sequence
atggccatccccggcatcccctacgagagaagactgctgatcatggccgaccccagagacaaggccctgcaggactacagaaagaagctgctggagcacaaggagatcgacggcagactgaaggagctgagagagcagctgaaggagctgaccaagcagtacgagaagagcgagaacgacctgaaggccctgcagagcgtgggccagatcgtgggcgaggtgctgaagcagctgaccgaggagaagttcatcgtgaaggccaccaacggccccagatacgtggtgggctgcagaagacagctggacaagagcaagctgaagcccggcaccagagtggccctggacatgaccaccctgaccatcatgagatacctgcccagagaggtggaccccctggtgtacaacatgagccacgaggaccccggcaacgtgagctacagcgagatcggcggcctgagcgagcagatcagagagctgagagaggtgatcgagctgcccctgaccaaccccgagctgttccagagagtgggcatcatcccccccaagggctgcctgctgtacggcccccccggcaccggcaagaccctgctggccagagccgtggccagccagctggactgcaacttcctgaaggtggtgagcagcagcatcgtggacaagtacatcggcgagagcgccagactgatcagagagatgttcaactacgccagagaccaccagccctgcatcatcttcatggacgagatcgacgccatcggcggcagaagattcagcgagggcaccagcgccgacagagagatccagagaaccctgatggagctgctgaaccagatggacggcttcgacaccctgcacagagtgaagatgatcatggccaccaacagacccgacaccctggaccccgccctgctgagacccggcagactggacagaaagatccacatcgacctgcccaacgagcaggccagactggacatcctgaagatccacgccggccccatcaccaagcacggcgagatcgactacgaggccatcgtgaagctgagcgacggcttcaacggcgccgacctgagaaacgtgtgcaccgaggccggcatgttcgccatcagagccgaccacgacttcgtggtgcaggaggacttcatgaaggccgtgagaaaggtggccgacagcaagaagctggagagcaagctggactacaagcccgtgtag

SEQ ID NO: 132250 - protein, 953 aa, Artificial Sequence
  derived and/or modified sequence
MITSAAGIISLLDEDEPQLKEFALHKLNAVVNDFWAEISESVDKIEVLYEDEGFRSRQFAALVASKVFYHLGAFEESLNYALGAGDLFNVNDNSEYVETIIAKCIDHYTKQCVENADLPEGEKKPIDQRLEGIVNKMFQRCLDDHKYKQAIGIALETRRLDVFEKTILESNDVPGMLAYSLKLCMSLMQNKQFRNKVLRVLVKIYMNLEKPDFINVCQCLIFLDDPQAVSDILEKLVKEDNLLMAYQICFDLYESASQQFLSSVIQNLRTVGTPIASVPGSTNTGTVPGSEKDSDSMETEEKTSSAFVGKTPEASPEPKDQTLKMIKILSGEMAIELHLQFLIRNNNTDLMILKNTKDAVRNSVCHTATVIANSFMHCGTTSDQFLRDNLEWLARATNWAKFTATASLGVIHKGHEKEALQLMATYLPKDTSPGSAYQEGGGLYALGLIHANHGGDIIDYLLNQLKNASNDIVRHGGSLGLGLAAMGTARQDVYDLLKTNLYQDDAVTGEAAGLALGLVMLGSKNAQAIEDMVGYAQETQHEKILRGLAVGIALVMYGRMEEADALIESLCRDKDPILRRSGMYTVAMAYCGSGNNKAIRRLLHVAVSDVNDDVRRAAVESLGFILFRTPEQCPSVVSLLSESYNPHVRYGAAMALGICCAGTGNKEAINLLEPMTNDPVNYVRQGALIASALIMIQQTEITCPKVNQFRQLYSKVINDKHDDVMAKFGAILAQGILDAGGHNVTISLQSRTGHTHMPSVVGVLVFTQFWFWFPLSHFLSLAYTPTCVIGLNKDLKMPKVQYKSNCKPSTFAYPAPLEVPKEKEKEKVSTAVLSITAKAKKKEKEKEKKEEEKMEVDEAEKKEEKEKKKEPEPNFQLLDNPARVMPAQLKVLTMPETCRYQPFKPLSIGGIIILKDTSEDIEELVEPVAAHGPKIEEEEQEPEPPEPFEYIDD

SEQ ID NO: 132251 - DNA, 2862 bp, Artificial Sequence
  derived and/or modified sequence
atgatcacctccgccgccggcattatttctttgctggacgaggatgaacctcagctgaaggagttcgcactgcacaaattgaatgccgtggtgaatgacttttgggccgagatctcagaaagcgtggacaagatcgaagtgctttatgaggatgaaggatttcgatcaaggcagttcgcggctctggtagcatctaaggtgttctatcacctgggggctttcgaggagagcctgaactacgcgttgggagcaggcgacttgttcaacgtgaatgataattcagagtatgtggagacaatcatcgctaagtgcatcgaccattacaccaagcaatgtgtagaaaatgccgatctgcctgagggcgagaaaaagccaatcgatcagaggctggaaggtatagttaataaaatgttccagcggtgcctggatgatcacaaatataaacaagccatcggtatcgcactggaaacaagaagattggacgtcttcgagaagaccattctggagtcaaacgatgttcctgggatgctggcctactctctcaagttatgcatgtctctgatgcaaaataaacaatttagaaataaagttctccgtgtgctcgtcaaaatctatatgaacctcgaaaagcccgacttcattaatgtttgccagtgtcttattttccttgatgatcctcaggccgtgtcagacattcttgaaaagttagtgaaggaagataatctgctcatggcgtatcagatttgctttgatctgtacgagtccgccagtcagcagttccttagtagcgtcatacaaaacctaaggacagtgggcacgcccatcgcttctgtgccaggttcaacgaacacggggactgtgccaggctccgagaaggactctgatagcatggagacagaggagaagacctcctcagctttcgtgggcaaaacccctgaagcatccccggagcctaaagatcagactctgaagatgataaaaatcctgagcggtgaaatggccattgagttgcacctacagtttttgattcgcaataataacacggatctgatgatattaaagaacacaaaagatgctgtgcgcaacagtgtttgtcacaccgctactgtaattgctaatagtttcatgcactgtggaaccacgagcgaccagtttctacgcgataacctggagtggctagcccgcgccaccaactgggctaagtttacggccaccgcctccctgggcgttattcataaaggccacgaaaaggaagcgctccagctgatggcgacttacctccctaaggataccagccccgggtctgcatatcaggagggaggcggcctgtacgccctaggcttgatccacgcgaatcatggcggggatattattgattatcttctgaaccagctcaagaacgcaagtaacgacattgttcggcacggaggcagtctgggactgggactggccgccatgggcaccgcacgacaagatgtgtatgatctgctgaagactaatctctatcaggatgatgccgtcacaggtgaagccgccggtctggcactgggacttgtgatgctaggatcaaagaacgcacaggccatcgaagacatggtggggtatgctcaggagacacagcacgagaaaatattgcggggattagccgtggggatagcgttggtgatgtacggaagaatggaggaagccgacgctcttatagagtcactgtgcagggacaaagatccaatcttgaggcgctctggaatgtatacagtggccatggcatactgtggtagcggcaacaataaggctattcgacggctcctccacgtagccgtcagtgacgtaaacgacgatgtaaggcgggctgccgtggagtcactcggctttattctgttcaggactccagagcagtgcccaagcgtggtgagcctgctgtccgaaagttacaacccccacgtccgctatggggccgccatggcactcggcatctgttgtgcgggcaccggcaacaaggaggctataaatctgcttgaacccatgacaaacgatccagtaaattacgttcgccaaggtgcacttatagcctccgcactcataatgattcagcaaacagaaatcacatgcccaaaggtgaaccaattcaggcagctgtattctaaggtgattaatgataaacatgatgacgtgatggctaaatttggggccatccttgcacaagggattctagacgcgggaggccataatgttactatcagtctgcaatcacgcacggggcacacccacatgccctccgtggtgggcgttctcgtctttacccaattctggttttggtttcccctgtcccacttcctctcgctggcatacacaccaacatgtgtgatcggcctgaataaagatctcaagatgccgaaagttcagtataaatctaactgcaaaccttccaccttcgcatatccggctccgctcgaggtccctaaagagaaggagaaggaaaaggtttcgacagctgtactcagcatcactgccaaagccaaaaaaaaggagaaagagaaggagaagaaagaagaggagaaaatggaagtggatgaagccgaaaagaaagaagagaaggagaaaaagaaggagcccgagccgaactttcagctgctcgacaaccccgcccgagtcatgccagcacaactgaaggtgctgacgatgcccgagacatgccgttaccagccattcaagcccctgagcataggtgggatcatcatcctgaaagatacatctgaggacatcgaagagcttgtggagcccgtggcggcccatggaccaaaaatcgaggaggaggaacaggaacccgagcctccagagccattcgagtacatagacgattag

SEQ ID NO: 132252 - DNA, 2862 bp, Artificial Sequence
  derived and/or modified sequence
atgatcaccagcgctgctggcatcatcagcctgctggatgaagatgagccccagctgaaggagtttgccctgcacaagctgaatgctgtggtgaatgacttctgggccgagatcagcgagagcgtggacaagattgaggtgctgtatgaagatgagggcttccgcagccggcagtttgctgccctggtggccagcaaggtgttctaccacctgggcgcctttgaggagagcctgaactatgccctgggcgctggggacctcttcaacgtgaatgacaacagtgaatatgtggagaccatcatcgccaagtgcatcgaccactacaccaagcagtgtgtggagaatgctgacctgcctgagggggagaagaagcccatcgaccagaggctggagggcatcgtgaacaagatgttccagcgctgcctggatgaccacaagtacaagcaggccatcggcatcgccctggagacccggcggctggatgtgtttgagaagaccatcctggagagcaatgatgtgcccggcatgctggcctacagcctgaagctgtgcatgagcctgatgcagaacaagcagttcaggaacaaggtgctgcgggtgctggtgaagatctacatgaacctggagaagccagacttcatcaacgtgtgccagtgcctgatcttcctggatgacccccaggccgtgtctgacatcctggagaagctggtgaaggaggacaacctgctgatggcctaccagatctgctttgacctgtatgaaagtgccagccagcagttcctgagcagcgtcatccagaacctgaggacagtgggcacccccatcgcctctgtgcccggcagcaccaacacaggcaccgtgcccggcagcgagaaggacagcgacagcatggagacagaggagaagaccagcagcgcctttgtgggcaagaccccagaggccagccctgagcccaaggaccagaccctgaagatgatcaagatcctgagcggggagatggccatcgagctgcacctgcagttcctgatccggaacaacaacacagacctgatgatcctgaagaacaccaaggatgctgtgagaaattctgtgtgccacacagccaccgtgattgccaacagcttcatgcactgcggcaccaccagtgaccagttcctgcgggacaacctggagtggctggcccgggccaccaactgggccaagttcaccgccacagccagcctgggcgtcatccacaagggccacgagaaggaggccctgcagctgatggccacctacctgcccaaggacaccagccctggcagcgcctaccaggagggcggcggcctgtatgccctgggcctcatccacgccaaccacggcggggacatcatcgactacctgctgaaccagctgaagaatgccagcaatgacatcgtgagacatggaggcagcctgggcctgggcctggccgccatgggcacagcccggcaggatgtgtatgacctgctgaagaccaacctgtaccaggatgatgctgtgactggagaggccgccggcctggccctgggcctggtgatgctgggcagcaagaatgcccaggccatcgaggacatggtgggctacgcccaggagacccagcacgagaagatcctgcggggcctggccgtgggcatcgccctggtgatgtatggccgcatggaggaggctgatgccctgattgagagcctgtgccgggacaaggaccccatcctgcggcgcagcggcatgtacacagtggccatggcctactgcggcagcggcaacaacaaggccatccggcggctgctgcacgtggccgtgtctgatgtgaatgatgatgtgagaagagctgctgtggagagcctgggcttcatcctcttccgcaccccagagcagtgccccagcgtggtgtccctgctgtctgagagctacaacccccacgtgcgctacggggccgccatggccctgggcatctgctgtgccggcactggaaacaaggaggccatcaacctgctggagcccatgaccaatgaccctgtgaactacgtgcggcagggcgccctgattgccagcgccctgatcatgatccagcagacagagatcacctgccccaaggtgaaccagttccggcagctgtacagcaaggtgatcaatgacaagcatgatgatgtgatggccaagtttggagccatcctggcccagggcatcctggatgctgggggccacaacgtgaccatcagcctgcagagcaggacaggccacacccacatgcccagcgtggtgggcgtgctggtgttcacccagttctggttctggttccccctgagccacttcctgagcctggcctacacccccacctgtgtgattggcctgaacaaggacctgaagatgcccaaggtgcagtacaagagcaactgcaagcccagcacctttgcctacccagcccccctggaggtgcccaaggagaaggagaaggagaaggtgtccacagctgtgctgagcatcacagccaaggccaagaagaaggagaaggagaaggagaagaaggaggaggagaagatggaggtggatgaagctgagaagaaggaggagaaggagaagaagaaggagcctgagcccaacttccagctgctggacaacccagcccgggtgatgcctgcccagctgaaggtgctgaccatgcctgagacctgccgctaccagcccttcaagcccctgagcatcggcggcatcatcatcctgaaggacaccagtgaagatattgaggagctggtggagcctgtggccgcccacggccccaagattgaggaggaggagcaggagcctgagcccccagagccctttgagtacattgatgactag

SEQ ID NO: 132253 - DNA, 2862 bp, Artificial Sequence
  derived and/or modified sequence
atgatcaccagcgccgccggcatcatcagcctgctggacgaggacgaacctcagctgaaagagttcgccctccacaagctaaacgccgtagtcaatgatttttgggcagagattagcgagagcgttgataagatcgaggtgctttatgaagacgaaggatttcgtagtagacaattcgccgcccttgtggcaagtaaggtgttttaccacctgggtgcctttgaagaatctctgaattacgccctaggcgctggcgatctctttaatgtcaacgataattctgagtatgtcgagaccattattgcgaaatgtatcgaccattacactaaacagtgtgtggaaaacgccgacctcccagagggagagaagaaacccatcgaccagcggctggaagggatcgtcaataagatgttccagagatgcctggacgaccacaagtacaaacaagctattggtattgcgctagagacaagaagactggacgtttttgaaaagacaatcctggagtccaacgatgtgccaggcatgcttgcttacagccttaaactctgtatgtcactgatgcagaacaaacagtttaggaacaaggtactcagagtccttgttaaaatatatatgaacctggagaagccagattttattaatgtgtgccaatgtttaatctttctggacgacccccaggcggtttctgatatccttgagaaacttgttaaggaggacaaccttcttatggcctaccagatctgtttcgatctatacgagtctgcatcccagcaattcctttcaagtgtcatccagaatctgcgaacagtggggacaccgattgcatctgtcccgggatccactaacaccggaacagttcctgggtctgagaaagatagcgattcgatggagacggaggagaagacatcctccgctttcgtcggtaagactcctgaggcttcccccgaacccaaggatcaaactcttaagatgatcaagatactgtcgggggaaatggcaattgaactgcacctccagtttctgatccgcaacaataacaccgatctcatgatactgaaaaataccaaggatgccgtccggaattccgtttgccatacggctactgttatagctaactccttcatgcactgcggcactacgagcgatcaatttctgcgtgataatcttgaatggcttgcacgcgcgacgaattgggcgaaatttacagccaccgctagtctcggcgttattcacaaaggccacgagaaggaggccctgcagctcatggctacttatctccctaaagacacttctcctggaagtgcttatcaggaagggggcggcttatacgccctgggcctgatccatgccaaccacggaggcgatatcatagactacctattaaatcagttgaagaatgccagcaatgacatcgtgagacatggtgggtctctaggcctaggactcgccgccatgggcacagctagacaagacgtatacgatctcctgaagaccaatctgtaccaggatgatgccgttactggggaggctgcggggctggctttgggtctggtgatgctggggagtaaaaatgcgcaggccatagaggacatggtgggttacgctcaagagactcagcacgaaaaaattttacgcgggctcgccgttggaattgctctggtcatgtacgggaggatggaggaagcagatgctcttattgagagtctctgccgagataaagatccaattctgcgccgaagtggtatgtacacagtagctatggcatattgcggaagtggaaacaacaaagcaatcaggcgcttactgcacgtcgccgtgagcgatgtgaatgatgatgtacgaagagcagccgtcgaatcactcgggtttatcctgttcagaaccccggagcaatgtcccagtgtggtgagcctcctgtctgagtcgtacaatcctcatgtcaggtatggggccgccatggctttaggcatctgctgtgccggtaccgggaacaaggaggccatcaaccttcttgagcccatgacaaacgatcctgttaattatgtgagacagggagccctaatcgcaagcgccctgatcatgatccagcaaaccgaaatcacatgtccgaaggtcaatcagtttcgccagttgtacagcaaggtgatcaatgataaacacgatgacgtgatggcaaagttcggagccatcctcgcacagggtatcctggacgccggcggccataatgtgaccatctctctccagagtcgcacaggccatacccacatgcccagtgtggtgggtgtgcttgtgtttacacagttctggttttggttcccgttatcccattttctgtctctggcatatactccaacttgtgtcatcgggctcaacaaggacctgaagatgcccaaagtccagtacaaaagcaattgcaaaccgagtacctttgcctatcccgccccattagaagtgcctaaagagaaggagaaggagaaggtatccacagctgtgctgtccatcactgctaaagcaaagaaaaaggaaaaggaaaaggaaaagaaggaggaagagaaaatggaggtcgacgaagccgaaaaaaaggaggagaaggagaagaagaaagagccagaaccgaactttcagctcctcgataatcccgcccgcgtcatgcctgctcagttgaaggtgctaaccatgccagagacatgtcggtatcagccctttaagcccctctctatcggaggcattatcatcctcaaggacacctccgaggacatcgaggaattggtggagcccgttgcagctcatggccctaaaatcgaagaggaagagcaggaaccggaaccacccgaacccttcgaatatatcgatgattag

SEQ ID NO: 132254 - DNA, 2862 bp, Artificial Sequence
  derived and/or modified sequence
atgatcactagcgctgccggaattatcagcctactggacgaagatgaaccccagctgaaagaatttgctcttcataaactgaacgcagtagtgaatgacttttgggccgaaatcagtgagtctgttgacaagattgaagtgctgtacgaggacgagggctttaggagtaggcagttcgcagcactggtagcctcaaaggtgttctaccatctgggcgcttttgaggagtcactgaattatgcacttggtgccggtgatttattcaacgtgaacgacaacagcgagtacgtggagacaatcatcgcaaagtgcattgaccactacacaaaacaatgcgtggaaaacgccgacctgccagagggggagaaaaagcccatcgatcaacgtctggagggaatcgtgaataaaatgttccagcgttgcttagatgatcacaagtacaagcaagccattggtatcgcattagagactagacgactcgacgtctttgagaagaccattctggagtctaacgacgtccccggtatgctggcctattctctgaagctgtgtatgtcactgatgcagaacaagcagttcagaaacaaagttcttcgggtgctggtgaagatatacatgaatttagaaaaacccgactttatcaacgtttgccagtgcctgatctttttggacgacccacaagccgtttcagacatccttgagaaattggtgaaggaggataacctgctgatggcttaccaaatctgctttgatctgtacgagtccgccagccaacagtttctgagctcagtcattcagaatctgagaacggttggaacacctatagcgtcagttcccggatctacaaacaccggcaccgtgcccggatccgaaaaagactctgattctatggagaccgaagaaaaaacgtcatcggcctttgttggcaagacgcccgaggcctctccagaaccaaaggatcagactctgaaaatgataaaaatcctctctggcgagatggccattgaattgcatttacaattccttatccggaataacaacacagacctcatgatcctgaaaaacacaaaagacgcggtgaggaacagcgtttgtcatactgctacggtgatcgccaactcgttcatgcattgcggaaccacttctgaccagtttcttagggataacctggaatggttggccagggctacgaactgggctaagtttaccgcgacagctagtctgggggtaattcacaaaggacatgagaaggaggccctccagctaatggccacatatctgcctaaagatacaagccctggctccgcatatcaggagggagggggtctctacgccctgggcctgatccacgctaaccatggtggcgacatcatcgactatttgctgaatcagctgaaaaatgctagtaatgatatcgtccggcatgggggatcacttggactgggccttgccgcaatgggaacagcaagacaagacgtgtatgacttgctcaaaacaaatttgtaccaggatgatgccgtcaccggtgaagccgctgggctcgctctgggactcgtgatgctggggtctaaaaatgcccaggccatagaggatatggtgggctacgctcaggagacccagcacgagaagatcctgagaggtctcgctgtcggtatcgccctggtgatgtacggcagaatggaagaggcggatgcacttattgagagcctctgcagggacaaggatccaatcctcagaagatctggaatgtacaccgtcgccatggcgtactgtggcagcggaaataataaggctattcgcagactcttgcacgtggcagtgagtgacgtgaacgacgacgtacgacgggcagccgtcgaatctctgggatttattctatttcggacccctgaacagtgtcctagtgtggtgtctctgctttcggagtcatacaacccccacgtcaggtatggcgctgcgatggccctgggaatatgttgtgccggaactgggaacaaggaggcaataaacctgctagagcccatgactaacgatccagtaaattacgttcgacagggagccctgattgcgtccgcactgatcatgattcaacagacggaaataacatgtcctaaagttaatcagttcaggcagctttacagtaaggttattaatgacaagcatgatgatgtgatggcaaagttcggggctatcttggcacagggtattctggacgccggaggtcacaacgtaaccatttctctccaatctagaacaggtcacacccacatgccttctgtggttggagtcctggtctttacccagttttggttttggtttccattgtctcattttctaagtcttgcgtatacacccacttgcgtcattggcctgaacaaagaccttaaaatgccaaaggtccagtataaatccaattgtaagccaagcactttcgcatatcctgctccattagaggtaccaaaagaaaaagagaaggaaaaggtctccacggccgtcctgtcaatcacggccaaggctaaaaaaaaggaaaaagagaaagagaaaaaagaggaggaaaagatggaagtagatgaagccgagaagaaggaagagaaagaaaagaaaaaagaacccgagcctaatttccagttgctggacaacccggcaagggtgatgcccgcacagcttaaagtcctgacaatgcccgagacatgcagataccaaccttttaagcccctgtctataggcggtatcatcatcttgaaagatacctccgaggatatcgaagaactggtggagccagtggcagcccatgggccaaaaatagaagaggaggagcaggagcccgagccacccgagccctttgaatacatcgacgattag

SEQ ID NO: 132255 - DNA, 3326 bp, Artificial Sequence
  derived and/or modified sequence
ggggtcctggcgagaagcgagccggcggcctgaggaggcgactgactgagcagcgcacccggggagcaaggaggcgcggtgaactgagcggcccctgagctgacagatacactgcgcagctggaacggcgagcgagccgacgggcgagtgaggggcgcagccatgatcacctcggccgctggaattatttctcttctggatgaagatgaaccacagcttaaggaatttgcactacacaaattgaatgcagttgttaatgacttctgggcagaaatttccgagtccgtagacaaaatagaggttttatacgaagatgaaggtttccggagtcggcagtttgcagccttagtggcatctaaagtattttatcacctgggggcttttgaggagtctctgaattatgctcttggagcaggggacctcttcaatgtcaatgataactctgaatatgtggaaactattatagcaaaatgcattgatcactacaccaaacaatgtgtggaaaatgcagatttgcctgaaggagaaaaaaaaccaattgaccagagattggaaggcatcgtaaataaaatgttccagcgatgtctagatgatcacaagtataaacaggctattggcattgctctggagacacgaagactggacgtctttgaaaagaccatactggagtcgaatgatgtcccaggaatgttagcttatagccttaagctctgcatgtctttaatgcagaataaacagtttcggaataaagtactaagagttctagttaaaatctacatgaacttggagaaacctgatttcatcaatgtttgtcagtgcttaattttcttagatgatcctcaggctgtgagtgatatcttagagaaactggtaaaggaagacaacctcctgatggcatatcagatttgttttgatttgtatgaaagtgctagccagcagtttttgtcatctgtaatccagaatcttcgaactgttggcacccctattgcttctgtgcctggatccactaatacgggtactgttccgggatcagagaaagacagtgactcgatggaaacagaagaaaagacaagcagtgcatttgtaggaaagacaccagaagccagtccagagcctaaggaccagactttgaaaatgattaaaattttaagtggtgaaatggctattgagttacatctgcagttcttaatacgaaacaataatacagacctcatgattctaaaaaacacaaaggatgcagtacggaattctgtatgtcatactgcaaccgttatagcaaactcttttatgcactgtgggacaaccagtgaccagtttcttagagataatttggaatggttagccagagccactaactgggcaaaatttactgctacagccagtttgggtgtaattcataagggtcatgaaaaagaagcattacagttaatggcaacataccttcccaaggatacttctccaggatcagcctatcaggaaggtggaggtctctatgcactaggtcttattcatgccaatcatggtggtgatataattgactatctgcttaatcagcttaagaacgccagcaatgatatcgttagacacggtggcagtctgggccttggtttggcagccatgggaactgcacgtcaagatgtttatgatttgctaaaaacaaacctttatcaggatgatgcagtaacaggggaagcagctggcctggccctaggtttggttatgttgggctctaaaaatgctcaggctattgaggacatggttggttatgcacaagaaactcaacatgagaagattctgcgtggtcttgcagttggcatagctttagtaatgtatgggaggatggaagaggctgatgctctcattgaatctctctgtcgtgacaaggacccaattcttcgaaggtctggaatgtatactgtagccatggcttattgtggctctggtaacaacaaagcaattcgacgcctgctacatgttgctgtaagtgatgttaatgatgatgtcaggagggcagcagtagaatcacttgggttcattctattcagaacccctgaacagtgcccaagtgttgtctctttgttgtcagagagttacaaccctcatgtgcgctacggagctgcaatggccttggggatatgctgtgctggtacaggaaacaaggaagccattaatttgctagaaccaatgacaaacgaccccgtgaactacgtgaggcaaggggcactcatagcttcagctctcatcatgatccagcagactgaaatcacttgtccaaaggtgaatcagttcagacagctgtattccaaagtcatcaatgataagcatgatgatgtcatggccaagtttggcgctattctggcccagggcatactggatgcaggtggtcataatgtcacaatctccttgcagtccaggactgggcatactcatatgccttctgtggttggcgtccttgtatttacccagttttggttctggtttcctctttcacacttcctgtcattggcttatacccctacctgtgtcattggccttaacaaggacttaaagatgccgaaagttcagtataaatcgaactgtaaaccatccacatttgcatatcctgcccctctggaagtaccaaaagaaaaagaaaaggaaaaggtttctactgctgtattatctataactgccaaggctaaaaagaaggaaaaagaaaaggaaaaaaaggaggaggagaaaatggaagtggatgaggcagagaaaaaggaggaaaaagagaagaaaaaagaacctgagccaaacttccagttattggataacccagcccgagttatgcctgcccagcttaaggtcctaaccatgccggagacctgtagataccagcctttcaaaccactctctattggaggcatcatcattctgaaggataccagtgaagacattgaggagctggtggaacctgtggcagcacatggcccaaaaatcgaggaggaggaacaagagccagaacccccagaaccatttgagtatattgatgattaagggccagaggatctcacttgcttatctgaagaagattgtccaggctcatattgggaatgcttatgaggaaattcatgccgagacctgctattcaatgcatgtatcgttgcctctgcactgacctgaagaaccctgtctccaagtctttggttgaagagaagatatatgactgttgagtgtgctctttcacagaacttggttttcaaataaatataagatctccagatggacaagacatttgtttttcagcctgggtttttaataaatgtatctaatcctccccacaccatgaaatgcctaaa

SEQ ID NO: 132256 - DNA, 2862 bp, Artificial Sequence
  derived and/or modified sequence
atgatcaccagcgccgccggcatcatcagcctgctggacgaggacgagccccagctgaaggagttcgccctgcacaagctgaacgccgtggtgaacgacttctgggccgagatcagcgagagcgtggacaagatcgaggtgctgtacgaggacgagggcttcagaagcagacagttcgccgccctggtggccagcaaggtgttctaccacctgggcgccttcgaggagagcctgaactacgccctgggcgccggcgacctgttcaacgtgaacgacaacagcgagtacgtggagaccatcatcgccaagtgcatcgaccactacaccaagcagtgcgtggagaacgccgacctgcccgagggcgagaagaagcccatcgaccagagactggagggcatcgtgaacaagatgttccagagatgcctggacgaccacaagtacaagcaggccatcggcatcgccctggagaccagaagactggacgtgttcgagaagaccatcctggagagcaacgacgtgcccggcatgctggcctacagcctgaagctgtgcatgagcctgatgcagaacaagcagttcagaaacaaggtgctgagagtgctggtgaagatctacatgaacctggagaagcccgacttcatcaacgtgtgccagtgcctgatcttcctggacgacccccaggccgtgagcgacatcctggagaagctggtgaaggaggacaacctgctgatggcctaccagatctgcttcgacctgtacgagagcgccagccagcagttcctgagcagcgtgatccagaacctgagaaccgtgggcacccccatcgccagcgtgcccggcagcaccaacaccggcaccgtgcccggcagcgagaaggacagcgacagcatggagaccgaggagaagaccagcagcgccttcgtgggcaagacccccgaggccagccccgagcccaaggaccagaccctgaagatgatcaagatcctgagcggcgagatggccatcgagctgcacctgcagttcctgatcagaaacaacaacaccgacctgatgatcctgaagaacaccaaggacgccgtgagaaacagcgtgtgccacaccgccaccgtgatcgccaacagcttcatgcactgcggcaccaccagcgaccagttcctgagagacaacctggagtggctggccagagccaccaactgggccaagttcaccgccaccgccagcctgggcgtgatccacaagggccacgagaaggaggccctgcagctgatggccacctacctgcccaaggacaccagccccggcagcgcctaccaggagggcggcggcctgtacgccctgggcctgatccacgccaaccacggcggcgacatcatcgactacctgctgaaccagctgaagaacgccagcaacgacatcgtgagacacggcggcagcctgggcctgggcctggccgccatgggcaccgccagacaggacgtgtacgacctgctgaagaccaacctgtaccaggacgacgccgtgaccggcgaggccgccggcctggccctgggcctggtgatgctgggcagcaagaacgcccaggccatcgaggacatggtgggctacgcccaggagacccagcacgagaagatcctgagaggcctggccgtgggcatcgccctggtgatgtacggcagaatggaggaggccgacgccctgatcgagagcctgtgcagagacaaggaccccatcctgagaagaagcggcatgtacaccgtggccatggcctactgcggcagcggcaacaacaaggccatcagaagactgctgcacgtggccgtgagcgacgtgaacgacgacgtgagaagagccgccgtggagagcctgggcttcatcctgttcagaacccccgagcagtgccccagcgtggtgagcctgctgagcgagagctacaacccccacgtgagatacggcgccgccatggccctgggcatctgctgcgccggcaccggcaacaaggaggccatcaacctgctggagcccatgaccaacgaccccgtgaactacgtgagacagggcgccctgatcgccagcgccctgatcatgatccagcagaccgagatcacctgccccaaggtgaaccagttcagacagctgtacagcaaggtgatcaacgacaagcacgacgacgtgatggccaagttcggcgccatcctggcccagggcatcctggacgccggcggccacaacgtgaccatcagcctgcagagcagaaccggccacacccacatgcccagcgtggtgggcgtgctggtgttcacccagttctggttctggttccccctgagccacttcctgagcctggcctacacccccacctgcgtgatcggcctgaacaaggacctgaagatgcccaaggtgcagtacaagagcaactgcaagcccagcaccttcgcctaccccgcccccctggaggtgcccaaggagaaggagaaggagaaggtgagcaccgccgtgctgagcatcaccgccaaggccaagaagaaggagaaggagaaggagaagaaggaggaggagaagatggaggtggacgaggccgagaagaaggaggagaaggagaagaagaaggagcccgagcccaacttccagctgctggacaaccccgccagagtgatgcccgcccagctgaaggtgctgaccatgcccgagacctgcagataccagcccttcaagcccctgagcatcggcggcatcatcatcctgaaggacaccagcgaggacatcgaggagctggtggagcccgtggccgcccacggccccaagatcgaggaggaggagcaggagcccgagccccccgagcccttcgagtacatcgacgactag

SEQ ID NO: 132257 - protein, 908 aa, Artificial Sequence
  derived and/or modified sequence
MEEGGRDKAPVQPQQSPAAAPGGTDEKPSGKERRDAGDKDKEQELSEEDKQLQDELEMLVERLGEKDTSLYRPALEELRRQIRSSTTSMTSVPKPLKFLRPHYGKLKEIYENMAPGENKRFAADIISVLAMTMSGERECLKYRLVGSQEELASWGHEYVRHLAGEVAKEWQELDDAEKVQREPLLTLVKEIVPYNMAHNAEHEACDLLMEIEQVDMLEKDIDENAYAKVCLYLTSCVNYVPEPENSALLRCALGVFRKFSRFPEALRLALMLNDMELVEDIFTSCKDVVVQKQMAFMLGRHGVFLELSEDVEEYEDLTEIMSNVQLNSNFLALARELDIMEPKVPDDIYKTHLENNRFGGSGSQVDSARMNLASSFVNGFVNAAFGQDKLLTDDGNKWLYKNKDHGMLSAAASLGMILLWDVDGGLTQIDKYLYSSEDYIKSGALLACGIVNSGVRNECDPALALLSDYVLHNSNTMRLGSIFGLGLAYAGSNREDVLTLLLPVMGDSKSSMEVAGVTALACGMIAVGSCNGDVTSTILQTIMEKSETELKDTYARWLPLGLGLNHLGKGEAIEAILAALEVVSEPFRSFANTLVDVCAYAGSGNVLKVQQLLHICSEHFDSKEKEEDKDKKEKKDKDKKEAPADMGAHQGVAVLGIALIAMGEEIGAEMALRTFGHLLRYGEPTLRRAVPLALALISVSNPRLNILDTLSKFSHDADPEVSYNSIFAMGMVGSGTNNARLAAMLRQLAQYHAKDPNNLFMVRLAQGLTHLGKGTLTLCPYHSDRQLMSQVAVAGLLTVLVSFLDVRNIILGKSHYVLYGLVAAMQPRMLVTFDEELRPLPVSVRVGQAVDVVGQAGKPKTITGFQTHTTPVLLAHGERAELATEEFLPVTPILEGFVILRKNPNYDL

SEQ ID NO: 132258 - protein, 900 aa, Artificial Sequence
  derived and/or modified sequence
MEEGGRDKAPVQPQQSPAAAPGGTDEKPSGKDKEQELSEEDKQLQDELEMLVERLGEKDTSLYRPALEELRRQIRSSTTSMTSVPKPLKFLRPHYGKLKEIYENMAPGENKRFAADIISVLAMTMSGERECLKYRLVGSQEELASWGHEYVRHLAGEVAKEWQELDDAEKVQREPLLTLVKEIVPYNMAHNAEHEACDLLMEIEQVDMLEKDIDENAYAKVCLYLTSCVNYVPEPENSALLRCALGVFRKFSRFPEALRLALMLNDMELVEDIFTSCKDVVVQKQMAFMLGRHGVFLELSEDVEEYEDLTEIMSNVQLNSNFLALARELDIMEPKVPDDIYKTHLENNRFGGSGSQVDSARMNLASSFVNGFVNAAFGQDKLLTDDGNKWLYKNKDHGMLSAAASLGMILLWDVDGGLTQIDKYLYSSEDYIKSGALLACGIVNSGVRNECDPALALLSDYVLHNSNTMRLGSIFGLGLAYAGSNREDVLTLLLPVMGDSKSSMEVAGVTALACGMIAVGSCNGDVTSTILQTIMEKSETELKDTYARWLPLGLGLNHLGKGEAIEAILAALEVVSEPFRSFANTLVDVCAYAGSGNVLKVQQLLHICSEHFDSKEKEEDKDKKEKKDKDKKEAPADMGAHQGVAVLGIALIAMGEEIGAEMALRTFGHLLRYGEPTLRRAVPLALALISVSNPRLNILDTLSKFSHDADPEVSYNSIFAMGMVGSGTNNARLAAMLRQLAQYHAKDPNNLFMVRLAQGLTHLGKGTLTLCPYHSDRQLMSQVAVAGLLTVLVSFLDVRNIILGKSHYVLYGLVAAMQPRMLVTFDEELRPLPVSVRVGQAVDVVGQAGKPKTITGFQTHTTPVLLAHGERAELATEEFLPVTPILEGFVILRKNPNYDL

SEQ ID NO: 132259 - DNA, 2727 bp, Artificial Sequence
  derived and/or modified sequence
atggaggagggtgggcgggataaagcgcccgtccagccccaacagtctccagccgccgcaccaggcggtaccgatgaaaagcctagtggcaaggagcgcagagacgctggcgataaggataaggaacaggaactctcagaggaggataaacagctgcaggatgagctggaaatgctggtggaacggctcggagagaaggatacctcactgtaccgaccagcactggaggagctgcggcgccaaatccgctcttccactacgtctatgacatctgtccccaagcccctgaagttcctgaggcctcattatggcaagttaaaggagatctacgagaatatggctcccggggaaaacaaacggtttgctgccgacattataagcgttttagccatgaccatgtctggcgaaagagaatgtcttaagtaccggctagtcgggagtcaggaggagctggcctcctggggacacgagtatgtccgccacctagcaggagaggttgccaaagagtggcaggagttagacgatgcggagaaggtgcagagagagccactgcttaccttagtgaaggagatcgtgccctacaacatggcccataatgccgagcacgaagcctgcgatctacttatggagatcgagcaagtggatatgcttgagaaagacatcgatgaaaatgcttatgcaaaagtttgcctatacctgacttcttgtgtgaactacgtgcccgaaccagaaaacagtgctctcttgcgctgcgccttgggagtttttcggaagttttctagattcccagaggcactgcggctagcactgatgctgaatgatatggagttagtggaggatattttcacatcgtgcaaggatgtggttgtccagaagcagatggcctttatgctggggcgacacggtgtctttctggagctttcggaagacgtcgaagaatacgaggacctcacagagattatgtctaacgtccagctgaatagtaacttccttgcgctggcccgggaactggatatcatggagcccaaggtaccagacgacatctataagacacatctggagaacaacagattcgggggctcaggaagtcaggttgattctgccagaatgaacctggcatcaagcttcgtgaatggcttcgtcaatgccgcattcggccaagacaagctgcttacagacgacggaaacaagtggctgtacaaaaacaaggaccacgggatgctgtctgcagctgcatccctcggtatgatcctgctgtgggacgtcgacggcgggttgacccaaatcgataaatatctatactctagcgaagactatatcaagtctggcgccttgctcgcatgtgggatcgttaatagcggcgtgcgcaacgaatgcgatcctgcactcgccctgcttagtgactacgtgctccacaactctaacaccatgcggctaggttccatatttggcctggggctggcctacgcaggctctaatcgcgaggatgtcctaactctgctcctgcccgtgatgggggatagcaaatcttctatggaagtggccggcgtcacagccctggcctgtggcatgatcgcggtcgggagctgcaatggagatgttacatccacgattctccaaactatcatggagaaaagtgagacggaactgaaggacacctatgcaaggtggttaccgctcggccttggtctgaatcacctcggcaaaggtgaagccattgaagcgattctggctgcgctggaggtggttagtgagccctttcgcagcttcgccaatacattggtggacgtatgtgcctacgcgggctcaggcaatgtcctgaaggtgcagcagctgttacatatatgcagtgaacactttgacagcaaagagaaggaggaagataaggataaaaaagagaaaaaagacaaggacaagaaggaagcaccggcagacatgggcgctcatcagggagtggccgtgttaggcatcgccctcattgccatgggtgaggagattggcgccgaaatggcactgcgcacctttggtcacctactgcgttacggggaacccaccttgaggcgcgccgtaccccttgcgttggcattaataagcgtatccaacccccggttgaatatcttggacaccctgtcaaagttttctcatgatgctgatccagaggtgtcgtacaattcaatattcgccatggggatggttggctcaggcacaaacaacgcccggcttgccgcaatgctgcgacagcttgcccagtaccatgcaaaagaccccaataatcttttcatggtgcgactcgctcaaggcctgactcacttaggcaaaggcactttgactctctgtccataccacagtgatcgtcaactgatgtcacaggtcgccgtagctggactgctcaccgtccttgtgagcttcctggacgtgcggaacatcattcttggcaaaagccactacgtgctgtatggtttggtggccgccatgcaacccaggatgctcgtgacctttgacgaagagctgcgtccactccccgtgagcgtaagggtggggcaggcagttgacgtggttggccaggcgggtaaaccaaaaaccataaccgggtttcagacgcacaccacaccggtgctcttagcccatggggaaagggctgagctggctaccgaagaattcctgcccgttaccccgattctggaaggcttcgtgatcttacgcaaaaaccctaactacgacctctag

SEQ ID NO: 132260 - DNA, 2703 bp, Artificial Sequence
  derived and/or modified sequence
atggaggagggcgggagagacaaggctcccgtacagccacagcagtccccagcggccgccccggggggtacagacgaaaagccatcggggaaggacaaggaacaggagctgtcagaagaggacaaacagcttcaggatgagctggagatgctagtcgagcggctaggagagaaggatacctccctgtatcgtcctgccctcgaggagctgcgtagacagatcagaagttccactacttctatgacctccgtgcctaagcccctgaaattcctccgcccccattacgggaaactaaaagaaatctacgaaaacatggcccccggagagaacaaacggtttgctgccgatatcatttcagtgttggcaatgaccatgagcggtgagcgcgagtgcctaaaatatcgcctggttgggtctcaggaagaattggcatcatggggacacgagtatgtgcgccatctggctggtgaagtcgccaaggagtggcaggaactagacgacgccgagaaagtgcagcgcgaacctttgttaactttggtgaaggagatagttccttacaatatggcacataacgctgaacacgaggcctgtgatctcctgatggagatagagcaagtcgacatgcttgagaaggatatagacgaaaatgcatacgccaaagtgtgtctctatttgacctcttgcgtcaactatgtgcctgagccagaaaactctgccctcctgaggtgtgccttgggcgtttttcgcaaattctcgcgttttccagaggccctccgcctggctctaatgctaaatgacatggagctggttgaagacatctttacaagttgcaaggacgtggttgtccagaagcagatggccttcatgctgggcagacacggagtttttttagaactgtcagaggacgtggaagaatacgaggacttaaccgagattatgtctaacgtacagctaaactcaaatttcctagcccttgctcgggaactcgatataatggaacccaaagtacctgacgacatttacaaaacccacttggagaacaatcggttcggcggctctggttcgcaggtggacagcgcccgtatgaatctggcaagctcgttcgtgaacggcttcgtaaacgcagcatttggccaggacaagctccttacagacgatggaaacaagtggctttataagaataaggaccacggtatgttgtctgccgcagccagcctaggcatgattctgctgtgggatgtcgacgggggcttgacgcagatagataaatatctttactcgtcggaagattatatcaaatccggggctctgctggcgtgtggaatagtgaactccggcgtccggaatgagtgtgaccccgcgctcgcactgctctcggattacgttctacataatagtaatactatgaggttgggctcgatctttgggctcggacttgcctatgccggtagtaatcgcgaggatgtgctgacactccttctgcctgttatgggagactctaaatccagcatggaggtggctggcgtgacagccttagcctgcggaatgatagcagtgggcagctgcaatggagacgtgacttcgaccatcttgcaaacaattatggaaaaaagtgagaccgagctgaaggacacgtacgcacgctggcttccattgggcctgggactgaatcaccttgggaagggagaagcaatcgaggccattttagccgcactcgaggtggtgagcgaacccttccgatcattcgccaataccctcgtagacgtgtgtgcatacgctggaagtgggaatgtacttaaagtccagcagctgctgcacatttgctcggagcacttcgatagtaaagagaaagaggaagataaagacaaaaaggagaagaaggacaaggacaaaaaagaggcacctgccgatatgggagcacaccagggtgtggccgttctcggaattgctctgatcgcgatgggtgaggaaatcggggcggagatggccttacgcacgttcgggcatttgttgagatacggcgagccaaccttgcggcgcgccgtgcctctggcactggcccttatcagcgtgagtaacccacgcctgaatattctcgataccctctccaagttttcacacgatgctgaccccgaggtcagttacaatagcatctttgccatgggcatggtgggctccgggacaaacaatgcgcggttggctgccatgttgcgccagttagcacagtaccacgctaaagaccctaataacttatttatggtgcggttggcacagggactgacacacctggggaagggtaccttaaccttgtgcccctaccattctgatcgccagctgatgtcgcaggtggctgtcgcaggtcttctgacagtgctggtgtcatttctcgacgtccgtaatatcatcttgggtaaaagtcactacgtattgtatggcttagtggctgccatgcagccccggatgctggtgaccttcgatgaagaactgaggcctctacctgttagcgtgcgcgtggggcaggctgtcgacgtcgtgggacaggccggcaaacccaagactatcacaggcttccagactcacaccactcccgttctgttggcacatggagaacgagccgaattggctaccgaagagttcctccccgtgacccccattttagaaggatttgtcattttacggaagaatcctaactacgacctgtag

SEQ ID NO: 132261 - DNA, 2727 bp, Artificial Sequence
  derived and/or modified sequence
atggaggagggcggccgggacaaggcccctgtgcagccccagcagagccctgctgctgcccctgggggcacagatgagaagcccagcggcaaggagaggagagatgctggggacaaggacaaggagcaggagctgtctgaggaggacaagcagctgcaggatgagctggagatgctggtggagcggctgggggagaaggacaccagcctgtacagacctgccctggaggagctgcggcggcagatccgcagcagcaccacctccatgacctctgtgcccaagcccctgaagttcctgcggccccactacggcaagctgaaggagatctatgagaacatggcccctggagagaacaagagatttgctgctgacatcatctctgtgctggccatgaccatgtctggagagcgggagtgcctgaagtaccgcctggtgggcagccaggaggagctggcctcctggggccacgagtatgtgcgccacctggccggggaggtggccaaggagtggcaggagctggatgatgctgagaaggtgcagcgggagcccctgctgaccctggtgaaggagatcgtgccctacaacatggcccacaatgctgagcacgaggcctgtgacctgctgatggagattgagcaggtggacatgctggagaaggacattgatgaaaatgcctatgccaaggtgtgcctgtacctgaccagctgtgtgaactacgtgcctgagcctgagaacagcgccctgctgcgctgtgccctgggcgtcttcaggaagttcagccgcttccctgaggccctgcggctggccctgatgctgaatgacatggagctggtggaggacatcttcaccagctgcaaggatgtggtggtgcagaagcagatggccttcatgctgggcagacatggagtcttcctggagctgtctgaagatgtggaggagtatgaggacctgacagagatcatgagcaatgtgcagctgaacagcaacttcctggccctggcccgggagctggacatcatggagcccaaggtgcctgatgacatctacaagacccacctggagaacaacagatttggaggcagcggcagccaggtggacagcgccaggatgaacctggccagcagctttgtgaatggatttgtgaatgctgccttcggccaggacaagctgctgacagatgatggcaacaagtggctgtacaagaacaaggaccacggcatgctgtctgctgctgccagcctgggcatgatcctgctgtgggatgtggatggcggcctgacccagattgacaagtacctgtacagcagcgaggactacatcaagagcggggccctgctggcctgtggcatcgtgaacagcggcgtgagaaatgaatgtgaccctgccctggccctgctgagtgactatgtgctgcacaacagcaacaccatgaggctgggcagcatcttcggcctgggcctggcctatgccggcagcaacagagaagatgtgctgaccctgctgctgcctgtgatgggagacagcaagagctccatggaggtggccggcgtgacagccctggcctgtggcatgattgctgtgggcagctgcaatggagatgtgaccagcaccatcctgcagaccatcatggagaagtcagaaacagagctgaaggacacctacgcccgctggctgcccctgggcctgggcctgaaccacctgggcaaaggagaggccatcgaggccatcctggccgccctggaggtggtgtctgagcccttccgcagctttgccaacaccctggtggatgtgtgtgcctatgccggcagcggaaatgtgctgaaggtgcagcagctgctgcacatctgcagcgagcactttgacagcaaggagaaggaggaggacaaggacaagaaggagaagaaggacaaggacaagaaggaggccccagctgacatgggcgcccaccagggcgtggccgtgctgggcatcgccctgattgccatgggagaggagatcggggctgagatggccctgcggaccttcggccacctgctgcgctatggagagcccaccctgcggcgggctgtgcccctggccctggccctgatctctgtgagcaacccccggctgaacatcctggacaccctgagcaagttcagccatgatgctgaccctgaggtgtcctacaacagcatctttgccatgggcatggtgggcagcggcaccaacaatgcccggctggccgccatgctgcggcagctggcccagtaccacgccaaggaccccaacaacctcttcatggtgcggctggcccagggcctgacccacctgggcaagggcaccctgaccctgtgcccctaccacagcgaccggcagctgatgagccaggtggccgtggccggcctgctgactgtgctggtgtccttcctggatgtgaggaacatcatcctgggcaagagccactacgtgctgtatggcctggtggccgccatgcagcccaggatgctggtgacctttgatgaggagctgcggcccctgcctgtgtctgtgcgggtgggccaggccgtggatgtggtgggccaggccggcaagcccaagaccatcaccggcttccagacccacaccacccctgtgctgctggcccacggggagcgggcagagctggccacagaggagttcctgcctgtgacccccatcctggagggctttgtgatcctgaggaagaaccccaactatgacctgtag

SEQ ID NO: 132262 - DNA, 2703 bp, Artificial Sequence
  derived and/or modified sequence
atggaggagggcggccgggacaaggcccctgtgcagccccagcagagccctgctgctgcccctgggggcacagatgagaagcccagcggcaaggacaaggagcaggagctgtctgaggaggacaagcagctgcaggatgagctggagatgctggtggagcggctgggggagaaggacaccagcctgtacagacctgccctggaggagctgcggcggcagatccgcagcagcaccacctccatgacctctgtgcccaagcccctgaagttcctgcggccccactacggcaagctgaaggagatctatgagaacatggcccctggagagaacaagagatttgctgctgacatcatctctgtgctggccatgaccatgtctggagagcgggagtgcctgaagtaccgcctggtgggcagccaggaggagctggcctcctggggccacgagtatgtgcgccacctggccggggaggtggccaaggagtggcaggagctggatgatgctgagaaggtgcagcgggagcccctgctgaccctggtgaaggagatcgtgccctacaacatggcccacaatgctgagcacgaggcctgtgacctgctgatggagattgagcaggtggacatgctggagaaggacattgatgaaaatgcctatgccaaggtgtgcctgtacctgaccagctgtgtgaactacgtgcctgagcctgagaacagcgccctgctgcgctgtgccctgggcgtcttcaggaagttcagccgcttccctgaggccctgcggctggccctgatgctgaatgacatggagctggtggaggacatcttcaccagctgcaaggatgtggtggtgcagaagcagatggccttcatgctgggcagacatggagtcttcctggagctgtctgaagatgtggaggagtatgaggacctgacagagatcatgagcaatgtgcagctgaacagcaacttcctggccctggcccgggagctggacatcatggagcccaaggtgcctgatgacatctacaagacccacctggagaacaacagatttggaggcagcggcagccaggtggacagcgccaggatgaacctggccagcagctttgtgaatggatttgtgaatgctgccttcggccaggacaagctgctgacagatgatggcaacaagtggctgtacaagaacaaggaccacggcatgctgtctgctgctgccagcctgggcatgatcctgctgtgggatgtggatggcggcctgacccagattgacaagtacctgtacagcagcgaggactacatcaagagcggggccctgctggcctgtggcatcgtgaacagcggcgtgagaaatgaatgtgaccctgccctggccctgctgagtgactatgtgctgcacaacagcaacaccatgaggctgggcagcatcttcggcctgggcctggcctatgccggcagcaacagagaagatgtgctgaccctgctgctgcctgtgatgggagacagcaagagctccatggaggtggccggcgtgacagccctggcctgtggcatgattgctgtgggcagctgcaatggagatgtgaccagcaccatcctgcagaccatcatggagaagtcagaaacagagctgaaggacacctacgcccgctggctgcccctgggcctgggcctgaaccacctgggcaaaggagaggccatcgaggccatcctggccgccctggaggtggtgtctgagcccttccgcagctttgccaacaccctggtggatgtgtgtgcctatgccggcagcggaaatgtgctgaaggtgcagcagctgctgcacatctgcagcgagcactttgacagcaaggagaaggaggaggacaaggacaagaaggagaagaaggacaaggacaagaaggaggccccagctgacatgggcgcccaccagggcgtggccgtgctgggcatcgccctgattgccatgggagaggagatcggggctgagatggccctgcggaccttcggccacctgctgcgctatggagagcccaccctgcggcgggctgtgcccctggccctggccctgatctctgtgagcaacccccggctgaacatcctggacaccctgagcaagttcagccatgatgctgaccctgaggtgtcctacaacagcatctttgccatgggcatggtgggcagcggcaccaacaatgcccggctggccgccatgctgcggcagctggcccagtaccacgccaaggaccccaacaacctcttcatggtgcggctggcccagggcctgacccacctgggcaagggcaccctgaccctgtgcccctaccacagcgaccggcagctgatgagccaggtggccgtggccggcctgctgactgtgctggtgtccttcctggatgtgaggaacatcatcctgggcaagagccactacgtgctgtatggcctggtggccgccatgcagcccaggatgctggtgacctttgatgaggagctgcggcccctgcctgtgtctgtgcgggtgggccaggccgtggatgtggtgggccaggccggcaagcccaagaccatcaccggcttccagacccacaccacccctgtgctgctggcccacggggagcgggcagagctggccacagaggagttcctgcctgtgacccccatcctggagggctttgtgatcctgaggaagaaccccaactatgacctgtag

SEQ ID NO: 132263 - DNA, 2727 bp, Artificial Sequence
  derived and/or modified sequence
atggaggagggcggccgggacaaggcccccgtgcagccccagcagagtccagccgccgctcccggcggcaccgatgaaaaacccagcggcaaggaaagaagagacgcaggcgataaggataaagaacaagagttgtctgaggaggacaagcagctccaggacgagcttgaaatgctggtcgaacgattaggcgagaaggacaccagcttgtatcggcctgctctggaggaactaagacggcagattcgctcttccacgacgtcaatgacctcagtaccaaagcccctgaagtttctacgtcctcactatggtaagcttaaagagatttatgagaacatggcgcctggcgagaataagcgatttgctgctgatatcatttctgtgctcgccatgacaatgtccggggagcgcgagtgcctgaagtatcggcttgtggggtcccaggaggaactagcgagctggggacacgagtacgtgaggcatcttgccggagaggttgccaaggaatggcaggaactggacgatgctgagaaagttcagcgggagcccttgctgacactggtcaaggagatagtgccgtacaatatggcccacaacgccgaacatgaggcttgcgatctgctgatggaaattgagcaggtggatatgctggaaaaggatatagacgagaacgcatatgccaaagtatgtctttatctgacatcctgtgtaaattacgtgcccgagcccgagaattccgcgctgcttaggtgtgccttaggagtattccgcaagttcagtagatttcccgaagcattgaggcttgccttaatgctgaacgatatggagctagttgaggacatctttacctcctgcaaagacgtggtggtacaaaaacagatggccttcatgctgggcagacacggagtgttcctagaactgagcgaggacgttgaagagtacgaggacctcacagagattatgagtaacgtgcaactgaattcgaactttcttgccctggcccgcgaattggatattatggagcctaaggtccctgacgacatttataaaacccatcttgagaacaatcggttcggagggagcggatctcaggtcgacagtgcgaggatgaatcttgcatccagctttgtgaacggattcgtgaatgctgcatttggccaagacaagctgctcacagacgacggcaacaaatggctgtataaaaacaaggaccatggcatgttatcagcagccgcctcgctgggtatgattctgctatgggatgttgatggcggcctaactcagattgacaagtacttgtattccagcgaagattacatcaagtcaggtgcactactggcttgtggcatcgtgaactctggtgtgagaaacgagtgtgaccccgcccttgccttgctttcagattacgtcttgcacaattctaataccatgcgcctaggatctatctttggtcttggcctcgcctacgcgggctcaaaccgagaggacgtgctcaccctactgctgcctgttatgggagatagcaaaagttcaatggaagtggccggtgtgaccgctttggcatgcggcatgatagccgtcggcagttgtaatggggacgttacttcgaccatcttgcagaccatcatggagaaatccgaaacggaacttaaagacacttatgcccgctggttacccctggggctgggcctgaaccatttgggaaaaggggaagccatcgaagccattttagccgccctagaagtggtctctgagccgttcagatctttcgccaacacccttgttgatgtatgtgcttacgccgggtccgggaacgtacttaaggtgcaacagttgctccacatctgcagcgagcacttcgattccaaggagaaagaggaagacaaggataagaaggaaaagaaagacaaggataaaaaggaagcgcctgcagatatgggggctcaccaaggtgtagcggtactcgggatagccctgattgcgatgggcgaagaaatcggtgcagagatggcactccgtacatttggtcacctcctgcgctacggagagcctacgctccgcagggctgtgcctctcgccctggctctgattagtgtgtctaacccaaggctgaacatccttgatactctatccaagttttcacacgacgctgaccccgaagtcagctataattcgatattcgcaatgggaatggtgggttcaggcactaataacgctcgcctggccgctatgctccgccaactcgcccagtatcacgctaaggatcctaacaacctgttcatggtgcgactggcacaggggctgacccatctgggcaagggaactctgacgctgtgtccttaccattcagacaggcagttgatgagccaggtggctgtcgctggccttctcaccgtcctggtatctttcctggacgttcgcaacattattcttggcaagtctcactacgtgttatacggtctagtggccgccatgcagccaaggatgctggtgacattcgacgaggaactccgccctcttcctgtttcagtgcgagtggggcaggctgtggacgtggtgggccaagccggcaagccgaagaccatcacaggtttccagactcacactacacctgttttattggcacacggagagcgcgcagaactcgctactgaggagtttttgccagtcacacccatcctagaaggcttcgtcattctcaggaaaaatcccaattacgacctctag

SEQ ID NO: 132264 - DNA, 2703 bp, Artificial Sequence
  derived and/or modified sequence
atggaggagggcggccgggacaaggcccccgtgcagccccagcagagcccggctgcggcaccaggtgggaccgatgagaagccttcaggcaaagacaaggagcaggaactctctgaggaagacaagcaactccaggatgagctagaaatgctcgtcgagaggttgggagagaaggatacatcgttatatcgacccgccctggaggagctgcgacggcagattcgatctagcaccacctccatgacctcggtccccaagcccctgaagttccttagacctcactacggaaaactgaaagaaatttatgagaacatggccccgggggagaacaaaagattcgccgcggatatcatatctgtccttgccatgactatgtcgggggagagagagtgtctgaaatatcgcctggtgggcagtcaagaggagctggccagctgggggcacgagtatgttcggcacctggctggcgaagtggcaaaggaatggcaggaactggacgacgccgaaaaagtccaaagggagcccctgttaacattggtaaaagaaatagtaccgtataacatggcccataacgccgaacacgaagcgtgtgatttgctcatggagattgaacaggtcgatatgctggagaaggatatagatgagaacgcctatgccaaggtgtgcctgtacctgacatcttgtgtgaattacgtgcctgaacccgagaactccgctctcctgcgttgcgccctgggagtgttccgcaagttcagcagattcccagaggccctccgcctggccctgatgcttaatgacatggaactggtggaggatatttttacatcctgtaaggacgtggtagtccagaaacaaatggcttttatgctggggcgccacggagtatttctggagctttcggaggacgtggaagagtacgaggatctgacagaaatcatgtccaacgttcaactaaactccaatttcctggccttagccagagagctggacataatggagcccaaggtgccggacgacatctacaaaacccacctagagaataacagatttggtggctcgggcagccaagttgacagtgctagaatgaacttggcaagctcctttgtgaatgggttcgtgaatgccgcgtttggccaggataagctgcttaccgacgacggcaacaaatggctctacaaaaataaggaccacgggatgctcagcgcagctgcgtccttaggaatgatattgctctgggacgtggatgggggactcacacaaattgataaatatctgtatagcagtgaggattacatcaagagtggagccctgctggcatgcggcatcgtcaactccggggtgaggaatgagtgtgaccccgccctggcccttctgagcgattacgtactacacaactcaaacaccatgcgtctgggcagtatcttcgggctgggtctcgcgtatgccggctctaaccgtgaggatgtgctcacactcttactccccgtaatgggcgacagcaaaagctctatggaggtcgccggcgtaacagcccttgcgtgtggaatgatcgccgtcggctcctgcaatggggatgtgacctcaacaattctccagactatcatggagaaatctgagactgagctaaaagatacctatgcccgctggttacccctggggctgggcctgaaccatctgggtaagggtgaggccattgaggctattctcgccgctctagaagtggtcagcgagccctttcggagcttcgccaacaccctcgtcgacgtgtgtgcctacgcaggcagcggtaacgtccttaaggtgcaacaactgctccacatttgttctgagcactttgacagcaaagagaaggaggaggataaggataagaaggaaaagaaggacaaagacaaaaaggaagcacctgcagatatgggggcgcaccagggtgtggccgttctgggcattgccctgattgccatgggggaggagatcggggccgaaatggcattgagaacctttggccatctgctgcgctatggtgagcccactctgcggcgtgctgtcccgctggcccttgccctgatatccgtgagtaatcccagacttaatatattggataccttgtctaagttttcacatgatgctgatcctgaggttagctataactcaattttcgcgatgggaatggtcggcagtggcaccaataacgcacggctggccgctatgttaagacagctggcacagtatcacgcgaaagacccaaataacttattcatggtgcggcttgcccagggcctgacacacttgggaaaggggactctgaccctgtgcccctatcatagcgacaggcagcttatgtcgcaggtggcagtcgcaggcttgctcactgtgctggtgtccttcctggacgttaggaacattatcctgggaaagtcccattatgtcttgtatggcttggtcgccgccatgcagccgaggatgctggtgactttcgacgaagaacttcgaccactgccagtgtccgtccgcgtggggcaggctgtggatgtggtcgggcaggccggcaaaccaaagacgatcacaggatttcagacacatactacccccgttctgctggcgcacggtgagagagctgagctcgcaaccgaggaattcctccccgttacccctatcctggaggggtttgtaatccttaggaagaacccaaattacgacttgtag

SEQ ID NO: 132265 - DNA, 2727 bp, Artificial Sequence
  derived and/or modified sequence
atggaagaagggggtcgcgacaaggccccagtccagccccagcaaagccccgctgcagccccaggaggaacggatgagaaaccatcaggtaaggaacgtagagatgcgggagacaaggacaaggagcaggagctgagcgaagaggataagcaactacaggacgaactagagatgcttgtcgaaaggctgggagaaaaggacacatccctgtatcggcctgcccttgaggagttaagaagacagatcagatcaagtaccacctccatgacctcagtgcctaagccactgaaattcctgcgtccccactatggtaaactgaaggagatctatgagaatatggctcctggggagaataagcgtttcgccgcagacatcatctcagtccttgccatgacaatgtctggagaaagagaatgcctcaagtatagactggtcgggtctcaggaggagctagcctcctggggccatgagtacgttcgacatttagccggagaagtggcaaaggaatggcaggaactcgatgacgcggaaaaagtgcagagggaacctctgctgacactggtgaaggagatcgtcccctacaatatggctcacaatgcagaacatgaagcctgcgatctcctcatggaaattgagcaggtcgacatgctggagaaggacatcgatgaaaacgcctacgccaaggtctgcttatatctaactagttgtgtaaattatgtgcccgagcctgaaaattccgctctactcagatgcgccctcggagtctttagaaaattctcgcgtttcccagaggcgctacgattagccttgatgctaaatgacatggaactggtcgaagatatatttacgagctgtaaagacgtagtcgtccagaagcagatggcttttatgctcggcagacacggggtgttcctcgagttatcagaggacgtggaggagtatgaagaccttaccgaaataatgagcaacgtgcaactgaacagcaatttccttgcgctagccagggagttagatatcatggagcctaaagtgcccgatgacatatataagacccatcttgagaataatagattcggcggatccggatcccaagttgactccgctcgaatgaacctggctagctcttttgtcaacggatttgtaaacgccgcattcggccaagacaagctcctcactgacgacggaaacaaatggctgtacaaaaacaaggaccatggaatgctgagcgctgccgcttccctgggtatgattctcctgtgggatgtcgacggaggtctgacacaaatagataagtatttatacagtagcgaggattatattaagagcggcgcattgctggcctgtggcatcgtgaatagcggcgtccggaacgagtgcgaccctgcactcgccctactttccgactatgtcttacataattcgaacacaatgagattgggctccattttcggactggggttggcatatgctggctccaacagagaagatgttcttacgctgcttctgcctgtgatgggggattcgaaaagctctatggaagttgcaggcgtcacggctctggcctgtggaatgatcgccgtcggatcctgcaacggggatgttactagcaccattcttcagactatcatggaaaagtctgaaactgagctgaaagacacctacgcacggtggctgcctctggggctaggcctcaaccacctcggaaaaggggaggctatcgaagccattctggcagcccttgaagtcgtcagcgaaccattcagatccttcgcgaatacccttgtagacgtttgtgcttatgccggatccgggaatgtgttgaaggtgcagcagttactgcatatatgctctgagcatttcgattccaaagaaaaagaggaggacaaagataagaaggagaagaaggacaaggacaaaaaggaggccccagctgatatgggggcacatcagggagtcgctgtgctgggtatagctctgatcgcgatgggagaagagatcggggctgaaatggccctgaggacatttggccacctgctgcgatatggagagcccacactgagacgcgcagtgcccttagcactggctttgatctccgtgagcaatcctaggcttaacatcctggatactctgtccaagttctctcatgacgctgatccggaggtgtcgtataactcgatatttgctatggggatggtgggttcaggaaccaacaacgcgagactcgccgctatgctcagacagctggctcagtaccatgcgaaagacccaaacaatctgttcatggtgcgtctggctcaagggctcacccatctcggaaaaggcacactgacgctgtgcccttatcattccgaccgacagttgatgtctcaggtggcagtcgccggtttgttgaccgtcctggtcagtttcctcgacgtacgaaacattattcttggtaagtcccactacgtcctctacggtctggttgccgctatgcagcccaggatgctggtgacattcgacgaagagctgcggccactgccagtatccgtccgcgtggggcaagctgtagatgtcgtgggacaggctgggaagcctaagaccattaccggctttcaaacacacacaactccagtcttgctggcccatggtgaacgggcagaactcgctacggaggaatttctgcctgtgacccctatcctggaaggctttgtaatccttcggaagaacccgaactacgatttatag

SEQ ID NO: 132266 - DNA, 2703 bp, Artificial Sequence
  derived and/or modified sequence
atggaagaagggggtagggacaaggccccagtgcagccccagcagagccccgcagccgctcctggtggcacagatgaaaagccttcaggcaaagacaaagaacaggaactttcggaggaggataagcagctgcaggacgagctggagatgctggttgaaaggctcggcgagaaggacacctccctgtacaggccggctctggaggaactgcgcaggcaaatccggtctagcacgacatcaatgacctcggtgcctaagccccttaaatttctgaggccgcactatggtaaattgaaagagatatacgaaaacatggcacctggagaaaacaagcggtttgctgccgacataatcagtgtgctggccatgaccatgagcggtgaacgagagtgcctcaaataccggctcgtcggtagtcaggaggaattagcgtcttgggggcacgaatacgttagacaccttgccggtgaggtggctaaagagtggcaggaactagacgacgccgaaaaggtgcaaagagaacctttgctcacgctcgtaaaagagattgtgccttacaatatggcacacaacgccgaacacgaggcttgtgacctccttatggagattgaacaggtggatatgttagaaaaagacattgacgaaaacgcttacgccaaagtgtgtctctacctgacaagctgtgtgaactatgttcccgagcccgagaactcagcccttctcagatgcgccctcggtgttttcaggaaatttagcaggttccctgaggctttgcggcttgcactgatgctaaatgatatggaactggtagaagacattttcacaagttgcaaggacgtcgtggtgcagaaacagatggcattcatgttaggaagacacggcgtcttcctggaattatccgaagacgtcgaggaatacgaagatctgacagaaataatgtctaatgtgcagctgaactctaactttctggctttggctagggaactggatattatggagccaaaggttccagatgatatctataagactcatttagaaaataatcggttcggcggaagcggtagtcaggtagactcagcccgaatgaaccttgccagttcatttgtgaacggttttgtcaacgctgcttttgggcaggacaaattactgactgatgatggcaacaagtggttgtacaagaacaaagaccatggcatgctgagtgcagccgcttcattgggcatgattttgctatgggatgtggacggtggccttacccaaattgataagtatttatactccagcgaagactatatcaagtccggcgcactgcttgcatgtggaatcgtcaactctggtgtaagaaatgagtgtgaccctgccctggctctgctgtctgactacgtgctccacaattcgaacaccatgcggctgggtagtatatttggtctgggactggcttacgccggtagcaatagagaagatgtcttgactctgctgctgcccgtcatgggcgacagtaaatccagcatggaagtggcgggtgtaaccgccctggcctgtggtatgatcgctgtcggatcatgtaatggtgatgtgacatcaaccatactgcaaaccattatggaaaaaagcgagaccgaactgaaggacacttatgccagatggctcccgctgggcctcggactgaaccatctggggaaaggcgaggccatagaagcaattctggccgctctggaggttgtaagcgaacctttcagatcattcgctaacactctggtcgatgtatgtgcctacgcgggaagtggaaacgtgctgaaagtacagcaacttctccacatctgctccgaacacttcgatagtaaagaaaaggaggaggataaggataagaaggagaagaaggataaagataagaaagaggccccagccgatatgggcgcacatcagggcgttgccgtgctgggtattgccctgatagccatgggagaggagattggtgcagagatggccctcagaactttcgggcacttgctgagatacggtgagcctacacttagaagggccgtacccctcgctctagcactcatttcggtgtctaatccgcgtctcaatattctggacaccctcagcaaattttcccatgatgccgatcctgaggtgagttacaactcaatatttgctatggggatggtgggctctgggaccaacaatgcacgcctggcagccatgctgaggcagctggcacaataccacgctaaagacccaaataacctgtttatggtaaggttagctcaaggactgacccacttggggaaagggacccttaccctctgcccataccattccgaccgccagctaatgtcacaggtggccgtggcgggtttactgacagtgcttgtcagtttcctcgacgtgcgtaatatcatactcggtaagtctcattacgtgctctacgggctggtggctgccatgcagcccagaatgttggttacctttgacgaggagttgcgccctttgcctgtgtccgtacgggtgggccaggccgtggacgtagtgggccaggctggtaaacccaaaaccattactggctttcagacacacactacgccggttcttttagcccacggtgaaagagccgagctggccaccgaagagttcctgcccgtgacacccattctggaggggttcgtgatcctccgcaagaatccaaactatgatctgtag

SEQ ID NO: 132267 - DNA, 3449 bp, Artificial Sequence
  derived and/or modified sequence
caacaacaacaacaaaaccaaatgaggttaatattccacagtggtgtggggctagacacagttacacagactttatacaggcggcaatcaagcgtcctggacgtcaagaaatctagtttgtctgtcgcgccacgcagtcaactggagtgtcactgtgggttctatttacaccgttatgagaaaaacctgtggcggagtaaaactcggtaactccgctcgcagaccgcccatctacagcagtgagcgaacccaaaccccacacggccaagtcccgcgggtttcaggaaactccgaagaggtcgggggccaggggcgactatggcgcgggggaggctgggaattgtagtctccacctgcctccgagggcggggtccgagggcggggctctcaggccgagggggtgggtgggtcgccgagcgccccggctcgccccggcgtttccggtcgcaggcgggctctggaggaggaggggcgccgcgaccgacgcgcgcgagttggtctgggaaaaagggcggtgcgagcgggtgcgcgcgcagcgggccggcagtggcggcggagatggaggagggaggccgggacaaggcgccggtgcagccccagcagtctccagcggcggcccccggcggcacggacgagaagccgagcggcaaggagcggcgggatgccggggacaaggacaaagaacaggagctgtctgaagaggataaacagcttcaagatgaactggagatgctcgtggaacgactaggggagaaggatacatccctgtatcgaccagcgctggaggaattgcgaaggcagattcgttcttctacaacttccatgacttcagtgcccaagcctctcaaatttctgcgtccacactatggcaaactgaaggaaatctatgagaacatggcccctggggagaataagcgttttgctgctgacatcatctccgttttggccatgaccatgagtggggagcgtgagtgcctcaagtatcggctagtgggctcccaggaggaattggcatcatggggtcatgagtatgtcaggcatctggcaggagaagtggctaaggagtggcaggagctggatgacgcagagaaggtccagcgggagcctctgctcactctggtgaaggaaatcgtcccctataacatggcccacaatgcagagcatgaggcttgcgacctgcttatggaaattgagcaggtggacatgctggagaaggacattgatgaaaatgcatatgcaaaggtctgcctttatctcaccagttgtgtgaattacgtgcctgagcctgagaactcagccctactgcgttgtgccctgggtgtgttccgaaagtttagccgcttccctgaagctctgagattggcattgatgctcaatgacatggagttggtagaagacatcttcacctcctgcaaggatgtggtagtacagaaacagatggcattcatgctaggccggcatggggtgttcctggagctgagtgaagatgtcgaggagtatgaggacctgacagagatcatgtccaatgtacagctcaacagcaacttcttggccttagctcgggagctggacatcatggagcccaaggtgcctgatgacatctacaaaacccacctagagaacaacaggtttgggggcagtggctctcaggtggactctgcccgcatgaacctggcctcctcttttgtgaatggctttgtgaatgcagcttttggccaagacaagctgctaacagatgatggcaacaaatggctttacaagaacaaggaccacggaatgttgagtgcagctgcatctcttgggatgattctgctgtgggatgtggatggtggcctcacccagattgacaagtacctgtactcctctgaggactacattaagtcaggagctcttcttgcctgtggcatagtgaactctggggtccggaatgagtgtgaccctgctctggcactgctctcagactatgttctccacaacagcaacaccatgagacttggttccatctttgggctaggcttggcttatgctggctcaaatcgtgaagatgtcctaacactgctgctgcctgtgatgggagattcaaagtccagcatggaggtggcaggtgtcacagctttagcctgtggaatgatagcagtagggtcctgcaatggagatgtaacttccactatccttcagaccatcatggagaagtcagagactgagctcaaggatacttatgctcgttggcttcctcttggactgggtctcaaccacctggggaagggtgaggccatcgaggcaatcctggctgcactggaggttgtgtcagagccattccgcagttttgccaacacactggtggatgtgtgtgcatatgcaggctctgggaatgtgctgaaggtgcagcagctgctccacatttgtagcgaacactttgactccaaagagaaggaggaagacaaagacaagaaggaaaagaaagacaaggacaagaaggaagcccctgctgacatgggagcacatcagggagtggctgttctggggattgcccttattgctatgggggaggagattggtgcagagatggcattacgaacctttggccacttgctgagatatggggagcctacactccggagggctgtacctttagcactggccctcatctctgtttcaaatccacgactcaacatcctggataccctaagcaaattctctcatgatgctgatccagaagtttcctataactccatttttgccatgggcatggtgggcagtggtaccaataatgcccgtctggctgcaatgctgcgccagttagctcaatatcatgccaaggacccaaacaacctcttcatggtgcgcttggcacagggcctgacacatttagggaagggcacccttaccctctgcccctaccacagcgaccggcagcttatgagccaggtggccgtggctggactgctcactgtgcttgtctctttcctggatgttcgaaacattattctaggcaaatcacactatgtattgtatgggctggtggctgccatgcagccccgaatgctggttacgtttgatgaggagctgcggccattgccagtgtctgtccgtgtgggccaggcagtggatgtggtgggccaggctggcaagccgaagactatcacagggttccagacgcatacaaccccagtgttgttggcccacggggaacgggcagaattggccactgaggagtttcttcctgttacccccattctggaaggttttgttatccttcggaagaaccccaattatgatctctaagtgaccaccaggggctctgaactgcagctgatgttatcagcaggccatgcatcctgctgccaagggtggacacggctgcagacttctgggggaattgtcgcctcctgctcttttgttactgagtgagataaggttgttcaataaagacttttatccccaaggtc

SEQ ID NO: 132268 - DNA, 2877 bp, Artificial Sequence
  derived and/or modified sequence
gcagtggcggcggagatggaggagggaggccgggacaaggcgccggtgcagccccagcagtctccagcggcggcccccggcggcacggacgagaagccgagcggcaaggagcggcgggatgccggggacaaggacaaagaacaggagctgtctgaagaggataaacagcttcaagatgaactggagatgctcgtggaacgactaggggagaaggatacatccctgtatcgaccagcgctggaggaattgcgaaggcagattcgttcttctacaacttccatgacttcagtgcccaagcctctcaaatttctgcgtccacactatggcaaactgaaggaaatctatgagaacatggcccctggggagaataagcgttttgctgctgacatcatctccgttttggccatgaccatgagtggggagcgtgagtgcctcaagtatcggctagtgggctcccaggaggaattggcatcatggggtcatgagtatgtcaggcatctggcaggagaagtggctaaggagtggcaggagctggatgacgcagagaaggtccagcgggagcctctgctcactctggtgaaggaaatcgtcccctataacatggcccacaatgcagagcatgaggcttgcgacctgcttatggaaattgagcaggtggacatgctggagaaggacattgatgaaaatgcatatgcaaaggtctgcctttatctcaccagttgtgtgaattacgtgcctgagcctgagaactcagccctactgcgttgtgccctgggtgtgttccgaaagtttagccgcttccctgaagctctgagattggcattgatgctcaatgacatggagttggtagaagacatcttcacctcctgcaaggatgtggtagtacagaaacagatggcattcatgctaggccggcatggggtgttcctggagctgagtgaagatgtcgaggagtatgaggacctgacagagatcatgtccaatgtacagctcaacagcaacttcttggccttagctcgggagctggacatcatggagcccaactgatgctacaaaacccacctagagaacaacaggtttgggggcagtggctctcaggtggactctgcccgcatgaacctggcctcctcttttgtgaatggctttgtgaatgcagcttttgggacaagctgctaacagatgatggcaacaaatggctttacaagaacaaggaccacggaatgttgagtgcagctgcatctcttgggatgattctgctgtgggatgtggatggtggcctcacccagattgacaagtacctgtactcctctgaggactacattaagtcaggagctcttcttgcctgtggcatagtgaactctggggtccggaatgagtgtgaccctgctctggcactgctctcagactatgttctccacaacagcaacaccatgagacttggttccatctttgggctaggcttggcttatgctggctcaaatcgtgaagatgtcctaacactgctgctgcctgtgatgggagattcaaagtccagcatggaggtggcaggtgtcacagctttagcctgtggaatgatagcagtagggtcctgcaatggagatgtaacttccactatccttcagaccatcatggagaagtcagagactgagctcaaggatacttatgctcgttggcttcctcttggactgggtctcaaccacctggggaagggtgaggccatcgaggcaatcctggctgcactggaggttgtgtcagagccattccgcagttttgccaacacactggtggatgtgtgtgcatatgcaggctctgggaatgtgctgaaggtgcagcagctgctccacatttgtagcgaacactttgactccaaagagaaggaggaagacaaagacaagaaggaaaagaaagacaaggacaagaaggaagcccctgctgacatgggagcacatcagggagtggctgttctggggcccttattgctatgggggaggagattggtgcagagatggcattacgaaccttatcatcagctgagatatggggagcctacactccggagggctgtacctttagcactggccctcatctctgtttcaaatccacgactcaacatcctggataccctaagcaaattctctcatgatgctgatccagaagtttcctataactccatttttgccatgggcatggtgggcagtggtaccaataatgcccgtctggctgcaatgctgcgccagttagctcaatatcatgccaaggacccaaacaacctcttcatggtgcgcttggcacagggcctgacacatttagggaagggcacccttaccctctgcccctaccacagcgaccggcagcttatgagccaggtggccgtggctggactgctcactgtgcttgtctctttcctggatgttcgaaacattattctaggcaaatcacactatgtattgtatgggctggtggctgccatgcagccccgaatgctggttacgtttgatgaggagctgcggccattgccagtgtctgtccgtgtgggccaggcagtggatgtggtgggccaggctggcaagccgaagactatcacagggttccagacgcatacaaccccagtgttgttggcccacggggaacgggcagaattggccactgaggagtttcttcctgttacccccattctggaaggttttgttttcggaagaaccccaattatgatctctaagtgaccaccaggggctctgaactgcagctgatgttatcagcaggccatgcatcctgctgccaagggtggacacggctgcagacttctgggggaattgtcgcctcctgctcttttgttactgagtgagataaggttgttcaataaagacttttatcccc

SEQ ID NO: 132269 - DNA, 2861 bp, Artificial Sequence
  derived and/or modified sequence
atggaggagggaggccgggacaaggcgccggtgcagccccagcagtctccagcggcggcccccggcggcacggacgagaagccgagcggcaaggacaaagaacaggagctgtctgaagaggataaacagcttcaagatgaactggagatgctcgtggaacgactaggggagaaggatacatccctgtatcgaccagcgctggaggaattgcgaaggcagattcgttcttctacaacttccatgacttcagtgcccaagcctctcaaatttctgcgtccacactatggcaaactgaaggaaatctatgagaacatggcccctggggagaataagcgttttgctgctgacatcatctccgttttggccatgaccatgagtggggagcgtgagtgcctcaagtatcggctagtgggctcccaggaggaattggcatcatggggtcatgagtatgtcaggcatctggcaggagaagtggctaaggagtggcaggagctggatgacgcagagaaggtccagcgggagcctctgctcactctggtgaaggaaatcgtcccctataacatggcccacaatgcagagcatgaggcttgcgacctgcttatggaaattgagcaggtggacatgctggagaaggacattgatgaaaatgcatatgcaaaggtctgcctttatctcaccagttgtgtgaattacgtgcctgagcctgagaactcagccctactgcgttgtgccctgggtgtgttccgaaagtttagccgcttccctgaagctctgagattggcattgatgctcaatgacatggagttggtagaagacatcttcacctcctgcaaggatgtggtagtacagaaacagatggcattcatgctaggccggcatggggtgttcctggagctgagtgaagatgtcgaggagtatgaggacctgacagagatcatgtccaatgtacagctcaacagcaacttcttggccttagctcgggagctggacatcatggagcccaaggtgcctgatgacatctacaaaacccacctagagaacaacaggtttgggggcagtggctctcaggtggactctgcccgcatgaacctggcctcctcttttgtgaatggctttgtgaatgcagcttttggccaagacaagctgctaacagatgatggcaacaaatggctttacaagaacaaggaccacggaatgttgagtgcagctgcatctcttgggatgattctgctgtgggatgtggatggtggcctcacccagattgacaagtacctgtactcctctgaggactacattaagtcaggagctcttcttgcctgtggcatagtgaactctggggtccggaatgagtgtgaccctgctctggcactgctctcagactatgttctccacaacagcaacaccatgagacttggttccatctttgggctaggcttggcttatgctggctcaaatcgtgaagatgtcctaacactgctgctgcctgtgatgggagattcaaagtccagcatggaggtggcaggtgtcacagctttagcctgtggaatgatagcagtagggtcctgcaatggagatgtaacttccactatccttcagaccatcatggagaagtcagagactgagctcaaggatacttatgctcgttggcttcctcttggactgggtctcaaccacctggggaagggtgaggccatcgaggcaatcctggctgcactggaggttgtgtcagagccattccgcagttttgccaacacactggtggatgtgtgtgcatatgcaggctctgggaatgtgctgaaggtgcagcagctgctccacatttgtagcgaacactttgactccaaagagaaggaggaagacaaagacaagaaggaaaagaaagacaaggacaagaaggaagcccctgctgacatgggagcacatcagggagtggctgttctggggattgcccttattgctatgggggaggagattggtgcagagatggcattacgaacctttggccacttgctgagatatggggagcctacactccggagggctgtacctttagcactggccctcatctctgtttcaaatccacgactcaacatcctggataccctaagcaaattctctcatgatgctgatccagaagtttcctataactccatttttgccatgggcatggtgggcagtggtaccaataatgcccgtctggctgcaatgctgcgccagttagctcaatatcatgccaaggacccaaacaacctcttcatggtgcgcttggcacagggcctgacacatttagggaagggcacccttaccctctgcccctaccacagcgaccggcagcttatgagccaggtggccgtggctggactgctcactgtgcttgtctctttcctggatgttcgaaacattattctaggcaaatcacactatgtattgtatgggctggtggctgccatgcagccccgaatgctggttacgtttgatgaggagctgcggccattgccagtgtctgtccgtgtgggccaggcagtggatgtggtgggccaggctggcaagccgaagactatcacagggttccagacgcatacaaccccagtgttgttggcccacggggaacgggcagaattggccactgaggagtttcttcctgttacccccattctggaaggttttgttatccttcggaagaaccccaattatgatctctaagtgaccaccaggggctctgaactgcagctgatgttatcagcaggccatgcatcctgctgccaagggtggacacggctgcagacttctgggggaattgtcgcctcctgctcttttgttactgagtgagataaggttgttcaataaagacttttatcccc

SEQ ID NO: 132270 - DNA, 2727 bp, Artificial Sequence
  derived and/or modified sequence
atggaggagggcggcagagacaaggcccccgtgcagccccagcagagccccgccgccgcccccggcggcaccgacgagaagcccagcggcaaggagagaagagacgccggcgacaaggacaaggagcaggagctgagcgaggaggacaagcagctgcaggacgagctggagatgctggtggagagactgggcgagaaggacaccagcctgtacagacccgccctggaggagctgagaagacagatcagaagcagcaccaccagcatgaccagcgtgcccaagcccctgaagttcctgagaccccactacggcaagctgaaggagatctacgagaacatggcccccggcgagaacaagagattcgccgccgacatcatcagcgtgctggccatgaccatgagcggcgagagagagtgcctgaagtacagactggtgggcagccaggaggagctggccagctggggccacgagtacgtgagacacctggccggcgaggtggccaaggagtggcaggagctggacgacgccgagaaggtgcagagagagcccctgctgaccctggtgaaggagatcgtgccctacaacatggcccacaacgccgagcacgaggcctgcgacctgctgatggagatcgagcaggtggacatgctggagaaggacatcgacgagaacgcctacgccaaggtgtgcctgtacctgaccagctgcgtgaactacgtgcccgagcccgagaacagcgccctgctgagatgcgccctgggcgtgttcagaaagttcagcagattccccgaggccctgagactggccctgatgctgaacgacatggagctggtggaggacatcttcaccagctgcaaggacgtggtggtgcagaagcagatggccttcatgctgggcagacacggcgtgttcctggagctgagcgaggacgtggaggagtacgaggacctgaccgagatcatgagcaacgtgcagctgaacagcaacttcctggccctggccagagagctggacatcatggagcccaaggtgcccgacgacatctacaagacccacctggagaacaacagattcggcggcagcggcagccaggtggacagcgccagaatgaacctggccagcagcttcgtgaacggcttcgtgaacgccgccttcggccaggacaagctgctgaccgacgacggcaacaagtggctgtacaagaacaaggaccacggcatgctgagcgccgccgccagcctgggcatgatcctgctgtgggacgtggacggcggcctgacccagatcgacaagtacctgtacagcagcgaggactacatcaagagcggcgccctgctggcctgcggcatcgtgaacagcggcgtgagaaacgagtgcgaccccgccctggccctgctgagcgactacgtgctgcacaacagcaacaccatgagactgggcagcatcttcggcctgggcctggcctacgccggcagcaacagagaggacgtgctgaccctgctgctgcccgtgatgggcgacagcaagagcagcatggaggtggccggcgtgaccgccctggcctgcggcatgatcgccgtgggcagctgcaacggcgacgtgaccagcaccatcctgcagaccatcatggagaagagcgagaccgagctgaaggacacctacgccagatggctgcccctgggcctgggcctgaaccacctgggcaagggcgaggccatcgaggccatcctggccgccctggaggtggtgagcgagcccttcagaagcttcgccaacaccctggtggacgtgtgcgcctacgccggcagcggcaacgtgctgaaggtgcagcagctgctgcacatctgcagcgagcacttcgacagcaaggagaaggaggaggacaaggacaagaaggagaagaaggacaaggacaagaaggaggcccccgccgacatgggcgcccaccagggcgtggccgtgctgggcatcgccctgatcgccatgggcgaggagatcggcgccgagatggccctgagaaccttcggccacctgctgagatacggcgagcccaccctgagaagagccgtgcccctggccctggccctgatcagcgtgagcaaccccagactgaacatcctggacaccctgagcaagttcagccacgacgccgaccccgaggtgagctacaacagcatcttcgccatgggcatggtgggcagcggcaccaacaacgccagactggccgccatgctgagacagctggcccagtaccacgccaaggaccccaacaacctgttcatggtgagactggcccagggcctgacccacctgggcaagggcaccctgaccctgtgcccctaccacagcgacagacagctgatgagccaggtggccgtggccggcctgctgaccgtgctggtgagcttcctggacgtgagaaacatcatcctgggcaagagccactacgtgctgtacggcctggtggccgccatgcagcccagaatgctggtgaccttcgacgaggagctgagacccctgcccgtgagcgtgagagtgggccaggccgtggacgtggtgggccaggccggcaagcccaagaccatcaccggcttccagacccacaccacccccgtgctgctggcccacggcgagagagccgagctggccaccgaggagttcctgcccgtgacccccatcctggagggcttcgtgatcctgagaaagaaccccaactacgacctgtag

SEQ ID NO: 132271 - DNA, 2703 bp, Artificial Sequence
  derived and/or modified sequence
atggaggagggcggcagagacaaggcccccgtgcagccccagcagagccccgccgccgcccccggcggcaccgacgagaagcccagcggcaaggacaaggagcaggagctgagcgaggaggacaagcagctgcaggacgagctggagatgctggtggagagactgggcgagaaggacaccagcctgtacagacccgccctggaggagctgagaagacagatcagaagcagcaccaccagcatgaccagcgtgcccaagcccctgaagttcctgagaccccactacggcaagctgaaggagatctacgagaacatggcccccggcgagaacaagagattcgccgccgacatcatcagcgtgctggccatgaccatgagcggcgagagagagtgcctgaagtacagactggtgggcagccaggaggagctggccagctggggccacgagtacgtgagacacctggccggcgaggtggccaaggagtggcaggagctggacgacgccgagaaggtgcagagagagcccctgctgaccctggtgaaggagatcgtgccctacaacatggcccacaacgccgagcacgaggcctgcgacctgctgatggagatcgagcaggtggacatgctggagaaggacatcgacgagaacgcctacgccaaggtgtgcctgtacctgaccagctgcgtgaactacgtgcccgagcccgagaacagcgccctgctgagatgcgccctgggcgtgttcagaaagttcagcagattccccgaggccctgagactggccctgatgctgaacgacatggagctggtggaggacatcttcaccagctgcaaggacgtggtggtgcagaagcagatggccttcatgctgggcagacacggcgtgttcctggagctgagcgaggacgtggaggagtacgaggacctgaccgagatcatgagcaacgtgcagctgaacagcaacttcctggccctggccagagagctggacatcatggagcccaaggtgcccgacgacatctacaagacccacctggagaacaacagattcggcggcagcggcagccaggtggacagcgccagaatgaacctggccagcagcttcgtgaacggcttcgtgaacgccgccttcggccaggacaagctgctgaccgacgacggcaacaagtggctgtacaagaacaaggaccacggcatgctgagcgccgccgccagcctgggcatgatcctgctgtgggacgtggacggcggcctgacccagatcgacaagtacctgtacagcagcgaggactacatcaagagcggcgccctgctggcctgcggcatcgtgaacagcggcgtgagaaacgagtgcgaccccgccctggccctgctgagcgactacgtgctgcacaacagcaacaccatgagactgggcagcatcttcggcctgggcctggcctacgccggcagcaacagagaggacgtgctgaccctgctgctgcccgtgatgggcgacagcaagagcagcatggaggtggccggcgtgaccgccctggcctgcggcatgatcgccgtgggcagctgcaacggcgacgtgaccagcaccatcctgcagaccatcatggagaagagcgagaccgagctgaaggacacctacgccagatggctgcccctgggcctgggcctgaaccacctgggcaagggcgaggccatcgaggccatcctggccgccctggaggtggtgagcgagcccttcagaagcttcgccaacaccctggtggacgtgtgcgcctacgccggcagcggcaacgtgctgaaggtgcagcagctgctgcacatctgcagcgagcacttcgacagcaaggagaaggaggaggacaaggacaagaaggagaagaaggacaaggacaagaaggaggcccccgccgacatgggcgcccaccagggcgtggccgtgctgggcatcgccctgatcgccatgggcgaggagatcggcgccgagatggccctgagaaccttcggccacctgctgagatacggcgagcccaccctgagaagagccgtgcccctggccctggccctgatcagcgtgagcaaccccagactgaacatcctggacaccctgagcaagttcagccacgacgccgaccccgaggtgagctacaacagcatcttcgccatgggcatggtgggcagcggcaccaacaacgccagactggccgccatgctgagacagctggcccagtaccacgccaaggaccccaacaacctgttcatggtgagactggcccagggcctgacccacctgggcaagggcaccctgaccctgtgcccctaccacagcgacagacagctgatgagccaggtggccgtggccggcctgctgaccgtgctggtgagcttcctggacgtgagaaacatcatcctgggcaagagccactacgtgctgtacggcctggtggccgccatgcagcccagaatgctggtgaccttcgacgaggagctgagacccctgcccgtgagcgtgagagtgggccaggccgtggacgtggtgggccaggccggcaagcccaagaccatcaccggcttccagacccacaccacccccgtgctgctggcccacggcgagagagccgagctggccaccgaggagttcctgcccgtgacccccatcctggagggcttcgtgatcctgagaaagaaccccaactacgacctgtag

SEQ ID NO: 132272 - protein, 534 aa, Artificial Sequence
  derived and/or modified sequence
MKQEGSARRRGADKAKPPPGGGEQEPPPPPAPQDVEMKEEAATGGGSTGEADGKTAAAAAEHSQRELDTVTLEDIKEHVKQLEKAVSGKEPRFVLRALRMLPSTSRRLNHYVLYKAVQGFFTSNNATRDFLLPFLEEPMDTEADLQFRPRTGKAASTPLLPEVEAYLQLLVVIFMMNSKRYKEAQKISDDLMQKISTQNRRALDLVAAKCYYYHARVYEFLDKLDVVRSFLHARLRTATLRHDADGQATLLNLLLRNYLHYSLYDQAEKLVSKSVFPEQANNNEWARYLYYTGRIKAIQLEYSEARRTMTNALRKAPQHTAVGFKQTVHKLLIVVELLLGEIPDRLQFRQPSLKRSLMPYFLLTQAVRTGNLAKFNQVLDQFGEKFQADGTYTLIIRLRHNVIKTGVRMISLSYSRISLADIAQKLQLDSPEDAEFIVAKAIRDGVIEASINHEKGYVQSKEMIDIYSTREPQLAFHQRISFCLDIHNMSVKAMRFPPKSYNKDLESAEERREREQQDLEFAKEMAEDDDDSFP

SEQ ID NO: 132273 - protein, 521 aa, Artificial Sequence
  derived and/or modified sequence
MKQEGSARRRGADKAKPPPEDVEMKEEAATGGGSTGEADGKTAAAAAEHSQRELDTVTLEDIKEHVKQLEKAVSGKEPRFVLRALRMLPSTSRRLNHYVLYKAVQGFFTSNNATRDFLLPFLEEPMDTEADLQFRPRTGKAASTPLLPEVEAYLQLLVVIFMMNSKRYKEAQKISDDLMQKISTQNRRALDLVAAKCYYYHARVYEFLDKLDVVRSFLHARLRTATLRHDADGQATLLNLLLRNYLHYSLYDQAEKLVSKSVFPEQANNNEWARYLYYTGRIKAIQLEYSEARRTMTNALRKAPQHTAVGFKQTVHKLLIVVELLLGEIPDRLQFRQPSLKRSLMPYFLLTQAVRTGNLAKFNQVLDQFGEKFQADGTYTLIIRLRHNVIKTGVRMISLSYSRISLADIAQKLQLDSPEDAEFIVAKAIRDGVIEASINHEKGYVQSKEMIDIYSTREPQLAFHQRISFCLDIHNMSVKAMRFPPKSYNKDLESAEERREREQQDLEFAKEMAEDDDDSFP

SEQ ID NO: 132274 - protein, 115 aa, Artificial Sequence
  derived and/or modified sequence
LTSPRSCSWIAPKMQSSLLAQAIRDGVIEASINHEKGYVQSKEMIDIYSTREPQLAFHQRISFCLDIHNMSVKAMRFPPKSYNKDLESAEERREREQQDLEFAKEMAEDDDDSFP

SEQ ID NO: 132275 - protein, 356 aa, Artificial Sequence
  derived and/or modified sequence
MDTEADLQFRPRTGKAASTPLLPEVEAYLQLLVVIFMMNSKRYKEAQKISDDLMQKISTQNRRALDLVAAKCYYYHARVYEFLDKLDVVRSFLHARLRTATLRHDADGQATLLNLLLRNYLHYSLYDQAEKLVSKSVFPEQANNNEWARYLYYTGRIKAIQLEYSEARRTMTNALRKAPQHTAVGFKQTVHKLLIVVELLLGEIPDRLQFRQPSLKRSLMPYFLLTQAVRTGNLAKFNQVLDQFGEKFQADGTYTLIIRLRHNVIKTGVRMISLSYSRISLADIAQKLQLDSPEDAEFIVAKAIRDGVIEASINHEKGYVQSKEMIDIYSTREPQLAFHQRISFCLDIHNMSVKGW

SEQ ID NO: 132276 - DNA, 1605 bp, Artificial Sequence
  derived and/or modified sequence
atgaaacaggagggtagcgctcgaaggagaggcgccgacaaggcaaaacctcccccgggagggggggagcaggagccacctcctccacccgccccgcaagacgtcgaaatgaaagaagaagccgcaactgggggtggttccacaggagaggccgacggaaaaacggctgcagccgcagccgaacattcccagcgggagcttgataccgtgaccctggaggacataaaggagcacgttaaacagcttgagaaggccgtctccggtaaggaacctcgcttcgttctgagagccctaaggatgctacctagtaccagcagaaggcttaaccattacgtgctgtataaagccgtccagggattctttaccagcaacaatgcaactcgcgacttcctgctccccttcctcgaggagccaatggacacggaggctgacctccagtttaggccaagaacaggcaaagccgcctctacccctctgctgcccgaagtggaagcctacctgcagctcctggtggtcatatttatgatgaatagtaagaggtacaaggaagctcaaaagatttctgatgaccttatgcagaagattagtacccagaatcgacgtgctttggaccttgtagccgctaaatgctattactaccacgcacgtgtatacgaattcttagacaagctggacgtcgtacggagcttccttcacgccaggctgcgaactgccacactgcgacacgatgcggatggccaagccactcttctgaacttgctgctgcgaaactacctgcactactcactttacgaccaagccgaaaagcttgtgagcaaaagcgtgttccccgagcaggcaaataacaacgagtgggcacggtacctgtactatactggccgcatcaaggctatccagctcgagtatagtgaggcacggaggacaatgaccaacgccctccgtaaagcaccccagcataccgctgtgggattcaaacagactgtgcacaaactactgatagttgttgagctcttattaggagagattcccgacagactgcagtttcgtcaaccaagcctgaaacgatcgctgatgccctacttccttttgactcaggcggtacgcaccggaaatctggccaaatttaaccaagtcctagaccagttcggggagaaattccaggctgatggtacctatacattgattatccgccttagacacaatgtcattaagactggggtgcgcatgatttctttaagttattccaggatcagtctggccgatatagcacagaaactgcaactcgattcacccgaggacgccgaattcatcgttgccaaagcgatcagggatggcgtaattgaggcaagtatcaatcatgagaagggctatgtgcaaagtaaagaaatgattgatatttacagcactcgcgagccccagcttgcatttcaccagcgtatctcattttgtctggatatccacaatatgtccgtcaaggcgatgaggtttccccctaaatcctataataaggacttggagagcgctgaagaacgccgcgagagagaacagcaggatctggaattcgctaaagagatggcagaggacgatgacgattctttcccctag

SEQ ID NO: 132277 - DNA, 1605 bp, Artificial Sequence
  derived and/or modified sequence
atgaagcaggagggcagcgccaggagaagaggagctgacaaggccaagcccccacctgggggcggggagcaggagcccccacctcctccagccccccaggatgtggagatgaaggaggaggccgccactggaggcggcagcactggagaggctgatggcaagacagctgctgctgctgctgagcacagccagcgggagctggacacagtgaccctggaggacatcaaggagcacgtgaagcagctggagaaggctgtgtctgggaaggagcccaggtttgtgctgcgggccctgaggatgctgcccagcaccagccggcggctgaaccactacgtgctgtacaaggctgtgcagggcttcttcaccagcaacaatgccacccgggacttcctgctgcccttcctggaggagcccatggacacagaagctgacctgcagttccggcccaggacaggcaaggccgccagcacccccctgctgcctgaggtggaggcctacctgcagctgctggtggtgatcttcatgatgaacagcaagcgctacaaggaggcccagaagatcagtgatgacctgatgcagaagatcagcacccagaacagaagagccctggacctggtggccgccaagtgctactactaccacgcccgggtgtatgagttcctggacaagctggatgtggtgcgctccttcctgcacgcccggctgaggacagccaccctgcggcatgatgctgatggccaggccaccctgctgaacctgctgctgaggaactacctgcactacagcctgtatgaccaggccgagaagctggtgtccaagagcgtcttccctgagcaggccaacaacaatgagtgggcccgctacctgtactacacaggccgcatcaaggccatccagctggagtacagcgaggcccggaggaccatgaccaatgccctgaggaaggccccccagcacacagctgtgggcttcaagcagacagtgcacaagctgctgattgtggtggagctgctgctgggggagatcccagaccggctgcagttccggcagcccagcctgaagaggagcctgatgccctacttcctgctgacccaggccgtgaggactggaaacctggccaagttcaaccaggtgctggaccagtttggagagaagttccaggctgatggcacctacaccctcatcatccggctgcggcacaacgtcatcaagacaggagtgaggatgatcagcctgagctacagccgcatcagcctggccgacatcgcccagaagctgcagctggacagcccagaagatgctgagttcatcgtggccaaggccatcagagatggagtgattgaggccagcatcaaccacgagaagggctacgtgcagagcaaggagatgattgacatctacagcacccgggagccccagctggccttccaccagaggatctccttctgcctggacatccacaacatgtctgtgaaggccatgagatttcctcccaagagctacaacaaggacctggagagcgctgaggagcggcgggagcgggagcagcaggacctggagtttgccaaggagatggctgaagatgatgatgacagcttcccctag

SEQ ID NO: 132278 - DNA, 1605 bp, Artificial Sequence
  derived and/or modified sequence
atgaagcaggagggcagcgcccggcggcggggcgccgacaaggccaaacccccacctggcggcggagaacaggagcctcctcccccaccagccccccaggatgtcgagatgaaggaagaagcagccacaggtggggggagcactggagaggcagacggtaaaacagccgcggctgccgccgagcactctcagagagagttggatacggtgacactcgaagatatcaaagaacatgttaagcaactcgagaaagctgtaagcggcaaggaacctcgtttcgtcctgcgggccttacggatgttgccctctacctcacggagattaaaccactacgtcctgtacaaggctgtccaaggcttcttcacctcgaacaacgctacacgggacttcctgctgccgtttttggaggagcccatggacacggaggctgatttacagttccgtccccgaaccggaaaggccgcctctactcccctgttacctgaagtggaggcatacttgcaacttctcgtggtgattttcatgatgaattctaagagatataaagaagcccagaaaatctctgatgatcttatgcagaaaatctcaactcagaataggcgagcgctggatctggtggctgcaaaatgctactattaccacgcgcgcgtgtacgaattcctcgataaattggacgtggtacgaagctttctgcatgctagattgcgcacagcaacccttcggcacgacgctgatggacaggctacgctgcttaacctgctcctccgtaattatctgcattactcactgtacgaccaggccgagaaattggtcagcaaatctgtgttcccggaacaggccaacaataacgaatgggcaaggtatctgtactacacaggacggatcaaggctatccaacttgagtactcggaggcgcgcagaacaatgaccaacgcacttaggaaggcgccgcagcacactgcagtcgggtttaagcagacggtgcacaagctgctgattgtggtcgaactcctcttaggtgaaatacccgaccgactgcagttcagacaaccaagtttaaagcggtcacttatgccttacttcctgcttacccaggcagtcagaactgggaacctggcaaagtttaatcaggtgctggaccaattcggtgagaaattccaggccgacggaacatatactttgataattcgactgcgccacaatgtgattaaaacgggggtgcgcatgattagtctgagctacagccggatttctcttgctgacattgcacagaagctccagcttgactccccagaagacgccgaatttatcgtcgctaaggcaatccgcgacggtgtgattgaggcatccatcaaccacgagaaaggatatgtgcagtccaaagagatgatagatatatatagtaccagagaaccccagctcgcattccaccagcgaatttcattttgtctggatatccacaacatgagtgttaaagccatgcgcttcccacccaaatcgtacaacaaggatttggaatccgctgaagaaagaagggaaagggagcagcaggacctggaatttgccaaggagatggccgaggacgacgatgatagcttcccttag

SEQ ID NO: 132279 - DNA, 1605 bp, Artificial Sequence
  derived and/or modified sequence
atgaagcaggaaggatccgctcgcagaagaggggctgacaaagccaagccacccccaggcggaggtgaacaggagccaccaccccctcccgctccccaggacgtcgaaatgaaggaggaggccgctaccggcggagggagcacaggcgaggccgatggaaaaacagctgcagccgctgccgagcattctcagagagagctcgatactgtcacactggaggatatcaaggaacatgtcaagcagctggaaaaggccgtgagcgggaaagagcctagatttgttctccgggcattgagaatgctgccctcaacttcacgacggctgaaccactatgtgctgtataaagccgtgcagggattcttcacctctaacaatgctacgcgcgatttcctgttacctttcttagaggagcctatggacactgaagccgacctgcagtttcgaccacgaacaggtaaagcagcatcaacacccctactgcccgaagtggaggcatacctgcagctcctggttgtgatttttatgatgaatagcaaaagatataaagaggcacagaagatttctgatgatctgatgcaaaaaataagcacccagaatcggcgagcgttagatctggtggcagctaagtgttactattaccatgccagggtctatgagttcctcgataagttagacgtcgtgaggtccttcctgcatgcccgtctgagaacggcgaccctccggcatgacgctgacggccaagccaccctcctgaatttgttattgaggaactaccttcattattccctatatgaccaagcagagaaactggtgtcaaaatcagttttcccagagcaagccaacaacaacgagtgggccaggtacttgtattacaccggtcggattaaagccattcagctggagtactccgaggctaggagaaccatgacgaacgcgctacgcaaggcaccacagcacaccgcagtcgggttcaaacagaccgtccacaaactgttgatcgttgtggagctactgctcggggagattcctgaccgcttgcagttccggcaacctagtctaaagaggtcactcatgccttacttcctgcttacgcaggccgtgagaacaggtaacttggcaaaatttaaccaggtgttggatcagttcggtgagaaatttcaggccgacggcacctatacgcttattatacgactcaggcataacgtgatcaagaccggggtgcggatgatctcccttagctactcccgcatcagcctggcggacattgcgcagaagcttcagttggattcaccagaggacgcagagtttatcgtggcaaaggcaatccgcgatggcgtcatagaggcttcgattaaccatgaaaagggctatgttcagtcaaaagagatgatcgacatttattcaacccgagaaccacagctggcatttcaccaaagaatcagcttttgcctggacatacacaacatgtcggtgaaagctatgcgcttccccccaaagagctataacaaggacctcgagagtgcagaggagcgcagagagagagagcagcaagacttggagtttgctaaggagatggctgaagatgacgacgactcatttccatag

SEQ ID NO: 132280 - DNA, 2158 bp, Artificial Sequence
  derived and/or modified sequence
ggcgtttcccagaaggcccagcgccgggaaggggtttgcagctgctccgtcatcgtgcggcccgacgctatctcgcgctcgtgtgcaggcccggctcggctcctggtccccggtgcgagggttaacgcgaggccccggcctcggtccccggactaggccgtgaccccgggtgccatgaagcaggagggctcggcgcggcgccgcggcgcggacaaggcgaaaccgccgcccggcggaggagaacaagaacccccaccgccgccggccccccaggatgtggagatgaaagaggaggcagcgacgggtggcgggtcgacgggggaggcagacggcaagacggcggcggcagcggctgagcactcccagcgagagctggacacagtcaccttggaggacatcaaggagcacgtgaaacagctagagaaagcggtttcaggcaaggagccgagattcgtgctgcgggccctgcggatgctgccttccacatcacgccgcctcaaccactatgttctgtataaggctgtgcagggcttcttcacttcaaataatgccactcgagactttttgctccccttcctggaagagcccatggacacagaggctgatttacagttccgtccccgcacgggaaaagctgcgtcgacacccctcctgcctgaagtggaagcctatctccaactcctcgtggtcatcttcatgatgaacagcaagcgctacaaagaggcacagaagatctctgatgatctgatgcagaagatcagtactcagaaccgccgggccctagaccttgtagccgcaaagtgttactattatcacgcccgggtctatgagttcctggacaagctggatgtggtgcgcagcttcttgcatgctcggctccggacagctacgcttcggcatgacgcagacgggcaggccaccctgttgaacctcctgctgcggaattacctacactacagcttgtacgaccaggctgagaagctggtgtccaagtctgtgttcccagagcaggccaacaacaatgagtgggccaggtacctctactacacagggcgaatcaaagccatccagctggagtactcagaggcccggagaacgatgaccaacgcccttcgcaaggcccctcagcacacagctgtcggcttcaaacagacggtgcacaagcttctcatcgtggtggagctgttgctgggggagatccctgaccggctgcagttccgccagccctccctcaagcgctcactcatgccctatttccttctgactcaagctgtcaggacaggaaacctagccaagttcaaccaggtcctggatcagtttggggagaagtttcaagcagatgggacctacaccctaattatccggctgcggcacaacgtgattaagacaggtgtacgcatgatcagcctctcctattcccgaatctccttggctgacatcgcccagaagctgcagttggatagccccgaagatgcagagttcattgttgccaaggccatccgggatggtgtcattgaggccagcatcaaccacgagaagggctatgtccaatccaaggagatgattgacatctattccacccgagagccccagctagccttccaccagcgcatctccttctgcctagatatccacaacatgtctgtcaaggccatgaggtttcctcccaaatcgtacaacaaggacttggagtctgcagaggaacggcgtgagcgagaacagcaggacttggagtttgccaaggagatggcagaagatgatgatgacagcttcccttgagctggggggctggggaggggtagggggaatggggacaggctctttcccccttgggggtcccctgcccagggcactgtccccattttcccacacacagctcatatgctgcattcgtgcagggggtgggggtgctgggagccagccaccctgacctcccccagggctcctccccagccggtgacttactgtacagcaggcaggagggtgggcaggcaacctccccgggcagggtcctggccagcagtgtgggagcaggaggggaaggatagttctgtgtactcctttagggagtgggggactagaactgggatgtcttggcttgtatgttttttgaagcttcgattatgatttttaaacaataaaaagttctccacagtgc

SEQ ID NO: 132281 - DNA, 1605 bp, Artificial Sequence
  derived and/or modified sequence
atgaagcaggagggcagcgccagaagaagaggcgccgacaaggccaagcccccccccggcggcggcgagcaggagcccccccccccccccgccccccaggacgtggagatgaaggaggaggccgccaccggcggcggcagcaccggcgaggccgacggcaagaccgccgccgccgccgccgagcacagccagagagagctggacaccgtgaccctggaggacatcaaggagcacgtgaagcagctggagaaggccgtgagcggcaaggagcccagattcgtgctgagagccctgagaatgctgcccagcaccagcagaagactgaaccactacgtgctgtacaaggccgtgcagggcttcttcaccagcaacaacgccaccagagacttcctgctgcccttcctggaggagcccatggacaccgaggccgacctgcagttcagacccagaaccggcaaggccgccagcacccccctgctgcccgaggtggaggcctacctgcagctgctggtggtgatcttcatgatgaacagcaagagatacaaggaggcccagaagatcagcgacgacctgatgcagaagatcagcacccagaacagaagagccctggacctggtggccgccaagtgctactactaccacgccagagtgtacgagttcctggacaagctggacgtggtgagaagcttcctgcacgccagactgagaaccgccaccctgagacacgacgccgacggccaggccaccctgctgaacctgctgctgagaaactacctgcactacagcctgtacgaccaggccgagaagctggtgagcaagagcgtgttccccgagcaggccaacaacaacgagtgggccagatacctgtactacaccggcagaatcaaggccatccagctggagtacagcgaggccagaagaaccatgaccaacgccctgagaaaggccccccagcacaccgccgtgggcttcaagcagaccgtgcacaagctgctgatcgtggtggagctgctgctgggcgagatccccgacagactgcagttcagacagcccagcctgaagagaagcctgatgccctacttcctgctgacccaggccgtgagaaccggcaacctggccaagttcaaccaggtgctggaccagttcggcgagaagttccaggccgacggcacctacaccctgatcatcagactgagacacaacgtgatcaagaccggcgtgagaatgatcagcctgagctacagcagaatcagcctggccgacatcgcccagaagctgcagctggacagccccgaggacgccgagttcatcgtggccaaggccatcagagacggcgtgatcgaggccagcatcaaccacgagaagggctacgtgcagagcaaggagatgatcgacatctacagcaccagagagccccagctggccttccaccagagaatcagcttctgcctggacatccacaacatgagcgtgaaggccatgagattcccccccaagagctacaacaaggacctggagagcgccgaggagagaagagagagagagcagcaggacctggagttcgccaaggagatggccgaggacgacgacgacagcttcccctag

SEQ ID NO: 132282 - DNA, 1566 bp, Artificial Sequence
  derived and/or modified sequence
atgaagcaggagggcagcgccagaagaagaggcgccgacaaggccaagcccccccccgaggacgtggagatgaaggaggaggccgccaccggcggcggcagcaccggcgaggccgacggcaagaccgccgccgccgccgccgagcacagccagagagagctggacaccgtgaccctggaggacatcaaggagcacgtgaagcagctggagaaggccgtgagcggcaaggagcccagattcgtgctgagagccctgagaatgctgcccagcaccagcagaagactgaaccactacgtgctgtacaaggccgtgcagggcttcttcaccagcaacaacgccaccagagacttcctgctgcccttcctggaggagcccatggacaccgaggccgacctgcagttcagacccagaaccggcaaggccgccagcacccccctgctgcccgaggtggaggcctacctgcagctgctggtggtgatcttcatgatgaacagcaagagatacaaggaggcccagaagatcagcgacgacctgatgcagaagatcagcacccagaacagaagagccctggacctggtggccgccaagtgctactactaccacgccagagtgtacgagttcctggacaagctggacgtggtgagaagcttcctgcacgccagactgagaaccgccaccctgagacacgacgccgacggccaggccaccctgctgaacctgctgctgagaaactacctgcactacagcctgtacgaccaggccgagaagctggtgagcaagagcgtgttccccgagcaggccaacaacaacgagtgggccagatacctgtactacaccggcagaatcaaggccatccagctggagtacagcgaggccagaagaaccatgaccaacgccctgagaaaggccccccagcacaccgccgtgggcttcaagcagaccgtgcacaagctgctgatcgtggtggagctgctgctgggcgagatccccgacagactgcagttcagacagcccagcctgaagagaagcctgatgccctacttcctgctgacccaggccgtgagaaccggcaacctggccaagttcaaccaggtgctggaccagttcggcgagaagttccaggccgacggcacctacaccctgatcatcagactgagacacaacgtgatcaagaccggcgtgagaatgatcagcctgagctacagcagaatcagcctggccgacatcgcccagaagctgcagctggacagccccgaggacgccgagttcatcgtggccaaggccatcagagacggcgtgatcgaggccagcatcaaccacgagaagggctacgtgcagagcaaggagatgatcgacatctacagcaccagagagccccagctggccttccaccagagaatcagcttctgcctggacatccacaacatgagcgtgaaggccatgagattcccccccaagagctacaacaaggacctggagagcgccgaggagagaagagagagagagcagcaggacctggagttcgccaaggagatggccgaggacgacgacgacagcttcccctag

SEQ ID NO: 132283 - DNA, 348 bp, Artificial Sequence
  derived and/or modified sequence
ctgaccagccccagaagctgcagctggatcgcccccaagatgcagagcagcctgctggcccaggccatcagagacggcgtgatcgaggccagcatcaaccacgagaagggctacgtgcagagcaaggagatgatcgacatctacagcaccagagagccccagctggccttccaccagagaatcagcttctgcctggacatccacaacatgagcgtgaaggccatgagattcccccccaagagctacaacaaggacctggagagcgccgaggagagaagagagagagagcagcaggacctggagttcgccaaggagatggccgaggacgacgacgacagcttcccctag

SEQ ID NO: 132284 - DNA, 1071 bp, Artificial Sequence
  derived and/or modified sequence
atggacaccgaggccgacctgcagttcagacccagaaccggcaaggccgccagcacccccctgctgcccgaggtggaggcctacctgcagctgctggtggtgatcttcatgatgaacagcaagagatacaaggaggcccagaagatcagcgacgacctgatgcagaagatcagcacccagaacagaagagccctggacctggtggccgccaagtgctactactaccacgccagagtgtacgagttcctggacaagctggacgtggtgagaagcttcctgcacgccagactgagaaccgccaccctgagacacgacgccgacggccaggccaccctgctgaacctgctgctgagaaactacctgcactacagcctgtacgaccaggccgagaagctggtgagcaagagcgtgttccccgagcaggccaacaacaacgagtgggccagatacctgtactacaccggcagaatcaaggccatccagctggagtacagcgaggccagaagaaccatgaccaacgccctgagaaaggccccccagcacaccgccgtgggcttcaagcagaccgtgcacaagctgctgatcgtggtggagctgctgctgggcgagatccccgacagactgcagttcagacagcccagcctgaagagaagcctgatgccctacttcctgctgacccaggccgtgagaaccggcaacctggccaagttcaaccaggtgctggaccagttcggcgagaagttccaggccgacggcacctacaccctgatcatcagactgagacacaacgtgatcaagaccggcgtgagaatgatcagcctgagctacagcagaatcagcctggccgacatcgcccagaagctgcagctggacagccccgaggacgccgagttcatcgtggccaaggccatcagagacggcgtgatcgaggccagcatcaaccacgagaagggctacgtgcagagcaaggagatgatcgacatctacagcaccagagagccccagctggccttccaccagagaatcagcttctgcctggacatccacaacatgagcgtgaagggctggtag

SEQ ID NO: 132285 - DNA, 1566 bp, Artificial Sequence
  derived and/or modified sequence
atgaaacaggaggggagtgcccggcgtaggggtgctgataaggcaaaaccacctcccgaagacgtggaaatgaaggaagaggctgcaacggggggaggctctaccggtgaagccgacgggaaaacagcagccgcagcggccgagcatagccagcgcgagctggatacagtaacgttggaggacatcaaagaacatgtgaaacagctggagaaagctgtatccgggaaagagccgcgctttgtattgagagccctgcggatgctgccctccacaagtcgtagactcaaccactatgtgctgtataaagcagtccaggggttcttcacctccaataacgcgacaagagacttcctgctgcctttcttagaagaaccaatggataccgaggccgacctccaatttaggccgagaaccgggaaagctgcctctaccccactgcttccagaggtcgaggcctacctgcagttattagtcgtgatattcatgatgaattcaaaacgttataaggaagcccagaaaatttccgatgatctgatgcagaagattagcacacagaatcggcgggccctcgatctcgtggctgctaagtgctattactaccacgcgcgcgtgtacgagtttctagacaaactggacgtggtgcgaagttttctgcatgctcggctgcgtactgctacgctgcgtcacgatgcagatggtcaggccacattgcttaacctgttactacggaattacttgcattactccctctacgaccaagccgagaagcttgtgagcaagtccgtctttcctgaacaggccaacaataatgagtgggcaagatatctgtactacacaggccgcattaaggctattcaactggagtatagcgaggcccggaggacaatgacaaacgccctgcggaaggccccccaacacacagccgtggggttcaaacagacagtacacaagctgttgatagttgtcgaattgttgctgggtgagattcccgacagacttcaattcaggcaaccctccctgaagaggagcctgatgccctattttcttctgacccaggcggtcagaactgggaatctggctaaattcaaccaggtgctggatcagtttggggagaagttccaggccgatggtacttacaccctgattatccgccttcgccataatgtgatcaaaaccggggtccgcatgattagcctgagttatagtcggatatctctggccgatattgctcagaagctccaactggattctccagaagatgctgaatttattgtcgctaaggccatccgtgacggcgttattgaggctagcattaaccacgaaaaaggatatgtccagtccaaagagatgatcgatatctacagtactagagagccgcaacttgcttttcaccaacgcatctcgttttgtctcgatatacacaacatgtccgtgaaggccatgaggtttcccccgaaaagctataataaagacttggaatccgctgaagagcgcagagaaagagaacagcaggacctcgagttcgccaaggagatggcagaggatgatgacgatagttttccttag

SEQ ID NO: 132286 - DNA, 348 bp, Artificial Sequence
  derived and/or modified sequence
cttaccagccccaggtcttgcagttggatcgctcccaagatgcaaagcagcttgttagcacaggcgatcagggacggagtgattgaggctagtattaatcatgagaagggatacgtacagtctaaggagatgattgacatctatagtacacgggaaccccaattggccttccatcagcgaatctctttctgtctggatatccataatatgagtgtgaaggctatgcggtttccgccaaaatcatacaacaaggatctggaatctgctgaggaacggcgggagagggagcagcaagacctggaattcgctaaggaaatggccgaagacgatgacgacagctttccctag

SEQ ID NO: 132287 - DNA, 1071 bp, Artificial Sequence
  derived and/or modified sequence
atggacaccgaagccgatctgcagtttcgtccgcggaccggcaaggcggcttccacccccctcttacctgaggtagaagcctacctgcagctcctcgtggttatattcatgatgaatagtaaacggtataaggaagctcagaagatctctgatgatctcatgcaaaagatcagcactcaaaatcggcgagcccttgacctggttgcagccaagtgctactactaccacgctcgagtgtacgagtttctggacaaacttgacgtcgtgcgctcctttctccatgcacgcctccggaccgccactctgcgccacgacgctgacggacaggctacactgctcaatctactgctcagaaattacctccactacagcctatatgatcaggctgagaaactggtctctaagtccgtctttccagaacaggctaacaataatgagtgggcaaggtatctttattacacaggacgtatcaaggctatacagcttgaatatagcgaggcccgcaggacaatgaccaatgctttgagaaaagcaccacagcatactgccgttggctttaaacagacagtccacaagctcttgatcgtggtagaactgctgcttggggagattccagaccgacttcagttcagacaaccaagcttaaaacggagtcttatgccgtatttcctgctaacacaggcagtacggaccggaaatttggccaagttcaatcaggtactggaccagttcggcgagaagttccaggctgacggcacatacaccctgattatcaggctgagacacaacgtgataaaaaccggagtcagaatgattagtttatcctattcccgcatcagcctggcagacatagcgcagaagttacagcttgacagtcctgaggatgcagagtttatagttgctaaggcgatcagagacggggtgattgaggccagtataaaccacgagaagggctacgtgcagtctaaggagatgatcgacatttattctacaagagagccacagctggcttttcaccagcggatatccttctgtctagatattcacaatatgtctgtcaaagggtggtag

SEQ ID NO: 132288 - DNA, 1566 bp, Artificial Sequence
  derived and/or modified sequence
atgaagcaggagggcagcgccaggagaagaggagctgacaaggccaagcccccaccagaagatgtggagatgaaggaggaggccgccaccggcggcggcagcactggagaggctgatggcaagacagctgctgctgctgctgagcacagccagcgggagctggacacagtgaccctggaggacatcaaggagcacgtgaagcagctggagaaggctgtgtctgggaaggagcccaggtttgtgctgcgggccctgaggatgctgcccagcaccagccggcggctgaaccactacgtgctgtacaaggctgtgcagggcttcttcaccagcaacaatgccacccgggacttcctgctgcccttcctggaggagcccatggacacagaggccgacctgcagttccggcccaggacaggcaaggccgccagcacccccctgctgcctgaggtggaggcctacctgcagctgctggtggtgatcttcatgatgaacagcaagcgctacaaggaggcccagaagatcagtgatgacctgatgcagaagatcagcacccagaacagaagagccctggacctggtggccgccaagtgctactactaccacgcccgggtgtatgagttcctggacaagctggatgtggtgcgctccttcctgcacgcccggctgaggacagccaccctgcggcatgatgctgatggccaggccaccctgctgaacctgctgctgaggaactacctgcactacagcctgtatgaccaggccgagaagctggtgtccaagtctgtgtttcctgagcaggccaacaacaatgagtgggcccgctacctgtactacacaggccgcatcaaggccatccagctggagtacagcgaggcccggaggaccatgaccaatgccctgaggaaggccccccagcacacagctgtgggcttcaagcagacagtgcacaagctgctgattgtggtggagctgctgctgggggagatcccagaccggctgcagttccggcagcccagcctgaagaggagcctgatgccctacttcctgctgacccaggccgtgaggacaggcaacctggccaagttcaaccaggtgctggaccagtttggagagaagttccaggctgatggcacctacaccctcatcatccggctgcggcacaacgtcatcaagacaggagtgaggatgatcagcctgagctacagccgcatcagcctggccgacatcgcccagaagctgcagctggacagcccagaagatgctgagttcatcgtggccaaggccatcagagatggagtcatcgaggccagcatcaaccacgagaagggctacgtgcagagcaaggagatgattgacatctacagcacccgggagccccagctggccttccaccagaggatctccttctgcctggacatccacaacatgtctgtgaaggccatgaggttcccccccaagagctacaacaaggacctggagagcgctgaggagcggcgggagcgggagcagcaggacctggagtttgccaaggagatggccgaggatgatgatgacagcttcccctag

SEQ ID NO: 132289 - DNA, 348 bp, Artificial Sequence
  derived and/or modified sequence
ctgaccagccccaggagctgctcctggatcgcccccaagatgcagagcagcctgctggcccaggccatcagagatggagtcatcgaggccagcatcaaccacgagaagggctacgtgcagagcaaggagatgattgacatctacagcacccgggagccccagctggccttccaccagaggatctccttctgcctggacatccacaacatgtctgtgaaggccatgaggttcccccccaagagctacaacaaggacctggagagcgctgaggagcggcgggagcgggagcagcaggacctggagtttgccaaggagatggccgaggatgatgatgacagcttcccctag

SEQ ID NO: 132290 - DNA, 1071 bp, Artificial Sequence
  derived and/or modified sequence
atggacacagaagctgacctgcagttccggcccaggacaggcaaggccgccagcacccccctgctgcctgaggtggaggcctacctgcagctgctggtggtgatcttcatgatgaacagcaagcgctacaaggaggcccagaagatcagtgatgacctgatgcagaagatcagcacccagaacagaagagccctggacctggtggccgccaagtgctactactaccacgcccgggtgtatgagttcctggacaagctggatgtggtgcgctccttcctgcacgcccggctgaggacagccaccctgcggcatgatgctgatggccaggccaccctgctgaacctgctgctgaggaactacctgcactacagcctgtatgaccaggccgagaagctggtgtccaagagcgtcttccctgagcaggccaacaacaatgagtgggcccgctacctgtactacacaggccgcatcaaggccatccagctggagtacagcgaggcccggaggaccatgaccaatgccctgaggaaggccccccagcacacagctgtgggcttcaagcagacagtgcacaagctgctgattgtggtggagctgctgctgggggagatcccagaccggctgcagttccggcagcccagcctgaagaggagcctgatgccctacttcctgctgacccaggccgtgaggactggaaacctggccaagttcaaccaggtgctggaccagtttggagagaagttccaggctgatggcacctacaccctcatcatccggctgcggcacaacgtcatcaagacaggagtgaggatgatcagcctgagctacagccgcatcagcctggccgacatcgcccagaagctgcagctggacagcccagaagatgctgagttcatcgtggccaaggccatcagagatggagtgattgaggccagcatcaaccacgagaagggctacgtgcagagcaaggagatgattgacatctacagcacccgggagccccagctggccttccaccagaggatctccttctgcctggacatccacaacatgtctgtgaagggctggtag

SEQ ID NO: 132291 - DNA, 1566 bp, Artificial Sequence
  derived and/or modified sequence
atgaagcaggagggcagcgcccggcggcggggcgccgacaaggccaaaccgcccccagaggatgtggagatgaaggaagaagccgccacgggggggggctctactggggaggctgatggcaaaactgccgcagccgctgctgaacactcacagcgagagttggatactgtcaccctggaggatattaaagaacacgtgaagcaattggaaaaagctgtgtctgggaaagaaccacggtttgtactgagggcccttaggatgctgccatccacaagccggagattgaaccactatgtactgtacaaggccgtccagggcttctttacctctaacaatgcgaccagggattttctcctgcccttcctagaagagcctatggacacagaggccgacttacagttccggccacgcaccggcaaggcggccagcacaccacttctcccagaagtcgaagcatacctccagctattggtggtaatttttatgatgaactcaaaaagatacaaggaggctcagaaaatctccgacgatcttatgcaaaagatcagtacacaaaataggcgcgccctagatctggtggccgccaaatgttattactaccacgcacgagtctacgagttcctcgataaattagatgtggtacgcagctttcttcacgccagactgaggactgccacattgaggcatgacgcagatggccaggctaccctgctgaacttgctgctgcgcaattacctgcactactctctgtacgatcaggccgaaaaacttgtgtccaagagcgtgttcccagagcaggctaacaacaatgagtgggccaggtacctctattacactggaagaatcaaggctatccagctggaatactccgaagccagaagaacgatgacaaatgcgcttcggaaagccccacaacataccgcagtgggcttcaagcagactgttcataagctgttaattgtggtggaactgctgcttggcgagattcccgacaggctacaattcagacaaccctcgctgaagcgcagcctgatgccatactttctgctcacacaggctgttaggacaggcaatctggccaagttcaaccaggtcctggatcagttcggggaaaaatttcaagccgacggcacctatactctcattatccggctcagacacaatgtgatcaagaccggggtccggatgatctctttgagctatagcaggatcagtttggcagacattgcccagaaactgcagctcgattctcctgaagatgccgaattcatagttgccaaagctatacgtgacggcgtcatagaagcttccatcaatcacgaaaagggatatgttcagtctaaagagatgatagacatctacagcacaagggagccacagctggctttccaccagagaattagcttctgcctcgacatacacaacatgagcgtgaaggccatgaggttccctcctaagtcctataacaaggacttggaatctgccgaggagcgcagagaacgagaacagcaggatctcgaattcgccaaagaaatggccgaagatgatgacgattccttcccatag

SEQ ID NO: 132292 - DNA, 348 bp, Artificial Sequence
  derived and/or modified sequence
ctgaccagcccccggagctgcagctggatcgcccccaagatgcagtcttctttactggcccaggccattcgagacggagtgattgaggcgagcataaatcacgagaaaggttatgtgcagagcaaggaaatgatcgacatttactccacacgagaacctcagctcgcgtttcaccagcgcatcagtttttgcctggatatccataacatgtccgtgaaagccatgcgctttcctcctaaaagctacaacaaagatttggagagtgccgaggagaggcgagagcgcgagcaacaagaccttgaattcgctaaggagatggcagaagacgacgacgattcttttccttag

SEQ ID NO: 132293 - DNA, 1071 bp, Artificial Sequence
  derived and/or modified sequence
atggacaccgaggccgacctgcagttccggccccggaccggcaaggccgcctccacgccactgctccccgaggtggaggcttacttgcagctgttagtggtgatctttatgatgaacagtaaaaggtataaagaggctcaaaagataagcgatgatctcatgcagaagatcagcacgcagaatagaagagcactcgacttagtcgcagccaagtgttattattaccatgcacgggtctatgagttccttgacaaactggacgtggtaagatctttcttgcacgcccgattgagaaccgcaactctcagacacgatgcagacggacaggctactttgctgaacctgctattaagaaactacctccactatagcttgtacgatcaggccgagaagctagtcagcaagtctgtgtttccggagcaggcgaacaataatgaatgggcaaggtacctgtactacacagggaggattaaagctatccaactggaatattctgaggctagacgcacaatgacaaatgcgttacgaaaggcaccacagcatacagccgtggggtttaagcagaccgtgcataagttacttatcgtggttgaattactacttggcgaaattccagaccgtctgcagtttagacagccatccctgaaaagatcactcatgccatactttctgctgactcaggctgtgcgcactgggaatctggcaaagtttaaccaggtgctcgaccagttcggcgaaaagtttcaggctgacggcacatacacactgatcatcaggcttaggcacaatgttatcaagaccggggtgcgcatgatctccttaagctattccagaatatccctggcagacattgcacagaaactgcagttggattctccagaagatgctgaatttatagtggccaaggccatcagggacggggtcattgaggcaagcattaatcacgagaagggttatgtacaaagtaaggagatgatagatatctactcaacacgcgaaccccagcttgcatttcaccagcggataagcttttgtctggacattcacaatatgagcgtcaagggttggtag

SEQ ID NO: 132294 - DNA, 1566 bp, Artificial Sequence
  derived and/or modified sequence
atgaagcaggagggatccgctaggagaagaggcgctgacaaggcgaaacccccacctgaggacgttgagatgaaagaagaggctgccactggcggaggatcaaccggtgaggccgacggcaagaccgctgcagcagccgcagagcactcccagagagaactagacaccgtgactctggaggacattaaggagcacgttaagcagctagagaaagccgtgtctggcaaggaaccccgattcgtcctgagagcactacggatgttgcccagcacatctaggcgtctcaatcactacgtcttgtataaagccgtacagggattcttcacctctaataatgccacccgcgacttcctgctgccatttctggaagagccaatggacaccgaggcggacctccagttcaggccacgtaccggcaaggctgcatctacaccattactacctgaagtcgaggcttacctgcaactgctagttgtgatcttcatgatgaacagcaaacggtacaaggaagctcagaagatctcagacgacctgatgcaaaaaatatctacccagaacaggagagcactggacctcgtggcagctaagtgctactattaccacgctagggtgtacgagtttctcgataaacttgacgttgtcaggtcctttttacacgcaagactgaggacggctacgctccgccacgacgccgacggtcaggccacactgctcaacttgttgctgcgcaattaccttcactactcgctctatgatcaggccgagaagctggtgtctaagagcgtgttccctgagcaagcaaacaataatgagtgggcacgatacctctattatacaggcagaatcaaggctattcagctcgaatactcagaggctcgtagaactatgactaatgcgctgcgaaaggcaccacagcataccgccgtgggatttaaacagaccgtgcataagttgctgatcgtggtagagctcctcctgggagagatcccagaccgcctgcagttccggcagccatcccttaaacggtcccttatgccctattttctgttaactcaggccgttcggacagggaacctcgctaagtttaatcaggttctggaccagttcggggagaaatttcaggcggatggcacttacacccttatcattaggcttcgccataacgtaattaagacaggggttcgcatgattagcctgtcatactctcgcatttccctggcggacattgcgcagaaactccagctggactcaccagaggacgctgagtttattgttgccaaggctatcagggatggcgttattgaagcatctattaatcatgaaaaaggatatgtccagagtaaggaaatgatcgatatttacagtacccgcgaacctcagcttgctttccaccaaaggatcagcttttgcctggacatccataacatgagcgtcaaggccatgcgatttccccctaaatcctacaataaggacttggagagcgcagaggagcgaagggagcgagagcagcaagatctggagttcgcaaaagagatggcagaagatgacgatgacagtttcccttag

SEQ ID NO: 132295 - DNA, 348 bp, Artificial Sequence
  derived and/or modified sequence
ctgacaagtccacggagttgttcctggatagccccaaaaatgcagtcctctctccttgctcaggccattagggacggcgtgatcgaagcttctattaatcatgaaaagggttatgtccagagtaaggagatgattgacatctattcaacccgtgaaccccagctggctttccaccagagaatatcattctgtttggacattcataacatgtcggtgaaggcgatgcggttccccccaaaatcgtataacaaagatctggaatcagccgaggaacgcagagaaagagaacaacaggacctcgagtttgctaaagaaatggcagaggacgatgatgacagcttcccttag

SEQ ID NO: 132296 - DNA, 1071 bp, Artificial Sequence
  derived and/or modified sequence
atggacacagaggctgatcttcagtttcgccctcgcacggggaaggccgcatctaccccgctgttgcctgaagtggaggcctatcttcagctgctcgttgttatttttatgatgaacagtaagaggtacaaggaggcccagaaaatctccgatgatctgatgcaaaagatctccactcagaatagacgggctcttgacttggtagccgctaagtgttactactaccacgccagggtttacgaatttctcgacaaactggacgttgtgaggtcgtttctacacgccagactgcgtaccgccactttgcgccacgatgctgatgggcaagccacactcctgaaccttctgctgaggaactacttgcactactccctctacgaccaagccgagaagttagtgagtaaaagtgtcttccccgagcaagctaacaacaatgaatgggcccgttatctctactacaccgggagaattaaggcgatacaactggaatatagcgaagcacgccgaacgatgacaaacgcactgagaaaggcacctcaacacaccgccgtcggtttcaaacagacagtgcataagttgctaattgttgtggagctacttctaggggagatccctgaccgtctccagtttcgacaaccctctttgaaacgaagcctcatgccttacttcctgctcacacaggccgttagaaccgggaatttggctaaattcaatcaggtgctggatcagtttggggagaagtttcaggccgatggcacctacacattgatcataaggctgcgtcacaacgtgatcaagactggcgtaaggatgatttctctatcatactctcgtatttctctcgctgacattgctcagaaactgcagttggacagccccgaggacgccgagtttatcgtggccaaagctatcagagatggggtaatcgaagcttctatcaaccacgagaagggatacgtgcagtctaaggaaatgattgatatctacagcaccagggaaccacagctcgcattccaccagcgtatctcattctgtctggatattcacaatatgagtgtcaagggatggtag

SEQ ID NO: 132297 - DNA, 2108 bp, Artificial Sequence
  derived and/or modified sequence
agaaggcccagcgccgggaaggggtttgcagctgctccgtcatcgtgcggcccgacgctatctcgcgctcgtgtgcaggcccggctcggctcctggtccccggtgcgagggttaacgcgaggccccggcctcggtccccggactaggccgtgaccccgggtgccatgaagcaggagggctcggcgcggcgccgcggcgcggacaaggcgaaaccgccgcccgaggatgtggagatgaaagaggaggcagcgacgggtggcgggtcgacgggggaggcagacggcaagacggcggcggcagcggctgagcactcccagcgagagctggacacagtcaccttggaggacatcaaggagcacgtgaaacagctagagaaagcggtttcaggcaaggagccgagattcgtgctgcgggccctgcggatgctgccttccacatcacgccgcctcaaccactatgttctgtataaggctgtgcagggcttcttcacttcaaataatgccactcgagactttttgctccccttcctggaagagcccatggacacagaggctgatttacagttccgtccccgcacgggaaaagctgcgtcgacacccctcctgcctgaagtggaagcctatctccaactcctcgtggtcatcttcatgatgaacagcaagcgctacaaagaggcacagaagatctctgatgatctgatgcagaagatcagtactcagaaccgccgggccctagaccttgtagccgcaaagtgttactattatcacgcccgggtctatgagttcctggacaagctggatgtggtgcgcagcttcttgcatgctcggctccggacagctacgcttcggcatgacgcagacgggcaggccaccctgttgaacctcctgctgcggaattacctacactacagcttgtacgaccaggctgagaagctggtgtccaagtctgtgttcccagagcaggccaacaacaatgagtgggccaggtacctctactacacagggcgaatcaaagccatccagctggagtactcagaggcccggagaacgatgaccaacgcccttcgcaaggcccctcagcacacagctgtcggcttcaaacagacggtgcacaagcttctcatcgtggtggagctgttgctgggggagatccctgaccggctgcagttccgccagccctccctcaagcgctcactcatgccctatttccttctgactcaagctgtcaggacaggaaacctagccaagttcaaccaggtcctggatcagtttggggagaagtttcaagcagatgggacctacaccctaattatccggctgcggcacaacgtgattaagacaggtgtacgcatgatcagcctctcctattcccgaatctccttggctgacatcgcccagaagctgcagttggatagccccgaagatgcagagttcattgttgccaaggccatccgggatggtgtcattgaggccagcatcaaccacgagaagggctatgtccaatccaaggagatgattgacatctattccacccgagagccccagctagccttccaccagcgcatctccttctgcctagatatccacaacatgtctgtcaaggccatgaggtttcctcccaaatcgtacaacaaggacttggagtctgcagaggaacggcgtgagcgagaacagcaggacttggagtttgccaaggagatggcagaagatgatgatgacagcttcccttgagctggggggctggggaggggtagggggaatggggacaggctctttcccccttgggggtcccctgcccagggcactgtccccattttcccacacacagctcatatgctgcattcgtgcagggggtgggggtgctgggagccagccaccctgacctcccccagggctcctccccagccggtgacttactgtacagcaggcaggagggtgggcaggcaacctccccgggcagggtcctggccagcagtgtgggagcaggaggggaaggatagttctgtgtactcctttagggagtgggggactagaactgggatgtcttggcttgtatgttttttgaagcttcgattatgatttttaaacaataaaaagttctccacagtg

SEQ ID NO: 132298 - DNA, 886 bp, Artificial Sequence
  derived and/or modified sequence
gtcaggacaggaaacctagccaagttcaaccaggtcctggatcagtttggggagaagtttcaagcagatgggacctacaccctaattatccggctgcggcacaacgtgattaagacaggtgtacgcatgatcagcctctcctattcccgaatctccttggctgacatcgcccagaagctgcagttggatagccccgaagatgcagagttcattgttggcccaggccatccgggatggtgtcattgaggccagcatcaaccacgagaagggctatgtccaatccaaggagatgattgacatctattccacccgagagccccagctagccttccaccagcgcatctccttctgcctagatatccacaacatgtctgtcaaggccatgaggtttcctcccaaatcgtacaacaaggacttggagtctgcagaggaacggcgtgagcgagaacagcaggacttggagtttgccaaggagatggcagaagatgatgatgacagcttcccttgagctggggggctggggaggggtagggggaatggggacaggctctttcccccttgggggtcccctgcccagggcactgtccccattttcccacacacagctcatatgctgcattcgtgcagggggtgggggtgctgggagccagccaccctgacctcccccagggctcctccccagccggtgacttactgtacagcaggcaggagggtgggcaggcaacctccccgggcagggtcctggccagcagtgtgggagcaggaggggaaggatagttctgtgtactcctttagggagtgggggactagaactgggatgtcttggcttgtatgttttttgaagcttcgattatgatttttaaacaataaaaagttctccacagtg

SEQ ID NO: 132299 - DNA, 1598 bp, Artificial Sequence
  derived and/or modified sequence
agctgctccgtcatcgtgcggcccgacgctatctcgcgctcgtgtgcaggcccggctcggctcctggtccccggtgcgagggttaacgcgaggccccggcctcggtccccggactaggccgtgaccccgggtgccatgaagcaggagggctcggcgcggcgccgcggcgcggacaaggcgaaaccgccgcccggcggaggagaacaagaacccccaccgccgccggccccccaggatgtggagatgaaagaggagactttttgctccccttcctggaagagcccatggacacagaggctgatttacagttccgtccccgcacgggaaaagctgcgtcgacacccctcctgcctgaagtggaagcctatctccaactcctcgtggtcatcttcatgatgaacagcaagcgctacaaagaggcacagaagatctctgatgatctgatgcagaagatcagtactcagaaccgccgggccctagaccttgtagccgcaaagtgttactattatcacgcccgggtctatgagttcctggacaagctggatgtggtgcgcagcttcttgcatgctcggctccggacagctacgcttcggcatgacgcagacgggcaggccaccctgttgaacctcctgctgcggaattacctacactacagcttgtacgaccaggctgagaagctggtgtccaagtctgtgttcccagagcaggccaacaacaatgagtgggccaggtacctctactacacagggcgaatcaaagccatccagctggagtactcagaggcccggagaacgatgaccaacgcccttcgcaaggcccctcagcacacagctgtcggcttcaaacagacggtgcacaagcttctcatcgtggtggagctgttgctgggggagatccctgaccggctgcagttccgccagccctccctcaagcgctcactcatgccctatttccttctgactcaagctgtcaggacaggaaacctagccaagttcaaccaggtcctggatcagtttggggagaagtttcaagcagatgggacctacaccctaattatccggctgcggcacaacgtgattaagacaggtgtacgcatgatcagcctctcctattcccgaatctccttggctgacatcgcccagaagctgcagttggatagccccgaagatgcagagttcattgttgccaaggccatccgggatggtgtcattgaggccagcatcaaccacgagaagggctatgtccaatccaaggagatgattgacatctattccacccgagagccccagctagccttccaccagcgcatctccttctgcctagatatccacaacatgtctgtcaagggttggtaagattaaaagaagtccctgtattgaggcacttagcgaagtctaaattgtaaaaaagatggcgctggtatctagctccacaaaagggccatgaggtttcctcccaaatcgtacaacaaggacttggagtctgcagaggaacggcgtgagcgagaacagcaggacttggagtttgccaaggagatggcagaagatgatgatgacagcttcccttgagctggggggctggggaggggtagggggaat

SEQ ID NO: 132300 - protein, 377 aa, Artificial Sequence
  derived and/or modified sequence
MVLESTMVCVDNSEYMRNGDFLPTRLQAQQDAVNIVCHSKTRSNPENNVGLITLANDCEVLTTLTPDTGRILSKLHTVQPKGKITFCTGIRVAHLALKHRQGKNHKMRIIAFVGSPVEDNEKDLVKLAKRLKKEKVNVDIINFGEEEVNTEKLTAFVNTLNGKDGTGSHLVTVPPGPSLADALISSPILAGEGGAMLGLGASDFEFGVDPSADPELALALRVSMEEQRQRQEEEARRAAAASAAEAGIATTGTEDSDDALLKMTISQQEFGRTGLPDLSSMTEEEQIAYAMQMSLQGAEFGQAESADIDASSAMDTSEPAKEEDDYDVMQDPEFLQSVLENLPGVDPNNEAIRNAMGSLASQATKDGKKDKKEEDKK

SEQ ID NO: 132301 - DNA, 1134 bp, Artificial Sequence
  derived and/or modified sequence
atggtgctggagagcaccatggtgtgcgtggacaacagcgagtacatgagaaacggcgacttcctgcccaccagactgcaggcccagcaggacgccgtgaacatcgtgtgccacagcaagaccagaagcaaccccgagaacaacgtgggcctgatcaccctggccaacgactgcgaggtgctgaccaccctgacccccgacaccggcagaatcctgagcaagctgcacaccgtgcagcccaagggcaagatcaccttctgcaccggcatcagagtggcccacctggccctgaagcacagacagggcaagaaccacaagatgagaatcatcgccttcgtgggcagccccgtggaggacaacgagaaggacctggtgaagctggccaagagactgaagaaggagaaggtgaacgtggacatcatcaacttcggcgaggaggaggtgaacaccgagaagctgaccgccttcgtgaacaccctgaacggcaaggacggcaccggcagccacctggtgaccgtgccccccggccccagcctggccgacgccctgatcagcagccccatcctggccggcgagggcggcgccatgctgggcctgggcgccagcgacttcgagttcggcgtggaccccagcgccgaccccgagctggccctggccctgagagtgagcatggaggagcagagacagagacaggaggaggaggccagaagagccgccgccgccagcgccgccgaggccggcatcgccaccaccggcaccgaggacagcgacgacgccctgctgaagatgaccatcagccagcaggagttcggcagaaccggcctgcccgacctgagcagcatgaccgaggaggagcagatcgcctacgccatgcagatgagcctgcagggcgccgagttcggccaggccgagagcgccgacatcgacgccagcagcgccatggacaccagcgagcccgccaaggaggaggacgactacgacgtgatgcaggaccccgagttcctgcagagcgtgctggagaacctgcccggcgtggaccccaacaacgaggccatcagaaacgccatgggcagcctggccagccaggccaccaaggacggcaagaaggacaagaaggaggaggacaagaagtag

SEQ ID NO: 132302 - DNA, 612 bp, Artificial Sequence
  derived and/or modified sequence
atgagaaacggcgacttcctgcccaccagactgcaggcccagcaggacgccgtgaacatcgtgtgccacagcaagaccagaagcaaccccgagaacaacgtgggcctgatcaccctggccaacgactgcgaggtgctgaccaccctgacccccgacaccggcagaatcctgagcaagctgcacaccgtgcagcccaagggcaagatcaccttctgcaccggcatcagagtggcccacctggccctgaagcacagacagggcaagaaccacaagatgagaatcatcgccttcgtgggcagccccgtggaggacaacgagaaggacctggtgaagctggccaagagactgaagaaggagaaggtgaacgtggacatcatcaacttcggcgaggaggaggtgaacaccgagaagctgaccgccttcgtgaacaccctgaacggcaaggacggcaccggcagccacctggtgaccgtgccccccggccccagcctggccgacgccctgatcagcagccccatcctggccggcgagggcggcgccatgctgggcctgggcgccagcgacttcgagttcggcgtggaccccagcgccgaccccgagctggccctgtag

SEQ ID NO: 132303 - DNA, 1134 bp, Artificial Sequence
  derived and/or modified sequence
atggtgcttgaatcgacaatggtttgcgtcgacaactccgaatacatgaggaatggggactttttacctacccggctgcaagctcagcaggacgccgtgaatattgtgtgccactccaagacccgctccaaccctgaaaataacgtgggactcatcactctggctaatgattgcgaggtcctcaccacactgacccccgatacaggaagaattctgagcaaactgcacactgtgcagcctaaaggaaagatcactttttgcacgggcattagagtggcccatttggcactgaagcaccgacagggcaagaaccataaaatgcgtattattgcttttgtggggagtccagtggaagataatgaaaaagatctagtcaaactagctaaaagactcaagaaggagaaggttaatgtggacatcataaactttggcgaggaggaagttaacacggaaaagctcaccgcattcgtcaatactctcaacgggaaggacgggacagggagccaccttgtgacagtacctcccggcccaagtcttgctgatgcgctcattagctctcccatcctggcgggcgaaggaggcgcaatgttgggtctcggcgcctccgattttgagtttggggttgacccttctgctgacccagagctggcactagccttacgggtttccatggaagaacagcggcaacggcaggaagaagaggccaggcgcgccgccgccgcatcagccgcagaggctgggatcgccaccacaggaacagaggattcagacgatgctcttttgaagatgaccatctctcagcaggaatttggaaggacaggactgccagatctgtcttccatgactgaggaggagcaaattgcctacgcaatgcagatgagcctgcaaggtgcggagttcgggcaagcagaatccgcagatatcgatgcctcatccgcgatggatacatcagagcccgctaaagaagaagatgactatgacgtgatgcaggaccccgagtttttgcagagcgtgttggagaacctcccaggagtggaccccaacaacgaagcgattagaaacgcaatgggatcgctcgcaagtcaggccacaaaagacgggaagaaggataaaaaggaggaggataagaagtag

SEQ ID NO: 132304 - DNA, 612 bp, Artificial Sequence
  derived and/or modified sequence
atgcgcaatggtgatttcctgcccacgcggcttcaggcccagcaggatgccgtgaacatcgtgtgccactctaagacaagatccaatcctgagaacaacgtaggcttgataactttagcaaacgactgcgaggtacttacaactctgacacccgacacaggtcgcatcttaagtaaattgcacaccgtccagccgaagggcaagatcactttctgcaccgggatcagggttgcccacttggctttgaagcatcgccagggaaagaatcataagatgagaatcatcgctttcgtagggtcccccgtggaggataacgagaaagacctcgttaaactggcaaaacgcctcaagaaggaaaaggtgaatgttgatatcatcaattttggagaggaggaagtgaatacagaaaaacttactgcctttgtgaacaccttgaacgggaaggatgggaccgggtctcacctcgttaccgtgccgccagggccctctctggccgatgcattgatatcatctccaattctggccggcgaaggaggagccatgctgggcttgggcgcatccgactttgaattcggcgtagatccttctgccgaccctgaattagccctctag

SEQ ID NO: 132305 - DNA, 1350 bp, Artificial Sequence
  derived and/or modified sequence
ggtgaagagcgacgggccaattggaggagttgttgttaggccgtcccggagacccggtcgggagggaggaaggtggcaagatggtgttggaaagcactatggtgtgtgtggacaacagtgagtatatgcggaatggagacttcttacccaccaggctgcaggcccagcaggatgctgtcaacatagtttgtcattcaaagacccgcagcaaccctgagaacaacgtgggccttatcacactggctaatgactgtgaagtgctgaccacactcaccccagacactggccgtatcctgtccaagctacatactgtccaacccaagggcaagatcaccttctgcacgggcatccgcgtggcccatctggctctgaagcaccgacaaggcaagaatcacaagatgcgcatcattgcctttgtgggaagcccagtggaggacaatgagaaggatctggtgaaactggctaaacgcctcaagaaggagaaagtaaatgttgacattatcaattttggggaagaggaggtgaacacagaaaagctgacagcctttgtaaacacgttgaatggcaaagatggaaccggttctcatctggtgacagtgcctcctgggcccagtttggctgatgctctcatcagttctccgattttggctggtgaaggtggtgccatgctgggtcttggtgccagtgactttgaatttggagtagatcccagtgctgatcctgagctggccttggcccttcgtgtatctatggaagagcagcggcagcggcaggaggaggaggcccggcgggcagctgcagcttctgctgctgaggccgggattgctacgactgggactgaagactcagacgatgccctgctgaagatgaccatcagccagcaagagtttggccgcactgggcttcctgacctaagcagtatgactgaggaagagcagattgcttatgccatgcagatgtccctgcagggagcagagtttggccaggcggaatcagcagacattgatgccagctcagctatggacacatctgagccagccaaggaggaggatgattacgacgtgatgcaggaccccgagttccttcagagtgtcctagagaacctcccaggtgtggatcccaacaatgaagccattcgaaatgctatgggctccctggcctcccaggccaccaaggacggcaagaaggacaagaaggaggaagacaagaagtgagactggagggaaagggtagctgagtctgcttaggggactgcatgggaagcacggaatatagggttagatgtgtgttatctgtaaccattacagcctaaataaagcttggcaactttttttccttttttgcttcaaa

SEQ ID NO: 132306 - DNA, 1134 bp, Artificial Sequence
  derived and/or modified sequence
atggtgctggagagcaccatggtgtgtgtggacaacagcgagtacatgagaaatggagacttcctgcccacccggctgcaggcccagcaggatgctgtgaacatcgtgtgccacagcaagaccaggagcaaccctgagaacaacgtgggcctcatcaccctggccaatgactgtgaggtgctgaccaccctgaccccagacaccggccgcatcctgagcaagctgcacacagtgcagcccaagggcaagatcaccttctgcaccggcatccgggtggcccacctggccctgaagcaccggcagggcaagaaccacaagatgaggatcatcgcctttgtgggcagccctgtggaggacaatgagaaggacctggtgaagctggccaagaggctgaagaaggagaaggtgaatgtggacatcatcaactttggagaggaggaggtgaacacagagaagctgacagcctttgtgaacaccctgaatggcaaggatggcaccggcagccacctggtgacagtgcccccaggccccagcctggctgatgccctgatcagcagccccatcctggccggggagggcggggccatgctgggcctgggcgccagtgactttgaatttggagtggaccccagcgctgaccctgagctggccctggccctgcgggtgtccatggaggagcagaggcagaggcaggaggaggaggcccggcgggctgctgctgccagcgctgctgaggccggcatcgccaccactggaacagaggacagtgatgatgccctgctgaagatgaccatcagccagcaggagtttggccgcacaggcctgcctgacctgagctccatgacagaggaggagcagatcgcctatgccatgcagatgagcctgcagggcgctgagtttggccaggccgagagcgctgacattgatgccagcagcgccatggacaccagcgagcccgccaaggaggaggatgattatgatgtgatgcaggaccctgagttcctgcagagcgtgctggagaacctgcccggggtggaccccaacaatgaggccatcagaaatgccatgggcagcctggccagccaggccaccaaggatggcaagaaggacaagaaggaggaggacaagaagtag

SEQ ID NO: 132307 - DNA, 612 bp, Artificial Sequence
  derived and/or modified sequence
atgagaaatggagacttcctgcccacccggctgcaggcccagcaggatgctgtgaacatcgtgtgccacagcaagaccaggagcaacccagaaaataatgtgggcctcatcaccctggccaatgactgtgaggtgctgaccaccctgaccccagacaccggccgcatcctgagcaagctgcacacagtgcagcccaagggcaagatcaccttctgcaccggcatccgggtggcccacctggccctgaagcaccggcagggcaagaaccacaagatgaggatcatcgcctttgtgggcagccctgtggaggacaatgagaaggacctggtgaagctggccaagaggctgaagaaggagaaggtgaatgtggacatcatcaactttggagaggaggaggtgaacacagagaagctgacagcctttgtgaacaccctgaatggcaaggatggcaccggcagccacctggtgacagtgcccccaggccccagcctggctgatgccctgatcagcagccccatcctggccggggagggcggggccatgctgggcctgggcgccagtgactttgaatttggagtggaccccagcgctgaccctgagctggccctgtag

SEQ ID NO: 132308 - DNA, 1134 bp, Artificial Sequence
  derived and/or modified sequence
atggtgctggagagcaccatggtgtgcgtggacaacagcgagtacatgaggaacggtgattttttgccgacgcggctccaagcacagcaggacgctgtgaacatcgtgtgtcattcaaaaacacgctctaatcctgaaaataatgtaggactgataacgcttgccaatgactgtgaggttttgaccacccttactcccgacactggacggatcctctccaagctgcacacagtccagcccaagggaaaaattactttctgcactggcattagagtggctcacctggctctgaaacaccgccagggcaaaaatcataagatgagaattatcgcattcgtggggtctcccgtggaagacaatgaaaaggatttagtgaagttagctaagaggctcaagaaggagaaagtgaatgtggatattatcaactttggcgaagaggaggtcaacactgagaagctgactgccttcgtcaacacccttaatgggaaggacggaacaggctcccacctggtcacagtgcctcccggtccttcactggcggatgctctgatctcctccccaatactagctggcgaagggggggccatgctggggctcggggcctccgactttgagtttggggttgatccaagcgctgaccctgagctggcattagctctacgcgtgagtatggaagagcagaggcagaggcaggaggaagaggctcgccgggcggccgccgcctccgcagctgaggcagggattgcaaccaccggcaccgaggatagtgatgacgctcttctcaagatgaccatcagccagcaggagttcggtcgaactgggttgccagacctctcctcaatgacagaagaagaacagatcgcctatgccatgcagatgtctctgcaaggcgcagagttcggccaggcagaaagtgccgacattgacgcctcttccgcaatggacaccagcgagccggccaaagaggaagacgactacgatgtgatgcaggaccccgagttcctccagtcggtgctggaaaatctgccgggcgttgacccaaataatgaggcaatcaggaacgctatgggtagcttagccagccaggccaccaaagacgggaaaaaggacaaaaaggaggaagataagaagtag

SEQ ID NO: 132309 - DNA, 612 bp, Artificial Sequence
  derived and/or modified sequence
atgcggaacggcgacttcctgcccacccggctgcaggcccagcaggacgccgtgaacatcgtgtgccacagcaagactaggtcgaatccggagaacaatgtgggtcttatcacacttgccaacgattgcgaggtattaactacacttactcctgatacgggacgcatattatctaaactgcacacggtgcagcccaaaggaaaaattaccttttgtacaggcatacgagttgcccacctggccctgaaacaccggcaggggaaaaatcataagatgcggatcatcgcctttgtgggatcaccagtcgaggataacgaaaaagatttggtgaaacttgccaagcgactgaaaaaagagaaggtgaatgtggatattatcaatttcggggaagaggaagtgaataccgaaaagctgacagcgttcgtgaatacattaaacggaaaagatggcaccggatcccacctggtgaccgtgccaccgggtccttctctagctgacgccctaattagttcgcctattctggctggcgagggcggcgccatgctggggttgggagcctctgactttgaattcggcgtggatccttcagcagacccagagctggctctgtag

SEQ ID NO: 132310 - DNA, 1134 bp, Artificial Sequence
  derived and/or modified sequence
atggtgctggaatctacaatggtctgcgttgataattccgaatatatgcgtaacggggacttcttgcccacccgactgcaggcccagcaggacgccgtgaatatcgtctgccattccaagacacgcagtaacccggagaataatgtcggactgatcacgctcgccaatgactgcgaggtgctgaccaccctgacaccagatactgggcgtatcttatccaagctgcataccgtgcagccgaaaggcaagattactttttgcaccgggatccgggtcgcgcacctggctctgaaacaccgacaaggaaaaaaccacaaaatgaggattattgcttttgtggggtcccccgttgaggataacgagaaggacttagtgaagctggctaaacggctgaagaaggaaaaggtaaatgttgacataattaatttcggtgaggaggaagtaaatactgaaaagctgaccgcatttgttaacacactaaacggcaaggacggcaccggctcccacctcgtgaccgtgccacccggaccaagcctggccgacgctctgatctcttcacctatactggctggagaaggcggagctatgctgggcctcggcgcatctgactttgagtttggggtcgatccctcagctgatccagagttagcccttgcattacgtgtgagcatggaggaacagcgccaaaggcaggaggaggaggccagacgcgcagcggctgccagcgccgcagaggctggcattgccacaaccgggacggaggatagcgatgatgccttactcaagatgacgatctctcagcaggaatttggcagaactggcttgccggacctgtccagcatgactgaagaggaacaaatcgcctatgctatgcagatgtcactgcaaggggcagagtttggtcaggcagagagcgcagatatcgacgcttcttctgctatggacacctctgaaccagctaaggaagaagacgactatgatgtgatgcaagaccctgagtttctgcagagcgtgcttgagaatttgccaggagtggaccccaacaatgaggccatcaggaacgcaatgggatcgctggccagccaagctaccaaagacggaaagaaggacaagaaagaggaggataaaaaatag

SEQ ID NO: 132311 - DNA, 612 bp, Artificial Sequence
  derived and/or modified sequence
atgagaaatggggattttctgcctacacgacttcaagcacagcaggacgctgttaatatcgtctgccactcaaagacgcgcagtaatcctgagaacaatgtcggattgataaccctggcaaatgactgcgaggtcctgactacacttacgcccgataccggcagaatcctttccaagctacacaccgttcagcctaagggaaaaatcactttctgtactgggattcgggtcgctcacttggcattgaaacaccgtcagggtaaaaatcataaaatgcgaatcattgcctttgtcggctcccctgttgaggacaacgagaaggatctggtgaaattagcaaagcgccttaagaaggaaaaagtgaatgtcgatatcatcaactttggggaagaggaggtgaatactgaaaaacttaccgccttcgtgaacacattgaacggcaaagatggaaccggttcccatctggttaccgtcccgcctggcccatctctcgccgacgcactgattagtagcccaattcttgccggagaggggggagctatgctgggattgggggctagtgattttgagtttggcgttgacccgagtgccgatcctgagttagccttgtag

SEQ ID NO: 132312 - DNA, 787 bp, Artificial Sequence
  derived and/or modified sequence
aattagctggcatggtggtgcacgcctgtggtcccagctacccgggaagctgaagtgggaagatctattgagcctgggaggttgaggctacagtgagctgtgactgcgcttgaacctgtgcctgcgcttgaacctgtgcctgaatactaccctagacagtgtggacaacagtgagtatatgcggaatggagacttcttacccaccaggctgcaggcccagcaggatgctgtcaacatagtttgtcattcaaagacccgcagcaaccctgagaacaacgtgggccttatcacactggctaatgactgtgaagtgctgaccacactcaccccagacactggccgtatcctgtccaagctacatactgtccaacccaagggcaagatcaccttctgcacgggcatccgcgtggcccatctggctctgaagcaccgacaaggcaagaatcacaagatgcgcatcattgcctttgtgggaagcccagtggaggacaatgagaaggatctggtgaaactggctaaacgcctcaagaaggagaaagtaaatgttgacattatcaattttggggaagaggaggtgaacacagaaaagctgacagcctttgtaaacacgttgaatggcaaagatggaaccggttctcatctggtgacagtgcctcctgggcccagtttggctgatgctctcatcagttctccgattttggctggtgaaggtggtgccatgctgggtcttggtgccagtgactttgaatttggagtagatcccagtgctgatcctgagctggccttg

SEQ ID NO: 132313 - protein, 324 aa, Artificial Sequence
  derived and/or modified sequence
MPELAVQKVVVHPLVLLSVVDHFNRIGKVGNQKRVVGVLLGSWQKKVLDVSNSFAVPFDEDDKDDSVWFLDHDYLENMYGMFKKVNARERIVGWYHTGPKLHKNDIAINELMKRYCPNSVLVIIDVKPKDLGLPTEAYISVEEVHDDGTPTSKTFEHVTSEIGAEEAEEVGVEHLLRDIKDTTVGTLSQRITNQVHGLKGLNSKLLDIRSYLEKVATGKLPINHQIIYQLQDVFNLLPDVSLQEFVKAFYLKTNDQMVVVYLASLIRSVVALHNLINNKIANRDAEKKEGQEKEESKKDRKEDKEKDKDKEKSDVKKEEKKEKK

SEQ ID NO: 132314 - protein, 247 aa, Artificial Sequence
  derived and/or modified sequence
MYGMFKKVNARERIVGWYHTGPKLHKNDIAINELMKRYCPNSVLVIIDVKPKDLGLPTEAYISVEEVHDDGTPTSKTFEHVTSEIGAEEAEEVGVEHLLRDIKDTTVGTLSQRITNQVHGLKGLNSKLLDIRSYLEKVATGKLPINHQIIYQLQDVFNLLPDVSLQEFVKAFYLKTNDQMVVVYLASLIRSVVALHNLINNKIANRDAEKKEGQEKEESKKDRKEDKEKDKDKEKSDVKKEEKKEKK

SEQ ID NO: 132315 - DNA, 975 bp, Artificial Sequence
  derived and/or modified sequence
atgcctgagttggctgtccaaaaggttgtcgtccatccattagtgctgttaagcgtcgttgaccactttaacaggatcgggaaagtcggcaaccagaagagggttgtgggagttctcctggggagctggcagaaaaaggtcctggacgtgtcaaattccttcgctgttcctttcgacgaggatgacaaggacgactccgtttggtttctggatcatgattatctggagaatatgtacggtatgtttaagaaagttaatgcaagggagcggatcgtcggatggtaccacaccggtccaaagttacacaagaacgatatagcaattaatgagcttatgaaacggtactgtccgaacagtgttctggtgataatcgatgtgaaacctaaagatcttggccttcctactgaagcttacatcagcgtcgaagaggtgcacgacgacggaacacctacttcgaagacttttgagcacgttacttcggaaatcggggctgaggaagcggaagaggttggtgtggagcaccttctaagagacataaaggatacaacggtaggaaccttgagtcagcggattaccaatcaggtccacggccttaagggcttgaacagcaaactcctggacattagatcgtacttggaaaaggtggctacgggaaaactgccaatcaaccaccaaatcatctatcaattgcaggacgtcttcaatctgctccccgatgtaagcctgcaggaattcgttaaagccttctatctcaagacaaacgaccaaatggtcgtcgtctacctcgcatctctgatccgaagcgtggtcgctctacacaacctcattaacaataagatcgcgaaccgggatgcagagaaaaaggaagggcaagagaaagaggaaagcaagaaggataggaaggaggacaaagaaaaggacaaggataaggagaagtccgacgtgaaaaaggaagaaaaaaaggagaagaaatag

SEQ ID NO: 132316 - DNA, 975 bp, Artificial Sequence
  derived and/or modified sequence
atgcctgagctggccgtgcagaaggtggtggtgcaccccctggtgctgctgtctgtggtggaccacttcaaccgcatcggcaaggtgggcaaccagaagagggtggtgggcgtgctgctgggctcctggcagaagaaggtgctggatgtgagcaacagctttgctgtgccctttgatgaagatgacaaggatgacagcgtgtggttcctggaccatgactacctggagaacatgtatggcatgttcaagaaggtgaatgcccgggagagaattgtgggctggtaccacacaggccccaagctgcacaagaatgacatcgccatcaatgagctgatgaagcgctactgccccaacagcgtgctggtgatcattgatgtgaagcccaaggacctgggcctgcccacagaggcctacatctctgtggaggaggtgcatgatgatggcacccccaccagcaagacctttgaacatgtgaccagcgagatcggggctgaggaggccgaggaggtgggcgtggagcacctgctgcgggacatcaaggacaccaccgtgggcaccctgagccagaggatcaccaaccaggtgcacggcctgaagggcctgaacagcaagctgctggacatccgcagctacctggagaaggtggccaccgggaagctgcccatcaaccaccagatcatctaccagctgcaggatgtgttcaacctgctgcctgatgtgtccctgcaggagtttgtgaaggccttctacctgaagaccaatgaccagatggtggtggtgtacctggccagcctcatccgctctgtggtggccctgcacaacctgatcaacaacaagatcgccaacagagatgctgagaagaaggagggccaggagaaggaggagagcaagaaggacaggaaggaggacaaggagaaggacaaggacaaggagaagagtgatgtgaagaaggaggagaagaaggagaagaagtag

SEQ ID NO: 132317 - DNA, 975 bp, Artificial Sequence
  derived and/or modified sequence
atgcccgagctggccgtgcagaaggtggtggtgcaccccctggtgttgctgtccgtggttgaccacttcaaccgcatcggcaaagttgggaaccaaaaacgagtcgtgggggtccttctcggatcttggcaaaagaaggttcttgacgtgagcaactcattcgcagttcccttcgatgaagatgataaagatgacagtgtctggtttctggaccacgactatctcgagaacatgtacggcatgtttaaaaaggtgaatgccagagaacgcatcgtggggtggtatcatactggccccaaactccacaaaaacgacatcgcgataaacgaactgatgaagcggtattgtcctaatagcgttctcgtgattattgatgttaagcccaaggaccttggccttccaacagaggcctatatctcggtggaggaggtgcatgacgatggcactcccacatccaagactttcgagcacgtaaccagcgagatcggcgccgaggaggccgaggaggtgggggtagaacaccttctcagagatattaaagatacgacggttgggactctgtcccagagaatcacaaaccaggtgcatggccttaaggggctcaactccaaactcctagacatacgttcttatctggaaaaagtagccactggcaaacttcccatcaatcatcagatcatataccaactacaggacgtgttcaacttactgcctgatgtgtcattacaggagttcgtgaaagccttttatctcaaaaccaacgatcagatggtagtagtctaccttgcatcgctgatcagatcagttgttgccctgcacaatcttatcaacaacaaaatcgcaaatagggatgccgagaagaaagagggacaagagaaggaagagtctaagaaagaccgcaaggaggacaaagagaaagataaagacaaagaaaaatcagatgtgaaaaaagaagagaaaaaggagaagaaatag

SEQ ID NO: 132318 - DNA, 975 bp, Artificial Sequence
  derived and/or modified sequence
atgcctgagttagcggtgcagaaagttgtcgtgcatccactcgtcctgctaagtgtcgtcgatcatttcaaccggatcggcaaggttggcaaccagaagagggtcgtgggggttctgctcggttcatggcaaaaaaaagtgcttgatgtctctaacagcttcgccgtgccattcgacgaggatgataaagatgactctgtgtggtttctggaccacgactatctcgagaatatgtatgggatgtttaaaaaggtcaatgccagagaaagaattgtaggctggtaccatactgggcctaagctgcataagaatgacattgccattaacgaactgatgaagcgctactgccctaactctgtcctggttatcatcgatgtgaaacctaaagatcttggtctccctacagaggcttatatatcggtggaggaggttcatgacgatgggactccaacttccaagacttttgagcacgtcacatctgaaatcggcgctgaggaggctgaagaggtcggcgtcgagcacctgctgcgagatataaaggatacaactgtgggaacactgtctcagcgtatcaccaatcaggtacacggcctgaagggactgaatagcaaactgctggatattcggagctacctcgagaaagtggcgaccggtaaactcccgattaatcaccagataatctaccaattgcaggacgtgtttaacttgcttccggacgtgtcactgcaggaatttgtcaaagctttctatcttaagaccaacgaccagatggtggtggtctacctggcctctctcatccgcagcgtggtcgctttacataacctgatcaacaataagatcgccaatagagatgccgagaaaaaagaagggcaggagaaagaagagtccaagaaggacagaaaggaggacaaggagaaggataaggataaagagaagagcgacgtcaagaaggaggaaaaaaaggaaaagaaatag

SEQ ID NO: 132319 - DNA, 975 bp, Artificial Sequence
  derived and/or modified sequence
atgcccgagctggccgtgcagaaggtggtggtgcaccccctggtgctgctgagcgtggtggaccacttcaacagaatcggcaaggtgggcaaccagaagagagtggtgggcgtgctgctgggcagctggcagaagaaggtgctggacgtgagcaacagcttcgccgtgcccttcgacgaggacgacaaggacgacagcgtgtggttcctggaccacgactacctggagaacatgtacggcatgttcaagaaggtgaacgccagagagagaatcgtgggctggtaccacaccggccccaagctgcacaagaacgacatcgccatcaacgagctgatgaagagatactgccccaacagcgtgctggtgatcatcgacgtgaagcccaaggacctgggcctgcccaccgaggcctacatcagcgtggaggaggtgcacgacgacggcacccccaccagcaagaccttcgagcacgtgaccagcgagatcggcgccgaggaggccgaggaggtgggcgtggagcacctgctgagagacatcaaggacaccaccgtgggcaccctgagccagagaatcaccaaccaggtgcacggcctgaagggcctgaacagcaagctgctggacatcagaagctacctggagaaggtggccaccggcaagctgcccatcaaccaccagatcatctaccagctgcaggacgtgttcaacctgctgcccgacgtgagcctgcaggagttcgtgaaggccttctacctgaagaccaacgaccagatggtggtggtgtacctggccagcctgatcagaagcgtggtggccctgcacaacctgatcaacaacaagatcgccaacagagacgccgagaagaaggagggccaggagaaggaggagagcaagaaggacagaaaggaggacaaggagaaggacaaggacaaggagaagagcgacgtgaagaaggaggagaagaaggagaagaagtag

SEQ ID NO: 132320 - DNA, 744 bp, Artificial Sequence
  derived and/or modified sequence
atgtacggcatgtttaagaaggtgaacgctagagaacgcattgtcgggtggtaccacactgggcctaagctccacaagaatgacatagcgattaacgagctcatgaaacgctattgcccaaactccgtcctcgtgattattgacgtaaagccaaaggatcttggtctccccaccgaagcctatatttccgtggaggaagtccacgatgacggaacgcctactagtaagaccttcgagcacgtcacatccgaaattggggcggaagaggccgaagaagtgggcgtggagcatctgctcagagatattaaagacaccacagttggaactctctcacagcgcataactaaccaggtccatggactaaagggcctcaactctaagctcctggacatccggtcttacttagagaaagtcgccactggaaagctacccatcaaccaccagatcatataccagttacaagacgtttttaacttattgccagatgtgtctctgcaggaatttgtgaaggccttctacttgaagaccaatgatcaaatggtcgtggtatatctggcttctctgatccgctccgtagtggcactgcataatctcatcaacaacaagattgcaaaccgggatgcagagaagaaggaagggcaagaaaaggaagagagcaaaaaggaccgaaaagaggataaggaaaaagacaaggacaaagagaagtctgacgttaaaaaagaggagaagaaggagaaaaagtag

SEQ ID NO: 132321 - DNA, 744 bp, Artificial Sequence
  derived and/or modified sequence
atgtatggcatgttcaagaaggtgaatgcccgggagcgcatcgtgggctggtaccacacaggccccaagctgcacaagaatgacatcgccatcaatgagctgatgaagcgctactgccccaacagcgtgctggtgatcattgatgtgaagcccaaggacctgggcctgcccacagaggcctacatctctgtggaggaggtgcatgatgatggcacccccaccagcaagacctttgagcacgtgaccagcgagattggagctgaggaggccgaggaggtgggcgtggagcacctgctgcgggacatcaaggacaccaccgtgggcaccctgagccagaggatcaccaaccaggtgcacggcctgaagggcctgaacagcaagctgctggacatccgcagctacctggagaaggtggccaccgggaagctgcccatcaaccaccagatcatctaccagctgcaggatgtgttcaacctgctgcctgatgtgtccctgcaggagtttgtgaaggccttctacctgaagaccaatgaccagatggtggtggtgtacctggccagcctcatccgctctgtggtggccctgcacaacctgatcaacaacaagatcgccaacagagatgctgagaagaaggagggccaggagaaggaggagagcaagaaggacagaaaagaagacaaggagaaggacaaggacaaggagaagagtgatgtgaagaaggaggagaagaaggagaagaagtag

SEQ ID NO: 132322 - DNA, 744 bp, Artificial Sequence
  derived and/or modified sequence
atgtacggcatgttcaagaaggtgaacgcccgggagcggatcgtgggatggtaccacactggccccaagctccataaaaatgacatcgccatcaatgagcttatgaagagatattgcccaaacagcgttttagtgatcattgacgtgaaaccaaaggacctcgggctccctaccgaagcctatatctccgttgaggaggttcatgatgacggtacacctacttccaagacatttgaacatgtaacatcagaaatcggggccgaggaagccgaagaggttggggttgaacatctgctccgagatattaaggataccactgtgggcactctgagtcagcggattaccaaccaggtccacggtctcaaggggcttaactccaaattactggatatacgctcgtatctggagaaagttgcaaccggcaagctgcctataaatcaccagatcatctaccagttacaggatgtgtttaacctgctgccggacgtctctctccaggaatttgtgaaggctttctacctgaaaactaacgaccagatggtagtggtctacttggcgtcgctcattcgttcagttgttgcgcttcacaacctcattaataacaaaatcgcaaacagagacgctgaaaaaaaggagggtcaggagaaggaagaatctaagaaggatcgcaaggaagataaagaaaaagataaggataaggaaaagtctgatgtgaaaaaagaggagaagaaggagaaaaagtag

SEQ ID NO: 132323 - DNA, 744 bp, Artificial Sequence
  derived and/or modified sequence
atgtatggcatgtttaaaaaagtgaacgccagagagcgcatcgttgggtggtaccacacgggacccaagttgcacaagaatgacatcgctataaatgaactgatgaagcgctattgccctaacagcgtattggtcattatcgacgtgaagcctaaagaccttggcttgccaacagaggcttacatctccgtggaggaagtgcacgacgatggtaccccaacttctaagacctttgagcatgtgaccagcgagattggcgctgaggaggccgaggaggtgggagtagagcacttgttgagagatattaaggatacaaccgtcggcacactgtctcaacgcatcacaaatcaggtccacggcttaaagggactgaacagtaaattactagatatccgttcctacctcgaaaaagtggcaactgggaagttacccatcaatcatcaaattatttatcagctgcaggatgttttcaacctcctgccagatgtatccctacaggaattcgttaaggcattttacctgaaaaccaatgatcagatggtagtggtgtatctggctagtctcatccgatcagtagtagccctccacaacctgattaacaacaagatcgcgaacagagacgccgaaaagaaagaaggacaggaaaaagaggagtccaaaaaagaccgaaaagaagacaaagagaaagacaaggacaaagagaaaagcgatgtcaagaaagaggagaagaaggagaaaaagtag

SEQ ID NO: 132324 - DNA, 5689 bp, Artificial Sequence
  derived and/or modified sequence
gggagcggaagaaggaggccgcgcgagggctgacgaaccggaagaagaggaactgggcctgaaagggtaccggtgaccgctactgctgccggtgtttgcgtgtggcagggagccaggcctggcgagcggggtgtgtcgcgatgccggagctggcagtgcagaaggtggtggtccaccccctggtgctgctcagtgtggtggatcatttcaaccgaatcggcaaggttggaaaccagaagcgtgttgttggtgtgcttttggggtcatggcaaaagaaagtacttgatgtatcgaacagttttgcagttccttttgatgaagatgacaaagacgattctgtatggtttttagaccatgattatttggaaaacatgtatggaatgtttaagaaagtcaatgccagggaaagaatagttggctggtaccacacaggccctaaactacacaagaatgacattgccatcaacgaactcatgaaaagatactgtcctaattccgtattggtcatcattgatgtgaagccgaaggacctagggctgcctacagaagcgtacatttcagtggaagaagtccatgatgatggaactccaacctcgaaaacatttgaacacgtgaccagtgaaattggagcagaggaagctgaggaagttggagttgaacacttgttacgagatatcaaagacacgacggtgggcactctgtcccagcggatcacaaaccaggtccatggtttgaagggactgaactccaagcttctggatatcaggagctacctggaaaaagtcgccacaggcaagctgcccatcaaccaccagatcatctaccagctgcaggacgtcttcaacctgctgccagatgtcagcctgcaggagttcgtcaaggccttttacctgaagaccaatgaccagatggtggtagtgtacttggcctcgctgatccgttccgtggtcgccctgcacaacctcatcaacaacaagattgccaaccgggatgcagagaagaaagaagggcaggagaaagaagagagcaaaaaggataggaaagaggacaaggagaaagataaagataaggaaaagagtgatgtaaagaaagaggagaaaaaggagaaaaagtaaaacatgtattaaatagcttttttaatttgtaaattaaaatcttacaaactaaatcagtgtgctgctagagggttctttttcacttgacatgcttattagaaagctgacccaacaagagctctctgcctccggtcactcttgctgtggtgctacgtggaagtgaatggagactgatctcaaatctgaactgcagctttcgctgctgtgagttggggatatgatagtcagctcaggcttcagattgtatgagaaaaatgaagagaagtcaacaaatattttggtactcttcattcatttatctctaaaaccaggagttgaattttcctcatcttgaaagactcttggggtctgtttctggtattttacaaaattgctaagtggaatgcatgaattgcattatgttctctggtaacacgtagagttcagacccttctgaactctgttgataataccacaccatgttctggacccatagctctggcatcctcaggggttgtgatccagctccatatattgtttaccttcaaagatacaattaaatggcttgatttttaagctgtgttctagtcgtttttgacttcgggagtagtgatctgtagtttccagaagcagccaagacagtcttcgattggagctgccttaagttctcttgcacttggtatcatttatgaaagagcatctcattcccctaaatggaaacaggcagtctgctgtagtgaggagagttctctgagcccagaagacccgggttccagtttgtacctcagatccctcatttatgaggtggtaggttgcagtccgtcatctctgaagtccccagaacagtgtttcaaaagggacacatttaccacactgcagcaagttgtaagtacctcagaccacaggccaaacaggcatgttactaagaatggaacaatgtttcccccaagataagtgcacaggactcctagaggaacaaattaaataaggcactaaatcatttgacatacagtagtcacggatattaaatttcctctcttgaacagatagaacctctcaaatgcactacgtggattattcatcttcaaagatataagaatacaataaaatagcacaaaaactcagttgcatctcagaaaccacttcatgaggttataatgccttaaagtaatcagaagcatcgatttttattccatagacctgccaaagagctagttagtgggaatttgggaataggtagagcttgagtatcccttatctgaaatgcttggaaccagaagtattaaaagatttaggaaatttttttttttaatatttgcattatgcttaacggctgagcatgcctaataggaaatgttccaatgagcatttcctttcaataccatgtaagtgctcaaaaagtttcagattttggagcatttcaaatttttggattaggggcactcaacctgtagtaaaatgtaaaatggctcttattcagcataaatagaggcatgcccccatcaggggtcatttcagagttcatcaagattctgagataaaaaagcatggtacagtgaaaacaacaaaattgactttcctgtttcagaagccaaaagtcagacggtttgtatctaattgaataaaagaaacttgaagtacgtaagttaaaacttgaggtgtatcccaaaccatgggagcgttgaagaagcttttgagatctgggtgccatgtttggaacacactgatgtgacaggttgcctggaccacaaaccctggctaggaaatgggcaagagcaagacccaggcatcgggggagagccaggtgccatggtgctgaggctctaagcaagggaacgcaacgtcatcctaaggaacgggtcctgtatgtaaggctcaggggccagtgcacacctgaattgacaccgcacaggattcaggtctgcctttaagaacataatgcagggttgggggcagtggctggtgcttgtagtcccaacactgggaggctgaggcaggaggatcacttgaggccaggagtaagagaccagcctgaacaacatagtaagagccatctacaaaaaattctaaaattgcctgggtgtggtgggatgtgccttagtcctagctactgaagaggctgaggtaggacactggagcccaggagctcaaggttacagtgagctgtgatcacatgccactgcactccagcctaggcaacagagcaaaatcctgtctctttaaaaaacaaaaagtatcatttggatttaaaagactttcccagggtccagtgaactagcacaatgccacagacttgtaagttggtcatagtttgatgaactgaaatgtttattgagcatctaagaacataggaatccccaggccttattatttttaatagtttggcccacatacggacaaaactgacttctaccttcctaacagaaatcttccatttctacttatgaagaaaatagcttatagcctgtggagtcacttaggcatattttctaaggccaaattgctgccatcatgtagaagagggggagcccagtagtgctaccgatgaagtcttgctcatacaaatagcggctgacttgactgcaaaacccagggcccacccctaaaataaagccttacatttgtgtattctggcattctggagatgagacttctaaacggcttttgctggctttggaaacactaaaaaagtattctggaaaaagtgtgatcctcagcctggatctcatcttcctagctgcaacattagcttcccttcgatttcaccacagcttcagaatgactgcctaatggatttcaggctgctcctgtgacaccttacagaggatgctgttcactcctgaattacggttttctgtttgaaaacacgaaatatgcgagttatagactggggataaatgtggagagggtcctgaagtcaaggagaagattttaccaaaactagagcacttcaatggagaagtaggcggagtgtggtggctcatgcctgtaatcctagcactttgggaggtcgaggctggtggattacttgaggtcaggagttcaagaccagcctggccaacatggtaaaaccccatctctactaaaaatacaaaaattagctgggcgtggtggtgtgcacctgtaatcccagctacctgggaggttgaggcaggagaatcgcttgaactggggatgtggaagttgcagtgagccgagattgtgccactgcactccagcctgggcaacagagcgagactctgtctcaaaaaaaaaaaaaaaaaaaattgccagaagcagatgaaagacaaccacaggtttaaatgaaaacaagctgaaacaatgcaaactttttatactagatattcgacttaaaaatatctcaatgaagggttagttttctcaaaaaaaaatgaaaaagaaaacaggaaatagccctcaacttatggaaaagaatgaaatctcccattcactgggtagttatgcaaaggctttttcttctaccattttccattaagcagaataaaacttgagaatgagttaggattgtttgttagactataacatgctaacaaaaccactttcatctgccctgtctgggaaaatgcggtggatacaggacatgtgggaaggcagagaaacatttgatttatatggcccacaagagaaaatgtttacaacttccctaagcaaatgtactgcaaattattacacataatacctgtgtacattcctatgccattcaactcttggcattaccgatttttgcctggtagcagtgcaaaattgagatctttttttaaaaactaaagcctgttttttggccaggcacagtggctcacacctgtaattgggaggccgaggcgggcggatcacacggttaggagttcgagaccagcctggccaatatggagaaacaccatctctactaaaaatacaacaattagctgggcatggtgatgggagcctgtaatcccagctactcgggaggctgaggcaggagaattgcttgaacccgggaggcggaggttgcactgagctggagatcgtgccactgcactccagcctgggtaacagagcaagactccatctcaaaaaaaaaaaagtaaaggctgtttttattgggggaataattaagaattgactcagtatagacatggaagtgaggaaagaaaatatgtgaaaagaaaggaagaagaaattatggaagtcgtgtttctagggcccaaatcaagagaaatcttttgctaatcattgctctttggagccaacctgttcttcgacactagatggcgtcattcactcacctcagctcatctcttggcaagagaaaaatttgattcccagttgggcatagatttgggaatctcccccaattacttcctgccatttctgctttcagctgaagccacccaggcaaaattttgaaggaacttgaagaggctatgggtgcaaaaagactgggttaagcatccacacctccacccttactgtcctcttgcacactgctgctgggggatgaatacattaatacaagcagatagtatgtgcttcgatttcccttactgctggtattactcttctaattttttttttttcctcgagactgggtcttg

SEQ ID NO: 132325 - DNA, 1395 bp, Artificial Sequence
  derived and/or modified sequence
agaggaactgggcctgaaagggtaccggtgaccgctactgctgccggtgtttgcgtgtggcagggagccaggcctggcgagcggggtgtgtcgcgatgccggagctggcagtgcagaaggtggtggtccaccccctggtgctgctcagtgtggtggatcatttcaaccgggtttcgccatgttgcccacgctgcccatgctcgtctcaaactcctgagctcaagtgatctgcccacctcagcctctcgaagtgctgggattacaggcatgagccactgcatccggcctactccatcatctttattccaaaaaagatttcaggatgggaaaagtttaaagaatcggcaaggttggaaaccagaagcgtgttgttggtgtgcttttggggtcatggcaaaagaaagtacttgatgtatcgaacagttttgcagttccttttgatgaagatgacaaagacgattctgtatggtttttagaccatgattatttggaaaacatgtatggaatgtttaagaaagtcaatgccagggaaagaatagttggctggtaccacacaggccctaaactacacaagaatgacattgccatcaacgaactcatgaaaagatactgtcctaattccgtattggtcatcattgatgtgaagccgaaggacctagggctgcctacagaagcgtacatttcagtggaagaagtccatgatgatggaactccaacctcgaaaacatttgaacacgtgaccagtgaaattggagcagaggaagctgaggaagttggagttgaacacttgttacgagatatcaaagacacgacggtgggcactctgtcccagcggatcacaaaccaggtccatggtttgaagggactgaactccaagcttctggatatcaggagctacctggaaaaagtcgccacaggcaagctgcccatcaaccaccagatcatctaccagctgcaggacgtcttcaacctgctgccagatgtcagcctgcaggagttcgtcaaggccttttacctgaagaccaatgaccagatggtggtagtgtacttggcctcgctgatccgttccgtggtcgccctgcacaacctcatcaacaacaagattgccaaccgggatgcagagaagaaagaagggcaggagaaagaagagagcaaaaaggataggaaagaggacaaggagaaagataaagataaggaaaagagtgatgtaaagaaagaggagaaaaaggagaaaaagtaaaacatgtattaaatagcttttttaatttgtaaattaaaatcttacaaactaaatcagtgtgctgctagagggttctttttcacttgacatgcttattagaaagctgacccaacaagagctctctgcctccggtcactcttgctgtggtgctacgt

SEQ ID NO: 132326 - DNA, 744 bp, Artificial Sequence
  derived and/or modified sequence
atgtacggcatgttcaagaaggtgaacgccagagagagaatcgtgggctggtaccacaccggccccaagctgcacaagaacgacatcgccatcaacgagctgatgaagagatactgccccaacagcgtgctggtgatcatcgacgtgaagcccaaggacctgggcctgcccaccgaggcctacatcagcgtggaggaggtgcacgacgacggcacccccaccagcaagaccttcgagcacgtgaccagcgagatcggcgccgaggaggccgaggaggtgggcgtggagcacctgctgagagacatcaaggacaccaccgtgggcaccctgagccagagaatcaccaaccaggtgcacggcctgaagggcctgaacagcaagctgctggacatcagaagctacctggagaaggtggccaccggcaagctgcccatcaaccaccagatcatctaccagctgcaggacgtgttcaacctgctgcccgacgtgagcctgcaggagttcgtgaaggccttctacctgaagaccaacgaccagatggtggtggtgtacctggccagcctgatcagaagcgtggtggccctgcacaacctgatcaacaacaagatcgccaacagagacgccgagaagaaggagggccaggagaaggaggagagcaagaaggacagaaaggaggacaaggagaaggacaaggacaaggagaagagcgacgtgaagaaggaggagaagaaggagaagaagtag

SEQ ID NO: 132327 - protein, 350 aa, Artificial Sequence
  derived and/or modified sequence
MFIKGRAPRAPPRERRRATRGGLRQVVAPPRALGSTSRPHFRRASVCRRRCRKSGGLLAASRKMAAAAVNGAAGFSSSGPAATSGAVLQAATGMYEQLKGEWNRKSPNLSKCGEELGRLKLVLLELNFLPTTGTKLTKQQLILARDILEIGAQWSILRKDIPSFERYMAQLKCYYFDYKEQLPESAYMHQLLGLNLLFLLSQNRVAEFHTELERLPAKDIQTNVYIKHPVSLEQYLMEGSYNKVFLAKGNIPAESYTFFIDILLDTIRDEIAGCIEKAYEKILFTEATRILFFNTPKKMTDYAKKRGWVLGPNNYYSFASQQQKPEDTTIPSTELAKQVIEYARQLEMIV

SEQ ID NO: 132328 - DNA, 1553 bp, Artificial Sequence
  derived and/or modified sequence
agttagggcaaaagccaacttccggtcaccatcttgagtgacgacagaggcggagctccaactgacatgttcattaagggcagggctccgagggcgccacctcgagagcgacggcgggctacccggggcgggctgaggcaggttgtagccccgccccgggccttgggctccacctctcggccccacttccgccgggcaagcgtttgtaggcggcgctgccgtaaatcaggcggtctgcttgccgcatcacgcaagatggcggccgcggcggtgaacggggcggcaggcttctcgagctccgggcccgcggcaacctcgggcgctgttctgcaggccgcgaccggcatgtacgagcaactcaagggcgagtggaaccgtaaaagccccaatcttagcaagtgcggggaagagctgggtcgactcaagctagttcttctggagctcaacttcttgccaaccacagggaccaagctgaccaaacagcagctaattctggcccgtgacatactggagatcggggcccaatggagcatcctacgcaaggacatcccctccttcgagcgctacatggcccagctcaaatgctactactttgattacaaggagcagctccccgagtcagcctatatgcaccagctcttgggcctcaacctcctcttcctgctgtcccagaaccgggtggctgagttccacacggagttggagcggctgcctgccaaggacatacagaccaatgtctacatcaagcacccagtgtccctggagcaatacctgatggagggcagctacaacaaagtgttcctggccaagggtaacatccccgccgagagctacaccttcttcattgacatcctgctcgacactatcagggatgagatcgctgggtgcatcgagaaggcctacgagaaaatccttttcactgaggccacccggatcctcttcttcaacacacccaaaaagatgacagactacgccaagaagcgagggtgggtcctgggccccaacaactactacagttttgccagccagcagcagaagccggaagacaccaccattccctccacagaactggccaaacaggtcatcgagtatgcccggcagctggagatgatcgtctgagccccccgggcactgggtggggcagggcacgagttatttaaaacagttacactgcagggtttcgcccaataaaggtggactgacattccctcttccaggcccttgtctccccagttgggacggcagagagacaagttcttatatctgaagaacttggaggttttggggcattcaggagttggagatagcctccaactgggtcagcctctgtctggtgggcattgctcagggtctcaaacatggacgcccactgtggggccccagcagcactgtggcctgcaggagggcatggccccaggtagggggactgttctagccagctgtggacacataggaatgctggaccagggtaccagattttttcaacaaagggggtgaagtgtcctactaaaaagaataaatgttggcagtgaattaaacaatttttcaaatga

SEQ ID NO: 132329 - DNA, 1053 bp, Artificial Sequence
  derived and/or modified sequence
atgttcatcaagggcagagcccccagagccccccccagagagagaagaagagccaccagaggcggcctgagacaggtggtggccccccccagagccctgggcagcaccagcagaccccacttcagaagagccagcgtgtgcagaagaagatgcagaaagagcggcggcctgctggccgccagcagaaagatggccgccgccgccgtgaacggcgccgccggcttcagcagcagcggccccgccgccaccagcggcgccgtgctgcaggccgccaccggcatgtacgagcagctgaagggcgagtggaacagaaagagccccaacctgagcaagtgcggcgaggagctgggcagactgaagctggtgctgctggagctgaacttcctgcccaccaccggcaccaagctgaccaagcagcagctgatcctggccagagacatcctggagatcggcgcccagtggagcatcctgagaaaggacatccccagcttcgagagatacatggcccagctgaagtgctactacttcgactacaaggagcagctgcccgagagcgcctacatgcaccagctgctgggcctgaacctgctgttcctgctgagccagaacagagtggccgagttccacaccgagctggagagactgcccgccaaggacatccagaccaacgtgtacatcaagcaccccgtgagcctggagcagtacctgatggagggcagctacaacaaggtgttcctggccaagggcaacatccccgccgagagctacaccttcttcatcgacatcctgctggacaccatcagagacgagatcgccggctgcatcgagaaggcctacgagaagatcctgttcaccgaggccaccagaatcctgttcttcaacacccccaagaagatgaccgactacgccaagaagagaggctgggtgctgggccccaacaactactacagcttcgccagccagcagcagaagcccgaggacaccaccatccccagcaccgagctggccaagcaggtgatcgagtacgccagacagctggagatgatcgtgtag

SEQ ID NO: 132330 - DNA, 1053 bp, Artificial Sequence
  derived and/or modified sequence
atgtttataaaaggcagagctccgcgagctcctcctagggagaggaggcgcgccacccgcggcggactgcggcaggtcgtcgccccacccagagctcttgggtcaacaagtcggccccactttaggcgcgcaagcgtttgtagacgcagatgtcgtaaatctgggggcctcctcgctgcctccagaaagatggcggccgctgccgtaaacggggctgcaggattctcctcttcgggcccagctgctacaagcggagcggtcctgcaggccgcgaccggcatgtacgagcagcttaaaggtgaatggaaccgaaagagcccaaacctcagcaaatgcggagaagagctcgggaggctgaagctggtacttctcgagttgaatttcctgccaactacaggtaccaagctaacgaagcagcagctcattctggccagagacattcttgaaattggtgcgcagtggagtatcctcaggaaggatataccatctttcgaacggtatatggcacaactcaagtgttactatttcgattacaaagaacagctcccagaaagcgcctacatgcaccagttgctcggcctcaacttgctgtttttgcttagtcagaatcgcgtggcagagtttcatacagagctggaaaggttgcctgccaaagatatccagaccaacgtatacatcaaacaccccgtttctctggaacagtacctcatggaaggttcctacaacaaagtgttcctcgccaaaggcaacatcccagccgagagttatacgtttttcatcgatattctcctggacaccattcgggacgagatcgccgggtgcatagagaaagcctacgagaaaatactgtttaccgaggctactcggatattgttcttcaatactccaaagaagatgaccgactatgccaagaaacggggctgggttctcggcccaaacaattactacagtttcgcctcacagcaacagaagcccgaggatacaacgatcccctccactgagttggccaagcaggtcatagaatacgcccggcagctcgaaatgattgtctag

SEQ ID NO: 132331 - DNA, 1053 bp, Artificial Sequence
  derived and/or modified sequence
atgttcatcaagggccgggccccccgggccccaccccgggagcggcggcgggccacccggggcggcctgcggcaggtggtggccccaccccgggccctgggcagcaccagccggccccacttccggcgggcctctgtgtgcagaagacgctgcaggaagagcggcggcctgctggccgccagcaggaagatggctgctgctgctgtgaatggagctgctggcttcagcagcagcggccctgctgccaccagcggggctgtgctgcaggccgccaccggcatgtatgagcagctgaagggggagtggaacaggaagagccccaacctgagcaaatgtggggaggagctgggccgcctgaagctggtgctgctggagctgaacttcctgcccaccaccggcaccaagctgaccaagcagcagctgatcctggcccgggacatcctggagatcggggcccagtggagcatcctgaggaaggacatccccagctttgagcgctacatggcccagctgaagtgctactactttgactacaaggagcagctgcctgagagcgcctacatgcaccagctgctgggcctgaacctgctcttcctgctgagccagaacagagtggccgagttccacacagagctggagcggctgcctgccaaggacatccagaccaacgtgtacatcaagcaccctgtgtccctggagcagtacctgatggagggcagctacaacaaggtgttcctggccaagggcaacatcccagctgagagctacaccttcttcatcgacatcctgctggacaccatcagagatgaaattgctggctgcatcgagaaggcctatgagaagatcctcttcacagaggccacccgcatcctcttcttcaacacccccaagaagatgacagattatgccaagaagaggggctgggtgctgggccccaacaactactacagctttgccagccagcagcagaagccagaggacaccaccatccccagcacagagctggccaagcaggtgattgaatatgcccggcagctggagatgattgtgtag

SEQ ID NO: 132332 - DNA, 1053 bp, Artificial Sequence
  derived and/or modified sequence
atgttcatcaagggccgggccccccgggcccccccccgggagcggcgccgcgctacccgtggtggtctcaggcaggtggtggccccgcccagagcacttggaagcactagccgcccccacttccgacgggcatcagtttgtcgcaggcgctgtcgaaagtcaggggggctgttggccgccagccggaagatggctgcagctgctgtgaatggggcagctggattttcatcttctgggccggccgcaacgtcaggcgccgtgctgcaagccgccactggcatgtacgaacagctgaaaggtgaatggaatcgaaaatcccctaacttaagtaagtgcggcgaagaactcggccgcttgaaactagttttacttgaattgaactttcttcccaccactggaacaaaattgactaaacagcagctcattctggctcgagatattctggagatcggagcccagtggagcatacttaggaaggatattccatcctttgagcgctatatggcccagctgaaatgctactattttgactataaggagcaattgcccgagagtgcttacatgcatcagctgctggggctgaacctcttattcctcctgagccagaatcgtgtggccgagtttcataccgaattggagagacttcctgccaaagacatccagacaaatgtatacattaaacaccctgtatccttagagcagtacctgatggagggctcttacaacaaggttttcctggctaagggaaatattcctgccgagagttacacgttcttcattgatattttgttagacacaattcgggacgaaattgcaggctgcatcgagaaagcctatgagaagatcctttttactgaggccactcggatcctattcttcaatacccccaagaaaatgacagattacgcaaagaagcggggctgggtgctagggcctaacaattactactcttttgcatctcaacagcagaaaccagaggataccaccataccatcaacagagctcgccaaacaagtgatcgaatacgccagacagctagaaatgatagtgtag

SEQ ID NO: 132333 - DNA, 1053 bp, Artificial Sequence
  derived and/or modified sequence
atgtttatcaaaggccgagctcctagagcgccaccacgagagcggagaagagccaccagaggaggattgcgccaagtggtggctcccccaagagccttaggctccacctcaaggcctcatttcagaagagccagcgtgtgtcgcaggaggtgtcgtaagagtgggggactgctcgccgctagtcgcaaaatggccgctgccgctgtgaatggggctgccggtttttcgtcttccggacccgctgccacttcaggtgcagtgctgcaggctgctacgggcatgtacgaacagctgaaaggcgaatggaatcgcaaatctcctaacctatccaaatgtggagaagaacttgggagactgaaactggtcctgcttgagcttaattttttaccaacaactggaaccaagctgacgaaacagcagttgattctagctagagacatactcgaaatcggggctcagtggtctatcctacgtaaagacatccctagcttcgaaagatacatggcccagctgaagtgctattatttcgactataaggaacagctacccgaaagcgcctacatgcaccagctgcttggactcaatctgctttttttgctgagtcagaatagagtggccgaatttcacacggagctggagaggttgcccgctaaggatatccagacaaatgtgtatatcaaacaccccgttagcttggaacaataccttatggaaggcagttacaacaaggttttcctggctaaaggcaatatcccagctgaatcttacacgttcttcattgacatactcttagacaccatccgagacgagatagcaggctgtatcgaaaaggcttatgagaagattttgtttactgaagctacccgcattttgtttttcaacactcctaaaaagatgacggattacgccaagaagcgtggatgggtgctcggacccaataattattattcattcgcctcacagcagcagaaacccgaagacaccacaattccatccacagagttagccaagcaggtgattgagtatgccaggcagcttgagatgatagtgtag

SEQ ID NO: 132334 - protein, 207 aa, Artificial Sequence
  derived and/or modified sequence
MSDEEARQSGGSSQAGVVTVSDVQELMRRKEEIEAQIKANYDVLESQKGIGMNEPLVDCEGYPRSDVDLYQVRTARHNIICLQNDHKAVMKQVEEALHQLHARDKEKQARDMAEAHKEAMSRKLGQSESQGPPRAFAKVNSISPGSPASIAGLQVDDEIVEFGSVNTQNFQSLHNIGSVVQHSEGALAPTILLSVSMNLTTPGTSSR

SEQ ID NO: 132335 - protein, 223 aa, Artificial Sequence
  derived and/or modified sequence
MSDEEARQSGGSSQAGVVTVSDVQELMRRKEEIEAQIKANYDVLESQKGIGMNEPLVDCEGYPRSDVDLYQVRTARHNIICLQNDHKAVMKQVEEALHQLHARDKEKQARDMAEAHKEAMSRKLGQSESQGPPRAFAKVNSISPGSPASIAGLQVDDEIVEFGSVNTQNFQSLHNIGSVVQHSEGKPLNVTVIRRGEKHQLRLVPTRWAGKGLLGCNIIPLQR

SEQ ID NO: 132336 - DNA, 624 bp, Artificial Sequence
  derived and/or modified sequence
atgtctgatgaagaggccagacaatctggcggaagtagccaggctggggtggtaacagtcagcgacgtgcaggaactgatgcgaaggaaagaagaaatcgaggcacagatcaaggcgaactacgatgtgttggaatcccagaagggaatcggtatgaatgaaccactggtggattgtgaaggataccctagaagcgatgttgatctgtaccaggtgagaacggctaggcataacatcatctgcctgcagaacgaccataaagccgtcatgaagcaggtggaggaagcgttgcaccagctgcatgccagggataaggaaaagcaagcccgcgacatggcggaagctcataaggaggcgatgagtagaaaattgggccagagcgagagccaagggccaccacgcgcctttgcgaaagtcaatagcattagcccaggctcccccgcctccattgcaggcttgcaggtcgatgacgagattgtggagtttgggtccgtcaatacacagaacttccagtctttacacaatataggttcggtcgtgcagcactctgagggagccctggctccgaccatactgctcagcgtctcaatgaacctgacaaccccgggaacaagctccagatag

SEQ ID NO: 132337 - DNA, 672 bp, Artificial Sequence
  derived and/or modified sequence
atgagtgacgaagaggctaggcagagcgggggttcttcacaagcaggagtagtgaccgtttctgacgtacaggaactgatgcgccggaaagaagagattgaggcgcagatcaaagccaactacgacgtcctggagtcacaaaagggtattggaatgaatgagcctcttgtggattgcgaagggtaccctaggtccgatgtagacctctatcaggtacggaccgctcgacataatatcatttgcctgcagaacgaccataaagctgtcatgaagcaggtggaggaggccttacatcagttacatgcccgggacaaagaaaagcaggccagggacatggctgaagctcacaaagaagccatgtccagaaagttgggacagtcagagagtcagggaccacctcgggcatttgccaaagttaacagcatcagcccagggtctccagcatccattgctggcctacaggttgatgatgaaatcgtcgaattcggatcagtgaacactcagaatttccaatccctccacaacattgggtccgtagtgcaacactctgaaggcaagccccttaacgtgacagtaatccggagaggggagaaacatcaattgcggctggtgccaacaaggtgggcaggtaaagggctccttggatgtaacattataccactacagaggtag

SEQ ID NO: 132338 - DNA, 624 bp, Artificial Sequence
  derived and/or modified sequence
atgtctgatgaggaggcccggcagagcggcggcagcagccaggccggcgtggtgacagtgtctgatgtgcaggagctgatgaggaggaaggaggagattgaggcccagatcaaggccaactatgatgtgctggagagccagaagggcatcggcatgaatgagcccctggtggactgtgagggctaccccaggagtgatgtggacctgtaccaggtgaggacagcccggcacaacatcatctgcctgcagaatgaccacaaggctgtgatgaagcaggtggaggaggccctgcaccagctgcacgcccgggacaaggagaagcaggcccgggacatggccgaggcccacaaggaggccatgagcaggaagctgggccagagcgagagccagggccccccccgggcctttgccaaggtgaacagcatcagccctggcagccctgccagcattgctggcctgcaggtggatgatgaaattgtggagtttggatctgtgaacacccagaacttccagagcctgcacaacatcggctctgtggtgcagcacagcgagggcgccctggcccccaccatcctgctgtctgtgtccatgaacctgaccaccccaggcaccagcagcaggtag

SEQ ID NO: 132339 - DNA, 672 bp, Artificial Sequence
  derived and/or modified sequence
atgtctgatgaggaggcccggcagagcggcggcagcagccaggccggcgtggtgacagtgtctgatgtgcaggagctgatgaggaggaaggaggagattgaggcccagatcaaggccaactatgatgtgctggagagccagaagggcatcggcatgaatgagcccctggtggactgtgagggctaccccaggagtgatgtggacctgtaccaggtgaggacagcccggcacaacatcatctgcctgcagaatgaccacaaggctgtgatgaagcaggtggaggaggccctgcaccagctgcacgcccgggacaaggagaagcaggcccgggacatggccgaggcccacaaggaggccatgagcaggaagctgggccagagcgagagccagggccccccccgggcctttgccaaggtgaacagcatcagccctggcagccctgccagcattgctggcctgcaggtggatgatgaaattgtggagtttggatctgtgaacacccagaacttccagagcctgcacaacatcggctctgtggtgcagcacagcgagggcaagcccctgaatgtgaccgtcatccggcggggggagaagcaccagctgcggctggtgcccacccgctgggccggcaagggcctgctgggctgcaacatcatccccctgcagaggtag

SEQ ID NO: 132340 - DNA, 624 bp, Artificial Sequence
  derived and/or modified sequence
atgagcgacgaggaggcccggcagagcggcggcagcagccaggccggcgtggtgacagtgtccgacgtccaggaactgatgcgccgcaaagaagaaatcgaggcacagatcaaagccaattatgacgtcctagagtctcagaagggaattggcatgaatgaaccgcttgtggattgtgagggctaccctcgttccgatgtagacctctatcaggtgagaaccgccagacacaacatcatctgcttgcaaaatgaccataaggccgtaatgaaacaggtcgaggaagccctgcaccaattacatgcaagggataaggagaagcaggccagagatatggcagaagcccacaaagaggccatgagcaggaaattgggtcaatctgaatctcagggaccaccgagggcgttcgccaaagttaactctatctccccaggtagccccgcctcgatagcaggcctccaagtagatgacgaaattgtggagttcggctcagtgaacacccagaattttcagtccctgcataacattggctcagttgtacagcacagcgaaggagcactggcgcccaccatactgctctcagtctctatgaaccttaccacccccggcacatcatcacgatag

SEQ ID NO: 132341 - DNA, 672 bp, Artificial Sequence
  derived and/or modified sequence
atgagcgacgaggaggcccggcagagcggcggcagcagccaggccggggtggtgacagtgtccgacgtgcaagaactcatgaggcgaaaggaagagattgaggctcagataaaggccaactatgacgtgctcgaatcacagaaaggcatcggcatgaatgagcctcttgtcgattgcgagggctaccctcgctcggatgtcgatctgtaccaggtgcgtaccgcaaggcacaacataatttgcctgcagaacgaccataaagcagtgatgaaacaggtagaggaggcccttcaccaactccacgcacgcgataaggagaagcaggctcgcgacatggcggaggcccataaagaggcaatgagtcgcaaactcgggcagagcgaatctcaaggacctcctagagcttttgctaaggttaacagcatctcaccaggtagtcctgcatcaattgccggactgcaggtggatgatgagatcgtggagtttggatctgtgaatacccagaacttccagtccttgcacaacattgggagtgtggtgcagcacagcgaaggcaagccgttgaacgtcaccgttattcgacgtggagagaaacaccagctgcgcctggtgcctacacggtgggcggggaaggggctcctgggctgcaacattatccccctccagcgttag

SEQ ID NO: 132342 - DNA, 624 bp, Artificial Sequence
  derived and/or modified sequence
atgtcagatgaagaagccagacaaagcggagggagtagccaggccggtgtggtgaccgtgtctgacgtacaggaactgatgaggagaaaggaggaaatcgaagcccagatcaaagctaattacgacgtcctcgaatctcagaagggaattggaatgaatgagcccctagtcgactgcgagggttaccctagatctgacgtagatctctatcaggtgaggactgctcgtcataacattatttgtctgcaaaacgaccacaaggccgtcatgaagcaggttgaggaagcgcttcaccagctccacgccagagacaaggagaagcaggcccgtgacatggccgaagcacacaaggaggccatgtccagaaagttgggtcagagtgagagccagggtcctccccgagcttttgcaaaggtgaactcgatctctcctggtagccccgctagtatcgcagggcttcaggtggacgacgagatcgtggaatttggcagtgttaacacacaaaatttccaaagccttcacaacatcggctctgtagtgcagcattccgagggggcacttgccccaacaatcctgctttcagtctcaatgaacttaacaacccccggaacaagtagtcgatag

SEQ ID NO: 132343 - DNA, 672 bp, Artificial Sequence
  derived and/or modified sequence
atgtcagatgaggaggccagacaatcaggaggctcatcgcaggcaggggtggttaccgtgtccgatgtgcaggagctgatgcggaggaaggaggagattgaggctcagataaaagccaattacgacgttctcgaaagccagaaagggattggaatgaatgaacccttagtggattgtgagggctatcctaggtcagacgtggacttgtatcaagtgcgaactgcccgacataacatcatctgcctacagaacgaccacaaagcggtgatgaagcaggtggaggaagcactgcatcaactccatgcaagagataaagaaaagcaggccagagacatggctgaggcccataaagaggccatgtccaggaaactcggccagtcagagagtcaggggcctccccgagctttcgcgaaggtgaactctattagtccgggaagtcctgcctccatagcaggtctccaagtggacgatgaaatcgtcgagttcggctccgtcaacacacaaaatttccagtccctccataatattggatcagtcgtgcaacattccgagggtaaacccttgaatgtcaccgtgatccgcaggggagaaaagcatcagctccgcctggtgcccacaagatgggctgggaaagggttactaggttgtaatataatcccactgcaacggtag

SEQ ID NO: 132344 - DNA, 741 bp, Artificial Sequence
  derived and/or modified sequence
cgcgttcgcggacggctgtggtgttttggcgcatgggcggagccgtagttacggtcgactggggcgtcgtccctagcccgggagccgggtctctggagtcgcggcccggggttcacgatgtccgacgaggaagcgaggcagagcggaggctcctcgcaggccggcgtcgtgactgtcagcgacgtccaggagctgatgcggcgcaaggaggagatagaagcgcagatcaaggccaactatgacgtgctggaaagccaaaaaggcattgggatgaacgagccgctggtggactgtgagggctacccccggtcagacgtggacctgtaccaagtccgcaccgccaggcacaacatcatatgcctgcagaatgatcacaaggcagtgatgaagcaggtggaggaggccctgcaccagctgcacgctcgcgacaaggagaagcaggcccgggacatggctgaggcccacaaagaggccatgagccgcaaactgggtcagagtgagagccagggccctccacgggccttcgccaaagtgaacagcatcagccccggctccccagccagcatcgcgggtctgcaagtggatgatgagattgtggagttcggctctgtgaacacccagaacttccagtcactgcataacattggcagtgtggtgcagcacagtgagggggccctggcacccaccatcctactttctgtctctatgaatttgactactccagggacctcatctaggtga

SEQ ID NO: 132345 - DNA, 2784 bp, Artificial Sequence
  derived and/or modified sequence
gactgttctcgcgttcgcggacggctgtggtgttttggcgcatgggcggagccgtagttacggtcgactggggcgtcgtccctagcccgggagccgggtctctggagtcgcggcccggggttcacgatgtccgacgaggaagcgaggcagagcggaggctcctcgcaggccggcgtcgtgactgtcagcgacgtccaggagctgatgcggcgcaaggaggagatagaagcgcagatcaaggccaactatgacgtgctggaaagccaaaaaggcattgggatgaacgagccgctggtggactgtgagggctacccccggtcagacgtggacctgtaccaagtccgcaccgccaggcacaacatcatatgcctgcagaatgatcacaaggcagtgatgaagcaggtggaggaggccctgcaccagctgcacgctcgcgacaaggagaagcaggcccgggacatggctgaggcccacaaagaggccatgagccgcaaactgggtcagagtgagagccagggccctccacgggccttcgccaaagtgaacagcatcagccccggctccccagccagcatcgcgggtctgcaagtggatgatgagattgtggagttcggctctgtgaacacccagaacttccagtcactgcataacattggcagtgtggtgcagcacagtgaggggaagcccctgaatgtgacagtgatccgcaggggggaaaaacaccagcttagacttgttccaacacgctgggcaggaaaaggactgctgggctgcaacattattcctctgcaaagatgattgtccctggggaacagtaacaggaaagcatcttcccttgccctggacttgggtctagggatttccaacttgtcttctctccctgaagcataaggatctggaagaggcttgtaacctgaacttctgtgtggtggcagtactgtggcccaccagtgtaatctccctggattaaggcattcttaaaaacttaggcttggcctctttcacaaattaggccacggccctaaataggaattccctggattgtgggcaagtgggcggaagttattctggcaggtactggtgtgattattattattatttttaataaagagttttacagtgctgatatgaccctgttgtcaccccagctgaatttcttatgaccctcccaaaccaaagctcagatggggtcagaagagcttcatagaaagttgggcaaaacaggctagcaattgcaaagtcaggctttgaccaacatatttctttgcactgaggccttgctgctgtggatacggaaatggttaagtactgtgcttcctcagcagctgggctgtcagggccatagtagctccctttggagaacagggaaagcctggaggcttcccaggtggcccagcgtggtgtcctgtcagcttcctctttaggaacccaccagagggcagcaagctcctttcacttcgctagtaagaacccctccgtttttgtgtgtttttgtttttgttttctggagacaaggtcttgctttgtcacccaggctggagtgcagtgtcgtgatcaaggttcactgaagccttgacgctgtgggcactgcctcagccgcccaagtatctgggaccacaggcgtgcaccaccatgcatagctaatttattttttgtagagacagggtctccctgtgttgaccaggttggtctcgaactcctgggctcaagcagtcctcctgccttggcctcctaaagtgctgggatcacaggcgtgagccactgcgcccagcccactgctagtttgactttttataattgaacctcctggctatgccctgagatcagcgctattttgtaaaccgctgaggtatggataggaacgagtagatcagacctcttgaaaatgcttattcttcctcccttttattttttgtctcttttaagatggtaaaatggttctcagggattcctgccaatactttgaattattttttcctctccatggtatcagtgttcatttccccagttcttgcacaccgctttctgttttggcagttctgccaggcaagccctgtgttccttgggactggttttgctgtggttggatacagataccagcttgccttgatgggattggtattgctgtgtgcttccagccacaggttctcacactcaattccaaagccttcctattgggcgaattccctcaaactctatttgacctgacagccatacgtattcccctctggtagccacagacatgctgtgtttaccaatgtttgctgtttaaattgcatgttctaattccacgtatcttccagtctcttttataaagtctcagactataataaacacagcttgcccagtttatcctttcttttttattttaagatgtatgcatattaatcaatttaccatcactggggcatggcagtgtgggcggggagaattattcacattctcctaaaatgacagcagcagagagccttctgcctcagtggctctggctggtttcctgcaggggtcccagtggaaacccgtgtggccacctgttgccgtcttccatgagatgttagtggagagccactttgacgtggaatgatcctaatagatatagccagaccggttttgcggaaacgctttgtgctgagaaccgcaagctggtgcaccctgtgtcatatctgcccccagccagctggaattgtctgcaacacgcggtgcccggtgaggaggcaggcaggacggttgtgtgctgcatccatgagacctggaaattcagtttgcttttggaaaagagcattg

SEQ ID NO: 132346 - DNA, 624 bp, Artificial Sequence
  derived and/or modified sequence
atgagcgacgaggaggccagacagagcggcggcagcagccaggccggcgtggtgaccgtgagcgacgtgcaggagctgatgagaagaaaggaggagatcgaggcccagatcaaggccaactacgacgtgctggagagccagaagggcatcggcatgaacgagcccctggtggactgcgagggctaccccagaagcgacgtggacctgtaccaggtgagaaccgccagacacaacatcatctgcctgcagaacgaccacaaggccgtgatgaagcaggtggaggaggccctgcaccagctgcacgccagagacaaggagaagcaggccagagacatggccgaggcccacaaggaggccatgagcagaaagctgggccagagcgagagccagggcccccccagagccttcgccaaggtgaacagcatcagccccggcagccccgccagcatcgccggcctgcaggtggacgacgagatcgtggagttcggcagcgtgaacacccagaacttccagagcctgcacaacatcggcagcgtggtgcagcacagcgagggcgccctggcccccaccatcctgctgagcgtgagcatgaacctgaccacccccggcaccagcagcagatag

SEQ ID NO: 132347 - DNA, 672 bp, Artificial Sequence
  derived and/or modified sequence
atgagcgacgaggaggccagacagagcggcggcagcagccaggccggcgtggtgaccgtgagcgacgtgcaggagctgatgagaagaaaggaggagatcgaggcccagatcaaggccaactacgacgtgctggagagccagaagggcatcggcatgaacgagcccctggtggactgcgagggctaccccagaagcgacgtggacctgtaccaggtgagaaccgccagacacaacatcatctgcctgcagaacgaccacaaggccgtgatgaagcaggtggaggaggccctgcaccagctgcacgccagagacaaggagaagcaggccagagacatggccgaggcccacaaggaggccatgagcagaaagctgggccagagcgagagccagggcccccccagagccttcgccaaggtgaacagcatcagccccggcagccccgccagcatcgccggcctgcaggtggacgacgagatcgtggagttcggcagcgtgaacacccagaacttccagagcctgcacaacatcggcagcgtggtgcagcacagcgagggcaagcccctgaacgtgaccgtgatcagaagaggcgagaagcaccagctgagactggtgcccaccagatgggccggcaagggcctgctgggctgcaacatcatccccctgcagagatag

SEQ ID NO: 132348 - protein, 226 aa, Artificial Sequence
  derived and/or modified sequence
MEGCVSNLMVCNLAYSGKLEELKESILADKSLATRTDQDSRTALHWACSAGHTEIVEFLLQLGVPVNDKDDAGWSPLHIAASAGRDEIVKALLGKGAQVNAVNQNGCTPLHYAASKNRHEIAVMLLEGGANPDAKDHYEATAMHRAAAKGNLKMIHILLYYKASTNIQDTEGNTPLHLACDEERVEEAKLLVSQGASIYIENKEEKTPLQVAKGGLGLILKRMVEG

SEQ ID NO: 132349 - protein, 193 aa, Artificial Sequence
  derived and/or modified sequence
MEGCVSNLMVCNLAYSGKLEELKESILADKSLATRTDQAGWSPLHIAASAGRDEIVKALLGKGAQVNAVNQNGCTPLHYAASKNRHEIAVMLLEGGANPDAKDHYEATAMHRAAAKGNLKMIHILLYYKASTNIQDTEGNTPLHLACDEERVEEAKLLVSQGASIYIENKEEKTPLQVAKGGLGLILKRMVEG

SEQ ID NO: 132350 - protein, 185 aa, Artificial Sequence
  derived and/or modified sequence
MEGCVSNLMVCNLAYSGKLEELKESILADKSLATRTDQDSRTALHWACSAGHTEIVEFLLQLGVPVNDKDDAASKNRHEIAVMLLEGGANPDAKDHYEATAMHRAAAKGNLKMIHILLYYKASTNIQDTEGNTPLHLACDEERVEEAKLLVSQGASIYIENKEEKTPLQVAKGGLGLILKRMVEG

SEQ ID NO: 132351 - DNA, 582 bp, Artificial Sequence
  derived and/or modified sequence
atggagggctgcgtgagcaacctgatggtgtgcaacctggcctacagcggcaagctggaggagctgaaggagagcatcctggccgacaagagcctggccaccagaaccgaccaggccggctggagccccctgcacatcgccgccagcgccggcagagacgagatcgtgaaggccctgctgggcaagggcgcccaggtgaacgccgtgaaccagaacggctgcacccccctgcactacgccgccagcaagaacagacacgagatcgccgtgatgctgctggagggcggcgccaaccccgacgccaaggaccactacgaggccaccgccatgcacagagccgccgccaagggcaacctgaagatgatccacatcctgctgtactacaaggccagcaccaacatccaggacaccgagggcaacacccccctgcacctggcctgcgacgaggagagagtggaggaggccaagctgctggtgagccagggcgccagcatctacatcgagaacaaggaggagaagacccccctgcaggtggccaagggcggcctgggcctgatcctgaagagaatggtggagggctag

SEQ ID NO: 132352 - DNA, 558 bp, Artificial Sequence
  derived and/or modified sequence
atggagggctgcgtgagcaacctgatggtgtgcaacctggcctacagcggcaagctggaggagctgaaggagagcatcctggccgacaagagcctggccaccagaaccgaccaggacagcagaaccgccctgcactgggcctgcagcgccggccacaccgagatcgtggagttcctgctgcagctgggcgtgcccgtgaacgacaaggacgacgccgccagcaagaacagacacgagatcgccgtgatgctgctggagggcggcgccaaccccgacgccaaggaccactacgaggccaccgccatgcacagagccgccgccaagggcaacctgaagatgatccacatcctgctgtactacaaggccagcaccaacatccaggacaccgagggcaacacccccctgcacctggcctgcgacgaggagagagtggaggaggccaagctgctggtgagccagggcgccagcatctacatcgagaacaaggaggagaagacccccctgcaggtggccaagggcggcctgggcctgatcctgaagagaatggtggagggctag

SEQ ID NO: 132353 - DNA, 713 bp, Artificial Sequence
  derived and/or modified sequence
atggaggggtgtgtgtctaacctaatggtctgcaacctggcctacagcgggaagctggaagagttgaaggagagtattctggccgataaatccctggctactagaactgaccaggcaggttggtctcctcttcatattgcggcttctgctggccgggatgagattgtaaaagcccttctgggaaaaggtgctcaagtgaatgctgtcaatcaaaatggctgtactcccttacattatgcagcttcgaaaaacaggcatgagatcgctgtcatgttactggaaggcggggctaatccagatgctaaggaccattatgaggctacagcaatgcaccgggcagcagccaagggtaacttgaagatgattcatatccttctgtactacaaagcatccacaaacatccaagacactgagggtaacactcctctacacttagcctgtgatgaggagagagtggaagaagcaaaactgctggtgtcccaaggagcaagtatttacattgagaataaagaagaaaagacacccctgcaagtggccaaaggtggcctgggtttaatactcaagagaatggtggaaggttaaacagcttggatttattcttactttgtatgttgtgttgttgtccccagtgtcctacaaactaatgtatttgtgcacaagacatcatctatgaatgatgaagttttctcaccttcaaagtcttataaacatgt

SEQ ID NO: 132354 - DNA, 582 bp, Artificial Sequence
  derived and/or modified sequence
atggaaggctgtgtttctaatttaatggtgtgtaatctcgcttactcaggcaagctcgaggagttaaaggagtccatactggcagacaaaagccttgctaccaggaccgaccaagctggctggagcccactgcacattgccgctagtgccggccgcgatgagattgtcaaggctctgctgggaaagggggcccaggttaacgcggtgaatcagaacggatgcacccctcttcattacgctgcatctaaaaaccggcacgaaattgccgtgatgctgcttgaaggaggagctaatccagatgctaaagaccactacgaagcgacagcgatgcaccgggccgccgcgaaaggtaatctcaagatgattcatattctactctattataaagccagcaccaatatccaggacacagaggggaacacgcctttacatcttgcctgtgatgaagagagggtcgaggaagcgaagttgctcgttagccagggtgctagtatatatatcgaaaataaggaggaaaagacccccttgcaggtcgctaaaggtggtttaggactgattcttaagcgaatggtggaaggttag

SEQ ID NO: 132355 - DNA, 558 bp, Artificial Sequence
  derived and/or modified sequence
atggaaggctgtgttagcaacctcatggtttgtaacctcgcttattctgggaaactcgaagagttgaaagagtcgatacttgcggacaaaagtctcgccacacgcacagatcaagactctcggacggcgctgcattgggcttgcagcgctggccacaccgagattgtcgagttcctcctccaattgggagtccccgtgaatgataaggatgatgccgccagcaaaaataggcatgagattgcagtgatgttgttggaaggaggtgccaaccccgatgccaaggaccattacgaagcaacagccatgcacagggcagcagccaaaggcaatctcaaaatgatccacatcctgctatattacaaggcgtctactaatattcaagacaccgaagggaataccccattacacctcgcgtgtgacgaagagcgtgttgaagaggcaaagttactcgtttcacagggtgcttcaatttatatagagaataaggaggagaagaccccactgcaggtagcaaagggcggattaggattgatcttgaagcggatggtggaggggtag

SEQ ID NO: 132356 - DNA, 779 bp, Artificial Sequence
  derived and/or modified sequence
aagtagttgctgggacagcgaaatggaggggtgtgtgtctaacctaatggtctgcaacctggcctacagcgggaagctggaagagttgaaggagagtattctggccgataaatccctggctactagaactgaccaggacagcagaactgcattgcactgggcatgctcagctggacatacagaaattgttgaatttttgttgcaacttggagtgccagtgaatgataaagacgatgcagcttcgaaaaacaggcatgagatcgctgtcatgttactggaaggcggggctaatccagatgctaaggaccattatgaggctacagcaatgcaccgggcagcagccaagggtaacttgaagatgattcatatccttctgtactacaaagcatccacaaacatccaagacactgagggtaacactcctctacacttagcctgtgatgaggagagagtggaagaagcaaaactgctggtgtcccaaggagcaagtatttacattgagaataaagaagaaaagacacccctgcaagtggccaaaggtggcctgggtttaatactcaagagaatggtggaaggttaaacagcttggatttattcttactttgtatgttgtgttgttgtccccagtgtcctacaaactaatgtatttgtgcacaagacatcatctatgaatgatgaagttttctcaccttcaaagtcttataaacatgttgactcttgttcctgctgagttacttgttcgaagcttacagcttgttttccaggcatcgaataactgt

SEQ ID NO: 132357 - DNA, 878 bp, Artificial Sequence
  derived and/or modified sequence
aagtagttgctgggacagcgaaatggaggggtgtgtgtctaacctaatggtctgcaacctggcctacagcgggaagctggaagagttgaaggagagtattctggccgataaatccctggctactagaactgaccaggacagcagaactgcattgcactgggcatgctcagctggacatacagaaattgttgaatttttgttgcaacttggagtgccagtgaatgataaagacgatgcagcttcgaaaaacaggcatgagatcgctgtcatgttactggaaggcggggctaatccagatgctaaggaccattatgaggctacagcaatgcaccgggcagcagccaaggacacttagcctgtgatgaggagagagtggaagaagcaaaactgctggtgtcccaaggagcaagtatttacattgagaataaagaagaaaagacacccctgcaagtggccaaaggtggcctgggtttaatactcaagagaatggtggaaggttaaacagcttggatttattcttactttgtatgttgtgttgttgtccccagtgtcctacaaactaatgtatttgtgcacaagacatcatctatgaatgatgaagttttctcaccttcaaagtcttataaacatgttgactcttgttcctgctgagttacttgttcgaagcttacagcttgttttccaggcatcgaataactgttgagattgttctactgttgtcgtatattcttctatattgaattctggttaatttggagtaactaattctgtggctgttgtgagtcttcagcaccctcccatgtaccttatatccctctctgaaacagaacagctccaatagcaacaagctagttgttctgccagatgtttctatgtgg

SEQ ID NO: 132358 - DNA, 582 bp, Artificial Sequence
  derived and/or modified sequence
atggagggctgtgtgagcaacctgatggtgtgcaacctggcctacagcggcaagctggaggagctgaaggagagcatcctggccgacaagagcctggccaccaggacagaccaggccggctggagccccctgcacatcgccgccagcgctggaagagatgaaattgtgaaggccctgctgggcaagggggcccaggtgaatgctgtgaaccagaatggctgcacccccctgcactacgccgccagcaagaacagacatgaaattgctgtgatgctgctggagggcggggccaacccagatgccaaggaccactatgaggccacagccatgcacagagctgctgccaagggcaacctgaagatgatccacatcctgctgtactacaaggccagcaccaacatccaggacacagagggcaacacccccctgcacctggcctgtgatgaggagcgggtggaggaggccaagctgctggtgtcccagggcgccagcatctacatcgagaacaaggaggagaagacccccctgcaggtggccaagggcggcctgggcctcatcctgaagaggatggtggagggctag

SEQ ID NO: 132359 - DNA, 558 bp, Artificial Sequence
  derived and/or modified sequence
atggagggctgtgtgagcaacctgatggtgtgcaacctggcctacagcggcaagctggaggagctgaaggagagcatcctggccgacaagagcctggccaccaggacagaccaggacagcaggacagccctgcactgggcctgcagcgctggccacacagaaattgtggagttcctgctgcagctgggcgtgcctgtgaatgacaaggatgatgctgccagcaagaacagacatgaaattgctgtgatgctgctggagggcggggccaacccagatgccaaggaccactatgaggccacagccatgcacagagctgctgccaagggcaacctgaagatgatccacatcctgctgtactacaaggccagcaccaacatccaggacacagagggcaacacccccctgcacctggcctgtgatgaggagcgggtggaggaggccaagctgctggtgtcccagggcgccagcatctacatcgagaacaaggaggagaagacccccctgcaggtggccaagggcggcctgggcctcatcctgaagaggatggtggagggctag

SEQ ID NO: 132360 - DNA, 1546 bp, Artificial Sequence
  derived and/or modified sequence
attggtgaagctctaacggctgttttgactggcgtagccggagccggcgacgtgaggcgggcgttgctcgcgcgacaagtagttgctgggacagcgaaatggaggggtgtgtgtctaacctaatggtctgcaacctggcctacagcgggaagctggaagagttgaaggagagtattctggccgataaatccctggctactagaactgaccaggacagcagaactgcattgcactgggcatgctcagctggacatacagaaattgttgaatttttgttgcaacttggagtgccagtgaatgataaagacgatgcaggttggtctcctcttcatattgcggcttctgctggccgggatgagattgtaaaagcccttctgggaaaaggtgctcaagtgaatgctgtcaatcaaaatggctgtactcccttacattatgcagcttcgaaaaacaggcatgagatcgctgtcatgttactggaaggcggggctaatccagatgctaaggaccattatgaggctacagcaatgcaccgggcagcagccaagggtaacttgaagatgattcatatccttctgtactacaaagcatccacaaacatccaagacactgagggtaacactcctctacacttagcctgtgatgaggagagagtggaagaagcaaaactgctggtgtcccaaggagcaagtatttacattgagaataaagaagaaaagacacccctgcaagtggccaaaggtggcctgggtttaatactcaagagaatggtggaaggttaaacagcttggatttattcttactttgtatgttgtgttgttgtccccagtgtcctacaaactaatgtatttgtgcacaagacatcatctatgaatgatgaagttttctcaccttcaaagtcttataaacatgttgactcttgttcctgctgagttacttgttcgaagcttacagcttgttttccaggcatcgaataactgttgagattgttctactgttgtcgtatattcttctatattgaattctggttaatttggagtaactaattctgtggctgttgtgagtcttcagcaccctcccatgtaccttatatccctctctgaaacagaacagctccaatagcaacaagctagttgttctgccagatgtttctatgtggattctgtaatgttcctccatacagttaaaacatcctaacttgtttttcaagctcactcaggcctacgccaaacgtttctgttttttttaaccatgaggtttaatttatttttgtgataggagggatatttacatattttagtggaccacattttaagttggatggtgtgctctaaaatactgaaaaacaatagcccatatacctatgtatttgtttttgatgggttgtttactctgaaataaaatgtatggttttcttaaaaggaagttttaaagtacctattttgtgtcatcctgtattgaaaagaatgtcaagcttgttaaaatgacatgtaacaaaaatgtattttgatttgtatttcagaaactaaaaaataaaatgttgaaagaa

SEQ ID NO: 132361 - DNA, 582 bp, Artificial Sequence
  derived and/or modified sequence
atggagggctgcgtgagcaacctgatggtgtgcaacctggcctactctggcaagctagaagagctgaaggagtccattctagcggataaatcattagcaactaggacagaccaggccggttggagcccattgcacattgctgcctccgccgggagggatgagatcgtaaaagcactcctcggcaagggcgcgcaggtcaacgctgttaaccagaatgggtgtacccccctccactatgcagcgagcaagaacaggcacgagatcgcagtcatgctgttggagggtggcgctaaccctgatgccaaagatcattatgaggctacggccatgcacagagcagctgccaaaggcaaccttaagatgatccatatcctactgtactacaaggcttccacaaatatccaggatacagagggtaatactccacttcacttagcgtgcgacgaggagcgagtggaggaggcgaagctgctggtttctcagggcgccagtatatacatcgaaaataaggaggagaagactccactacaagtggcaaaaggaggtctggggctgatcctcaagcggatggtcgaaggatag

SEQ ID NO: 132362 - DNA, 558 bp, Artificial Sequence
  derived and/or modified sequence
atggagggctgcgtgagcaacctgatggtgtgcaacctggcctactcggggaaactggaagaactaaaagagagcatactggccgataaaagcctggccaccagaaccgaccaggattctagaacagctttacactgggcgtgcagtgccggacacacagagatagtcgaatttctgctccagctgggcgtccctgtcaatgacaaggacgacgcggcatccaagaaccgacacgaaatcgccgttatgttgcttgagggtggtgccaaccccgacgccaaagatcactacgaggctactgccatgcatcgagccgctgccaaggggaacctaaaaatgattcatattctcttgtactacaaggcaagcaccaatatacaggacacggaaggcaacactcccctgcacctcgcgtgcgacgaggagcgcgtagaagaggcgaagttactcgtgtcccagggggcatccatttacatcgagaacaaggaggagaagaccccactccaggtggccaaaggaggcctgggcctcatcctcaaacggatggtcgagggctag

SEQ ID NO: 132363 - DNA, 582 bp, Artificial Sequence
  derived and/or modified sequence
atggaaggctgtgtatctaacctgatggtgtgcaaccttgcttacagtggaaagctggaggagcttaaggaatccatactcgccgacaagagcctcgccacaagaactgaccaggccggatggagcccactgcacatcgccgctagcgctggccgtgacgagatagtgaaagctttgttgggtaaaggggcacaagtgaatgccgtgaaccagaatgggtgtaccccacttcactacgccgcatccaagaatcgacacgaaatcgccgtgatgctcctcgaagggggtgccaatcccgatgccaaagaccactatgaagccaccgcaatgcaccgggcagcagccaagggaaacctaaagatgattcacattctgctgtactacaaagcatctactaacatccaggataccgagggcaacacacccctgcacctggcatgcgacgaagaaagagtagaagaggccaagttactggtgtcacagggtgcttctatctacatagaaaataaggaagaaaaaaccccactgcaagttgccaaaggaggcctaggtcttatcctgaaaagaatggtggaaggttag

SEQ ID NO: 132364 - DNA, 558 bp, Artificial Sequence
  derived and/or modified sequence
atggagggctgtgtgtccaacctgatggtctgtaacttggcatactctggaaaactggaagagctgaaagaatccatcctcgccgataaatcgctagcaactcgcaccgatcaggacagtaggacggcccttcactgggcttgttccgccggacacaccgagatcgtagaatttctccttcagctcggtgtgcctgtaaacgacaaagacgatgcagcttctaagaatagacacgagatcgcggtgatgcttctggagggtggagccaatcccgacgctaaagatcattatgaggcaacagctatgcatagggcagctgccaagggaaatctcaagatgatacacatcctgctgtactacaaagcctcaacgaacatacaggataccgaaggtaacactcccctacacctggcttgcgacgaggaaagagttgaggaggctaaattgcttgtctcacaaggagccagtatatatatagagaataaggaggagaaaacgcctctgcaggtcgccaaaggtggattgggccttatcctgaaacgaatggttgagggctag

SEQ ID NO: 132365 - DNA, 681 bp, Artificial Sequence
  derived and/or modified sequence
atggagggctgcgtgagcaacctgatggtgtgcaacctggcctacagcggcaagctggaggagctgaaggagagcatcctggccgacaagagcctggccaccagaaccgaccaggacagcagaaccgccctgcactgggcctgcagcgccggccacaccgagatcgtggagttcctgctgcagctgggcgtgcccgtgaacgacaaggacgacgccggctggagccccctgcacatcgccgccagcgccggcagagacgagatcgtgaaggccctgctgggcaagggcgcccaggtgaacgccgtgaaccagaacggctgcacccccctgcactacgccgccagcaagaacagacacgagatcgccgtgatgctgctggagggcggcgccaaccccgacgccaaggaccactacgaggccaccgccatgcacagagccgccgccaagggcaacctgaagatgatccacatcctgctgtactacaaggccagcaccaacatccaggacaccgagggcaacacccccctgcacctggcctgcgacgaggagagagtggaggaggccaagctgctggtgagccagggcgccagcatctacatcgagaacaaggaggagaagacccccctgcaggtggccaagggcggcctgggcctgatcctgaagagaatggtggagggctag

SEQ ID NO: 132366 - DNA, 681 bp, Artificial Sequence
  derived and/or modified sequence
atggaaggttgcgtctcgaacttgatggtctgtaaccttgcatactctggtaagctggaggaactaaaagaaagtatcctggctgacaaatccctagccacacgcacagaccaggattctcggactgcactgcactgggcttgttccgctggacataccgagatcgtggagttccttttgcagttgggtgtcccagtgaacgacaaagatgacgcaggatggtccccactgcatatagcagctagtgccggtagagacgagatcgtcaaagcccttctgggcaaaggtgcacaggtaaacgcagtgaatcagaacggctgcaccccattgcactatgcggcctcaaagaacaggcacgagattgctgtgatgttgttggaaggaggagctaaccccgacgccaaagatcactacgaagcaacagctatgcatcgggcagccgcaaaggggaatttgaagatgatccatattctcctttactacaaagcatcaacaaatattcaggataccgaggggaacactcctctgcatcttgcctgtgacgaggaacgggtcgaggaagccaagctgttagtgtcccagggggcctctatctatatcgaaaacaaggaggagaagactccactccaagtcgcgaagggaggacttggcttgatcctgaagaggatggtggagggatag

SEQ ID NO: 132367 - DNA, 681 bp, Artificial Sequence
  derived and/or modified sequence
atggagggctgtgtgagcaacctgatggtgtgcaacctggcctacagcggcaagctggaggagctgaaggagagcatcctggccgacaagagcctggccaccaggacagaccaggacagcaggacagccctgcactgggcctgcagcgctggccacacagaaattgtggagttcctgctgcagctgggcgtgcctgtgaatgacaaggatgatgctggctggagccccctgcacatcgccgccagcgctggaagagatgagatcgtgaaggccctgctgggcaaaggagcccaggtgaatgctgtgaaccagaatggctgcacccccctgcactatgctgccagcaagaacagacatgaaattgctgtgatgctgctggagggcggggccaacccagatgccaaggaccactatgaggccacagccatgcacagagctgctgccaagggcaacctgaagatgatccacatcctgctgtactacaaggccagcaccaacatccaggacacagagggcaacacccccctgcacctggcctgtgatgaggagcgggtggaggaggccaagctgctggtgtcccagggcgccagcatctacatcgagaacaaggaggagaagacccccctgcaggtggccaagggcggcctgggcctcatcctgaagaggatggtggagggctag

SEQ ID NO: 132368 - DNA, 681 bp, Artificial Sequence
  derived and/or modified sequence
atggagggctgcgtgagcaacctgatggtgtgcaacctggcctacagcggaaagttggaggagctcaaggaatcaattctcgcagataaaagtctagccacaagaaccgatcaagattctaggaccgcattgcattgggcttgttcggccggacatacagaaatcgttgaatttctacttcagctcggcgtgccagtaaatgataaagacgacgccggatggtcgcctctacatatagccgcctccgctggacgggatgagattgtgaaggcgctgctgggaaagggagcccaggtcaacgcagtgaaccagaacgggtgtacccctctccactatgcagccagcaagaataggcacgagatcgctgtgatgcttttggaggggggagctaatcctgatgccaaggaccattacgaggccacagccatgcaccgagctgctgctaagggcaacctgaaaatgatacacatcctcctctattacaaggcctcaacaaatatccaggataccgagggcaacacccctctccacttagcctgcgacgaggagcgcgtcgaagaggctaagttactcgtgtctcaaggcgccagcatctacattgaaaataaagaagagaagacccctctgcaggttgccaagggcggattaggtctgatactgaaaaggatggtagagggctag

SEQ ID NO: 132369 - DNA, 681 bp, Artificial Sequence
  derived and/or modified sequence
atggaaggctgtgtttcgaatctcatggtttgcaacctcgcttattccgggaaactggaagagcttaaagaaagcatcctggccgataaatcactggcaacccgaacagatcaagacagtcgcacagctctgcactgggcttgttctgcaggccacaccgagatcgtcgagttccttcttcaattgggggtgcctgtaaacgataaggatgatgctgggtggagcccactccacattgccgcttcagccggaagggatgagatcgtcaaggcccttcttggcaagggtgctcaggtgaatgctgtgaaccagaatggttgcactccgctccattacgcggcttctaaaaatcgccatgagattgccgtaatgctgcttgagggcggagcaaatccagacgccaaagatcactacgaggccactgccatgcacagagcagctgcaaagggaaatttgaaaatgatccatatactgctttactataaggccagcacaaatatccaggacacggagggcaatactccattacaccttgcttgcgacgaggaaagagtcgaagaggccaagttgctcgtaagccagggcgcttcaatttacatagagaacaaggaggagaaaactcctcttcaggtggccaaaggcggactcggcctgatcttgaagcgaatggtagaaggatag

SEQ ID NO: 132370 - protein, 456 aa, Artificial Sequence
  derived and/or modified sequence
MADGGSERADGRIVKMEVDYSATVDQRLPECAKLAKEGRLQEVIETLLSLEKQTRTASDMVSTSRILVAVVKMCYEAKEWDLLNENIMLLSKRRSQLKQAVAKMVQQCCTYVEEITDLPIKLRLIDTLRMVTEGKIYVEIERARLTKTLATIKEQNGDVKEAASILQELQVETYGSMEKKERVEFILEQMRLCLAVKDYIRTQIISKKINTKFFQEENTEKLKLKYYNLMIQLDQHEGSYLSICKHYRAIYDTPCIQAESEKWQQALKSVVLYVILAPFDNEQSDLVHRISGDKKLEEIPKYKDLLKLFTTMELMRWSTLVEDYGMELRKGSLESPATDVFGSTEEGEKRWKDLKNRVVEHNIRIMAKYYTRITMKRMAQLLDLSVDESEAFLSNLVVNKTIFAKVDRLAGIINFQRPKDPNNLLNDWSQKLNSLMSLVNKTTHLIAKEEMIHNLQ

SEQ ID NO: 132371 - DNA, 1371 bp, Artificial Sequence
  derived and/or modified sequence
atggccgacggcggcagcgagagagccgacggcagaatcgtgaagatggaggtggactacagcgccaccgtggaccagagactgcccgagtgcgccaagctggccaaggagggcagactgcaggaggtgatcgagaccctgctgagcctggagaagcagaccagaaccgccagcgacatggtgagcaccagcagaatcctggtggccgtggtgaagatgtgctacgaggccaaggagtgggacctgctgaacgagaacatcatgctgctgagcaagagaagaagccagctgaagcaggccgtggccaagatggtgcagcagtgctgcacctacgtggaggagatcaccgacctgcccatcaagctgagactgatcgacaccctgagaatggtgaccgagggcaagatctacgtggagatcgagagagccagactgaccaagaccctggccaccatcaaggagcagaacggcgacgtgaaggaggccgccagcatcctgcaggagctgcaggtggagacctacggcagcatggagaagaaggagagagtggagttcatcctggagcagatgagactgtgcctggccgtgaaggactacatcagaacccagatcatcagcaagaagatcaacaccaagttcttccaggaggagaacaccgagaagctgaagctgaagtactacaacctgatgatccagctggaccagcacgagggcagctacctgagcatctgcaagcactacagagccatctacgacaccccctgcatccaggccgagagcgagaagtggcagcaggccctgaagagcgtggtgctgtacgtgatcctggcccccttcgacaacgagcagagcgacctggtgcacagaatcagcggcgacaagaagctggaggagatccccaagtacaaggacctgctgaagctgttcaccaccatggagctgatgagatggagcaccctggtggaggactacggcatggagctgagaaagggcagcctggagagccccgccaccgacgtgttcggcagcaccgaggagggcgagaagagatggaaggacctgaagaacagagtggtggagcacaacatcagaatcatggccaagtactacaccagaatcaccatgaagagaatggcccagctgctggacctgagcgtggacgagagcgaggccttcctgagcaacctggtggtgaacaagaccatcttcgccaaggtggacagactggccggcatcatcaacttccagagacccaaggaccccaacaacctgctgaacgactggagccagaagctgaacagcctgatgagcctggtgaacaagaccacccacctgatcgccaaggaggagatgatccacaacctgcagtag

SEQ ID NO: 132372 - DNA, 4406 bp, Artificial Sequence
  derived and/or modified sequence
gcgtgggctcccgatgggctgcctgagcgggtgcgcgggcaacttccggtgtgggtgacgagtggtggccgaagcagggggacagcaagggacgctcaggcggggaccatggcggacggcggctcggagcgggctgacgggcgcatcgtcaagatggaggtggactacagcgccacggtggatcagcgcctacccgagtgtgcgaagctagccaaggaaggaagacttcaagaagtcattgaaacccttctctctctggaaaagcagactcgtactgcttccgatatggtatcgacatcccgtatcttagttgcagtagtgaagatgtgctatgaggctaaagaatgggatttacttaatgaaaatattatgcttttgtccaaaaggcggagtcagttaaaacaagctgttgccaaaatggttcaacagtgctgtacttatgttgaggaaatcacagaccttcctatcaaacttcgattaattgatactctacgaatggttaccgaaggcaagatttatgttgaaattgagcgtgcgcgactgactaaaacattagcaactataaaagaacaaaatggtgatgtgaaagaggcagcctccattttacaggagttacaggtggaaacctacgggtcaatggaaaagaaagagcgagtggaatttattttggagcaaatgaggctctgcctagctgtgaaggattacattcgaacacaaatcatcagcaagaaaattaacaccaaatttttccaggaagaaaatacagagaaattaaagttgaagtactataatttaatgattcagctggatcaacatgagggatcctatttgtctatttgtaagcactacagagcaatatatgatactccctgtatacaggcagaaagtgaaaaatggcagcaggctctgaagagtgttgtactctatgttatcctggctccttttgacaatgaacagtcagatttggttcaccgaataagtggtgacaagaagttagaagaaattcccaaatacaaggatcttttaaagctttttaccacaatggagttgatgcgttggtccacacttgttgaggactatggaatggaattaagaaaaggttcccttgagagtcctgcaacggatgtttttggttctacagaggaaggtgaaaaaaggtggaaagacttgaagaacagagttgttgaacataatattagaataatggccaagtattatactcggataacaatgaaaaggatggcacagcttctggatctatctgttgatgagtccgaagcctttctctcaaatctagtagttaacaagaccatctttgctaaagtagacagattagcaggaattatcaacttccagagacccaaggatccaaataatttattaaatgactggtctcagaaactgaactcattaatgtctctggttaacaaaactacgcatctcatagccaaagaggagatgatacataatctacaataagggtcttagtgctttagaaaaaagttaaaattggaagtcattaaaaaaagactgttataatggtgtatatgttggggttttttttctaagcttctttgtcttaaattttaaaatagtgaatatgtttgagactccctttgacctttcagttccccaagttcattgttaactttgcatttgcaattggtgcaaaaatacagatttctgtcgtctgaatacacaaaaagttgtgtcataacttacccagatatgtttttctatcatttgaaacctttttagctactgtttgttttcattcaactaacaaacatattccaataataaaagcagtatatacatatttcctttctacagttacctctgattctcaacattttgtggggtagtgatttggcaagtgttttttaaataaaacaaatctcattgtaaagctatcagtcatttagtagaatagaaaagcaacatagagcatacaagaacatttgggatagagttgtgatttgtgaagaatttgtactttgatattgtggcggaaagtctagactgagtgtgtatgctggtaaactgtagacttttttttttttttttttgagtccggctggttccaatcacagtagcttgattgctttcagccctcatcctctcacttgatcagttgttcaacagaatcagctgacataattgacacagtttattgggtgttaagtccgctctatagggatagtgactactttttttttttttttttttttgctcttcttcctctcccctttctttatatgggtttaaatttaacataaagttgtttttataaggcttatttgtggctttaacttgtaagtctgattacatcattattgttccaaattcattatctctgtaggaacttttagttccattatatgaacactggataacctaattttttttaatgctttaaaaaaatggcaaaaagacgtcaggccaccctcatagtaagtggtgtagtattaaaatattttcacggaattaaaagtagcttgctgtcaaagaaacacctgagatgaattggtgtgaacgaattttgcaagtttaatttgatttatttcagagaaaatagaaaaaacaatgttagaaggttatttaaaatgatacttaaataaagaaagtgtgaggtctactttaaaaaaattcaaatgaagagaaaaagaaaaacagcattctagaaatggcatttctcctaattaattttccacttaatggaagattatcaattgtcctattttatgatcccaggactgaagacagttgtgggatatctgtcatatttatcctgtgagtcattgtgaataatgacatacagtactgaagtaatctgattttattctttggaaattcaatgcattggtcacactaataacatcaacatctgctatcacttatctttttaaaactaaccaaaaaaggccgggtgcagtggatcccagcactttgggaggccaaggcgggtggatcatctaaggtcaggatttcgagactagcctggccaacatggcaaaaccctgtctctactaaaaaaaatacaaaaatttgccgggcgtggtggcgtgtgcctgtagtcccagttacttgggaggctgaggtgggagaattccttgaagccaggaggcggaggttgcagtgagccaagatcacaccattgcactccagcctgggtgacagagtgagactccgtctcaaaaaaaaaaaaacaaaactggaaagttcagaaacagaagttcacactaacagagtatggttttaattttcctttgaatgaaaaggatagaagataaaattgtgtattgttaacatgtaaataaaattggagctaatttgaaactagcttctcaataacttcatctttctagagactcattacctgtgggcttgtcaaacctggactatttggccaaataggttgctatagagattgcaagtgttcctcctctttatttttttcatattttttgagacggagtttcactcttgttgcccaggctggattgcagtgtcacgatctcggctcactgcaacctttgcctcccatattcaagcagttctcctgcctcaacctcccaagtagctgggattataggcgcctgccaccacacctagctaatttttgtgtttttagtagagatggtttcatcatgttggccgggctggtctcaaactcctgacctcaggtgatccacccgccttggctgcccaaagtgctgggattacaggcatgagccactgcacccaactcctctttcgtctttctttaacacacactaggctctttgtgtattatgattcagtgctatttgtaactgtgtcccagtgaccaaattgcactcgactcgatcagctgttcatccatttcgtgttttttcctgtcaaacattaatccagcaaatatatgaggtatttaccaatttattttcttagtattacaaaataattcattagcataaagtacaatagtgaaatatttgagttgttcggaacctcaattaatcctgttttacatttcagacctaaagctggcaatcaggagaagaagcactttgttttaaatgtggagaagataacacttgattccatttcattgtcattagtgtattaaccagcaggagaggtgatgagccatttttcaaatgaaataccttttatttccatataatttttttattttagagttcaatagctgtttctatgattatcctcaatttccatatgttactgaatctgaaaaacatctttaaaattcaaacagttccattttctctcttgtaagtgttaaatgtgataaaagtacatattttaaattgttttcagctcttggatatagcagcaataaaaacactaatttgtgggtatttaagaaaacctggagaataaactcatactttaaaagatca

SEQ ID NO: 132373 - DNA, 1371 bp, Artificial Sequence
  derived and/or modified sequence
atggctgacggtggctcagagcgcgcagacgggaggattgtcaagatggaggtggattacagcgccaccgtggaccaaagactacctgagtgcgccaaactggctaaggaggggcggctccaggaggttatcgagacactcctctccttggagaaacagacaaggaccgcatcagacatggtatccacaagccgaatcctggtagctgtggtgaagatgtgctatgaagcaaaggaatgggatctcttgaacgagaacattatgctcctgtctaaacgacgctcccagctcaaacaagcggtcgccaagatggtgcagcagtgttgtacatatgtggaagagatcacagacctgcccataaaactcagactaatagacaccttgcggatggttactgaggggaagatttacgttgaaattgagagggctcggctgactaagactctggccaccatcaaggagcagaatggagatgtcaaggaagccgccagcatcctgcaggaattgcaggttgaaacatatgggagtatggagaaaaaagagcgcgtggagtttatccttgagcagatgcggctatgcttagccgtaaaggactatataagaacccagataattagcaagaagattaatactaagttttttcaggaggagaacacggagaagctcaaacttaaatactacaacctaatgatccagcttgaccaacatgaaggatcgtatctctctatctgtaagcactatcgagcgatttacgatacaccatgtattcaggcagaatccgaaaaatggcagcaggctctaaagtccgtcgtgctgtatgttattctcgcccctttcgacaatgagcagtcagacctagtgcaccgcatcagtggcgacaagaagctcgaagaaatccccaaatacaaggatctgctaaaactgttcaccacgatggaactcatgcgttggagcacccttgtggaagattacggtatggagttgagaaagggaagtctagaatctcccgcaaccgacgtctttggttcaaccgaagaaggcgaaaaaaggtggaaggacctcaaaaatcgtgtcgtcgagcataatatccggataatggctaaatactatacgcgtataacaatgaagagaatggcccagctgcttgacctcagtgtcgacgagtctgaagccttcctgtcgaacttggttgtgaataaaacaatcttcgcaaaggtcgataggctcgcgggcataattaactttcagcgtcctaaagaccccaataatttgctcaatgactggagccaaaagcttaactctttgatgagcctggtgaataagactactcacctcatcgccaaggaggaaatgatccacaacttacagtag

SEQ ID NO: 132374 - DNA, 1371 bp, Artificial Sequence
  derived and/or modified sequence
atggctgatggcggcagcgagcgggcagatggaagaattgtgaagatggaggtggactacagcgccaccgtggaccagaggctgcctgaatgtgccaagctggccaaggagggccgcctgcaggaggtgattgagaccctgctgagcctggagaagcagaccaggacagccagtgacatggtgtccaccagccgcatcctggtggccgtggtgaagatgtgctatgaggccaaggagtgggacctgctgaatgaaaacatcatgctgctgagcaagagaagaagccagctgaagcaggccgtggccaagatggtgcagcagtgctgcacctacgtggaggagatcacagacctgcccatcaagctgcggctgattgacaccctgaggatggtgacagagggcaagatctacgtggagattgaaagagcccggctgaccaagaccctggccaccatcaaggagcagaatggagatgtgaaggaggccgccagcatcctgcaggagctgcaggtggagacctacggctccatggagaagaaggagcgggtggagttcatcctggagcagatgaggctgtgcctggccgtgaaggactacatccgcacccagatcatcagcaagaagatcaacaccaagttcttccaggaggagaacacagagaagctgaagctgaagtactacaacctgatgatccagctggaccagcacgagggcagctacctgagcatctgcaagcactaccgggccatctatgacaccccctgcatccaggccgagagcgagaagtggcagcaggccctgaagtctgtggtgctgtatgtgatcctggccccctttgacaatgagcagagcgacctggtgcaccgcatcagcggggacaagaagctggaggagatccccaagtacaaggacctgctgaagctgttcaccaccatggagctgatgcgctggagcaccctggtggaggactatggcatggagctgaggaagggcagcctggagagccctgccacagatgtgtttggcagcacagaggagggggagaagcgctggaaggacctgaagaacagagtggtggagcacaacatccgcatcatggccaagtactacacccgcatcaccatgaagaggatggcccagctgctggacctgtctgtggatgaaagtgaggccttcctgagcaacctggtggtgaacaagaccatctttgccaaggtggaccggctggccggcatcatcaacttccagaggcccaaggaccccaacaacctgctgaatgactggagccagaagctgaacagcctgatgagcctggtgaacaagaccacccacctgattgccaaggaggagatgatccacaacctgcagtag

SEQ ID NO: 132375 - DNA, 1371 bp, Artificial Sequence
  derived and/or modified sequence
atggccgacggcggcagcgagcgggccgacggccggatcgtgaagatggaggtggactacagtgcaaccgtggatcagcgtctgccagaatgcgcaaagctggccaaggaaggcaggcttcaggaggttatcgaaaccctgctatcccttgagaagcagacaagaacagcgtcagacatggtgtcaacaagcagaattctagttgccgtggttaaaatgtgctacgaggctaaggaatgggatctgcttaacgaaaacatcatgctactgagcaagagacggagtcagcttaagcaggctgtggctaaaatggtgcagcaatgctgcacttatgtagaggaaattaccgacctgccaattaagttaaggctgattgacactctgcgcatggtgacagaaggcaagatctatgttgagattgagagggcaagactgacaaaaacacttgcgactataaaggaacagaacggtgatgtcaaagaggcagcatccattcttcaggagctccaggtcgagacatacggcagcatggaaaagaaggaacgggttgagtttatcctggagcagatgcgtttatgcttggccgtgaaggactatatccgcacacagattattagcaaaaaaatcaacacaaaattctttcaagaggagaatacagaaaagcttaagcttaagtactataacctgatgatccagctggaccagcatgaggggagctatctctccatctgcaagcattacagggccatctacgataccccatgtatccaggcggagagcgagaagtggcagcaggcgctgaagagcgtggtcctttatgttatcctggctccatttgacaatgagcagagcgatctcgttcatcggatttccggcgacaaaaagttagaagagattcccaaatataaggatttgctgaaactattcaccacaatggaactgatgcggtggtccactttggtggaggactacggaatggaactgagaaaaggatccctggaatcccccgcaaccgacgtgtttggtagcacagaggaaggggaaaaaagatggaaggatctgaagaaccgcgtcgtggaacataatattagaattatggctaagtactacacgaggatcaccatgaaacggatggctcagctactcgacttgtcagtggatgaatctgaggcctttctcagtaacttagtggtgaacaagacaatcttcgccaaggtagataggttagctggtatcatcaattttcaacggcccaaagacccgaacaacctactcaatgactggtctcaaaagttaaattccctgatgagcctggtcaataagactacacacctgatcgccaaagaggagatgatccataacctgcagtag

SEQ ID NO: 132376 - DNA, 1371 bp, Artificial Sequence
  derived and/or modified sequence
atggctgatgggggaagtgagagagcagacggcagaatcgtgaagatggaggtcgattactccgccactgtcgaccagcgactgccagagtgtgccaaactggccaaggaggggagattgcaggaggttattgaaacccttctaagcctggaaaaacagaccaggactgctagtgatatggttagtacttctcggatcctagtcgcagtggtaaagatgtgttacgaggcgaaggaatgggatcttctgaacgagaacatcatgctgctaagcaagcgacgatcccagttgaagcaggctgtcgccaaaatggtgcagcagtgttgtacgtatgtggaggagattacagatttgccaatcaagctgaggctgatcgataccctccgcatggtgactgagggaaagatctatgtagagatcgaacgcgcacgccttacaaagacactggccaccatcaaggaacagaatggggatgtcaaggaagctgcatctattttacaggaactgcaggtggaaacctatggcagcatggaaaagaaggagagggtggagtttatcctggaacagatgcggttatgcctggccgtgaaggactacatccgaacacagattatttctaaaaagataaacacaaagttctttcaggaagaaaacaccgagaaactcaaacttaagtattacaacctaatgatccagctcgatcaacacgagggtagttacctgtctatctgcaagcactacagagctatttacgacacaccctgcattcaggcagagagtgagaaatggcagcaggctctgaagtctgtggtcctgtacgttattttagcaccctttgataatgaacagtccgacttggttcaccgtatctctggagataagaagctggaagagattccaaagtacaaggatcttctcaagctattcacaacaatggaactgatgcgttggagtaccctcgtggaagattatggaatggaacttagaaagggctctctggagagccccgctacggatgtctttggctctacagaggaaggggagaaaagatggaaggacctgaagaaccgggtggttgagcataatattcgcattatggccaaatattacactcgcatcacaatgaagagaatggcacagctgctggatttgtctgtcgacgaatctgaggcctttctctctaatctagttgtgaataagaccattttcgccaaagttgatcggcttgccggaattatcaacttccaacggccaaaggacccaaataatctgttaaacgattggagccaaaagctgaactccctgatgagtctcgtcaacaagacaactcatctgatcgccaaggaggaaatgatccataatctccagtag

SEQ ID NO: 132377 - protein, 376 aa, Artificial Sequence
  derived and/or modified sequence
MKDVPGFLQQSQNSGPGQPAVWHRLEELYTKKLWHQLTLQVLDFVQDPCFAQGDGLIKLYENFISEFEHRVNPLSLVEIILHVVRQMTDPNVALTFLEKTREKVKSSDEAVILCKTAIGALKLNIGDLQVTKETIEDVEEMLNNLPGVTSVHSRFYDLSSKYYQTIGNHASYYKDALRFLGCVDIKDLPVSEQQERAFTLGLAGLLGEGVFNFGELLMHPVLESLRNTDRQWLIDTLYAFNSGNVERFQTLKTAWGQQPDLAANEAQLLRKIQLLCLMEMTFTRPANHRQLTFEEIAKSAKITVNEVELLVMKALSVGLVKGSIDEVDKRVHMTWVQPRVLDLQQIKGMKDRLEFWCTDVKSMEMLVEHQAHDILT

SEQ ID NO: 132378 - DNA, 1131 bp, Artificial Sequence
  derived and/or modified sequence
atgaaggacgtgcccggcttcctgcagcagagccagaacagcggccccggccagcccgccgtgtggcacagactggaggagctgtacaccaagaagctgtggcaccagctgaccctgcaggtgctggacttcgtgcaggacccctgcttcgcccagggcgacggcctgatcaagctgtacgagaacttcatcagcgagttcgagcacagagtgaaccccctgagcctggtggagatcatcctgcacgtggtgagacagatgaccgaccccaacgtggccctgaccttcctggagaagaccagagagaaggtgaagagcagcgacgaggccgtgatcctgtgcaagaccgccatcggcgccctgaagctgaacatcggcgacctgcaggtgaccaaggagaccatcgaggacgtggaggagatgctgaacaacctgcccggcgtgaccagcgtgcacagcagattctacgacctgagcagcaagtactaccagaccatcggcaaccacgccagctactacaaggacgccctgagattcctgggctgcgtggacatcaaggacctgcccgtgagcgagcagcaggagagagccttcaccctgggcctggccggcctgctgggcgagggcgtgttcaacttcggcgagctgctgatgcaccccgtgctggagagcctgagaaacaccgacagacagtggctgatcgacaccctgtacgccttcaacagcggcaacgtggagagattccagaccctgaagaccgcctggggccagcagcccgacctggccgccaacgaggcccagctgctgagaaagatccagctgctgtgcctgatggagatgaccttcaccagacccgccaaccacagacagctgaccttcgaggagatcgccaagagcgccaagatcaccgtgaacgaggtggagctgctggtgatgaaggccctgagcgtgggcctggtgaagggcagcatcgacgaggtggacaagagagtgcacatgacctgggtgcagcccagagtgctggacctgcagcagatcaagggcatgaaggacagactggagttctggtgcaccgacgtgaagagcatggagatgctggtggagcaccaggcccacgacatcctgacctag

SEQ ID NO: 132379 - DNA, 936 bp, Artificial Sequence
  derived and/or modified sequence
atggtgagcctgagagtgaaccccctgagcctggtggagatcatcctgcacgtggtgagacagatgaccgaccccaacgtggccctgaccttcctggagaagaccagagagaaggtgaagagcagcgacgaggccgtgatcctgtgcaagaccgccatcggcgccctgaagctgaacatcggcgacctgcaggtgaccaaggagaccatcgaggacgtggaggagatgctgaacaacctgcccggcgtgaccagcgtgcacagcagattctacgacctgagcagcaagtactaccagaccatcggcaaccacgccagctactacaaggacgccctgagattcctgggctgcgtggacatcaaggacctgcccgtgagcgagcagcaggagagagccttcaccctgggcctggccggcctgctgggcgagggcgtgttcaacttcggcgagctgctgatgcaccccgtgctggagagcctgagaaacaccgacagacagtggctgatcgacaccctgtacgccttcaacagcggcaacgtggagagattccagaccctgaagaccgcctggggccagcagcccgacctggccgccaacgaggcccagctgctgagaaagatccagctgctgtgcctgatggagatgaccttcaccagacccgccaaccacagacagctgaccttcgaggagatcgccaagagcgccaagatcaccgtgaacgaggtggagctgctggtgatgaaggccctgagcgtgggcctggtgaagggcagcatcgacgaggtggacaagagagtgcacatgacctgggtgcagcccagagtgctggacctgcagcagatcaagggcatgaaggacagactggagttctggtgcaccgacgtgaagagcatggagatgctggtggagcaccaggcccacgacatcctgacctag

SEQ ID NO: 132380 - DNA, 1131 bp, Artificial Sequence
  derived and/or modified sequence
atgaaggacgtgcccggcttcctccagcagtcccagaactccgggcctgggcagcccgctgtctggcatcgtctcgaggaactgtatacgaagaagctgtggcatcagcttaccttgcaggtgctggacttcgtccaggatccctgcttcgcacaaggagacggcttgattaaattgtatgaaaactttattagcgaattcgagcaccgcgttaatcctctttctcttgtggagataatcctgcacgtggtgagacagatgacagacccaaacgttgccctgacatttctggagaaaacacgcgagaaggtgaagtcgtctgatgaagctgtgatcctctgcaagacggctatcggtgccttgaagttaaacatcggcgacctccaagtaacaaaggagaccatagaggacgtggaagaaatgctcaacaacctgccaggtgtgacttcagtgcatagccggttttatgatctctcatccaaatattatcagactatagggaatcacgcttcatattataaagatgctctgcggttcttgggctgtgttgacatcaaggatctgcctgtaagcgaacaacaggaaagggcattcacgctcggcctggctggcttgcttggtgaaggagtatttaactttggcgagctgcttatgcatccagtgctggaatcactgcgtaataccgaccgccagtggctcattgacacgctgtatgcatttaacagcgggaacgtggaacggttccaaacattgaaaacagcctggggacagcagcccgatcttgccgcaaatgaggcccaactgctccggaagatccagctcttatgtctgatggagatgacattcacccgcccggcaaaccaccgccagctcaccttcgaagaaatcgccaagagtgcaaagatcaccgtgaatgaagtagaactgcttgttatgaaggctctgtcagtggggctggttaaagggagtatcgatgaagtggacaagcgggtccacatgacctgggtgcagcctcgtgtgctcgatctccaacagataaaggggatgaaggaccggctggaattttggtgtacagatgttaaaagtatggagatgcttgtcgagcatcaggcccatgacatcctgacttag

SEQ ID NO: 132381 - DNA, 936 bp, Artificial Sequence
  derived and/or modified sequence
atggttagcttaagagtgaaccctcttagccttgttgaaataatattacacgtggttcggcagatgacagatcccaacgtggccctgacatttctcgaaaagacacgggaaaaagtcaaaagctccgacgaggctgtcatcctttgcaagaccgccataggggcccttaaactgaacattggagatctgcaagtgaccaaggagactatagaagatgtggaagaaatgttgaataacctccccggtgtgacctctgtacattcaaggttctacgatctgtcttctaagtattaccagactattgggaatcacgccagttactataaagatgccctccgatttcttggttgtgtggacattaaagatttgcccgtctcagagcagcaggagcgggcatttaccctcggactggctggattgttgggagagggcgtgtttaatttcggtgagttactgatgcaccccgtcctggagtccctacgcaacacagatcgccagtggctgatcgataccctctacgcctttaactcagggaacgtcgagaggttccagaccctgaaaacagcctggggccagcagcccgatcttgccgccaacgaggcccagttgctgcgcaaaatccagcttctgtgccttatggaaatgacattcactagacccgccaatcacaggcagcttacgtttgaagaaatcgcaaaatccgcgaaaatcacggtgaacgaggttgaactcctggtaatgaaggccctctcagtgggacttgtcaaaggctctatcgatgaggttgacaaaagagtgcatatgacctgggtgcagccccgagtgctagatctccaacaaatcaagggtatgaaagatagactagagttttggtgcacagatgtgaagagcatggagatgttagttgaacaccaggcccacgacatcttgacctag

SEQ ID NO: 132382 - DNA, 1131 bp, Artificial Sequence
  derived and/or modified sequence
atgaaggatgtgcccggcttcctgcagcagagccagaacagcggccctggccagcctgctgtgtggcaccggctggaggagctgtacaccaagaagctgtggcaccagctgaccctgcaggtgctggactttgtgcaggacccctgctttgcccagggagatggcctcatcaagctgtatgagaacttcatcagcgagtttgagcaccgggtgaaccccctgagcctggtggagatcatcctgcacgtggtgcggcagatgacagaccccaacgtggccctgaccttcctggagaagacccgggagaaggtgaagagcagtgatgaggccgtcatcctgtgcaagacagccatcggggccctgaagctgaacattggagacctgcaggtgaccaaggagaccattgaagatgtggaggagatgctgaacaacctgcccggggtgacctctgtgcacagccgcttctatgacctgagcagcaagtactaccagaccatcggcaaccacgccagctactacaaggatgccctgcgcttcctgggctgtgtggacatcaaggacctgcctgtgtctgagcagcaggagcgggccttcaccctgggcctggccggcctgctgggggagggcgtcttcaactttggagagctgctgatgcaccctgtgctggagagcctgaggaacacagaccggcagtggctgattgacaccctgtatgccttcaacagcggaaatgtggagcgcttccagaccctgaagacagcctggggccagcagcctgacctggccgccaatgaggcccagctgctgaggaagatccagctgctgtgcctgatggagatgaccttcaccaggcctgccaaccaccggcagctgacctttgaggagatcgccaagagcgccaagatcaccgtgaatgaggtggagctgctggtgatgaaggccctgtctgtgggcctggtgaagggcagcattgatgaggtggacaagagggtgcacatgacctgggtgcagccccgggtgctggacctgcagcagatcaagggcatgaaggaccggctggagttctggtgcacagatgtgaagtccatggagatgctggtggagcaccaggcccatgacatcctgacctag

SEQ ID NO: 132383 - DNA, 936 bp, Artificial Sequence
  derived and/or modified sequence
atggtgtccctgcgggtgaaccccctgagcctggtggagatcatcctgcacgtggtgcggcagatgacagaccccaacgtggccctgaccttcctggagaagacccgggagaaggtgaagagcagtgatgaagctgtgatcctgtgcaagacagccatcggggccctgaagctgaacatcggggacctgcaggtgaccaaggagaccattgaagatgtggaggagatgctgaacaacctgcccggggtgacctctgtgcacagccgcttctatgacctgagcagcaagtactaccagaccatcggcaaccacgccagctactacaaggatgccctgcgcttcctgggctgtgtggacatcaaggacctgcctgtgtctgagcagcaggagcgggccttcaccctgggcctggccggcctgctgggggagggcgtcttcaactttggagagctgctgatgcaccctgtgctggagagcctgaggaacacagaccggcagtggctgattgacaccctgtatgccttcaacagcggaaatgtggagcgcttccagaccctgaagacagcctggggccagcagcctgacctggccgccaatgaggcccagctgctgaggaagatccagctgctgtgcctgatggagatgaccttcaccaggcctgccaaccaccggcagctgacctttgaggagatcgccaagagcgccaagatcaccgtgaatgaggtggagctgctggtgatgaaggccctgtctgtgggcctggtgaagggcagcattgatgaggtggacaagagggtgcacatgacctgggtgcagccccgggtgctggacctgcagcagatcaagggcatgaaggaccggctggagttctggtgcacagatgtgaagtccatggagatgctggtggagcaccaggcccatgacatcctgacctag

SEQ ID NO: 132384 - DNA, 1131 bp, Artificial Sequence
  derived and/or modified sequence
atgaaggacgtgcccggcttcctgcagcagagccagaacagcggcccgggccagccagccgtctggcaccggctagaggagctttacaccaaaaagctgtggcaccagttgacgctgcaggtattagattttgtgcaggacccttgtttcgcacagggcgatgggttaatcaaactctatgaaaattttatctcggagttcgaacacagagttaacccactgagcctggtcgagatcattctgcatgtggttcggcagatgaccgaccctaatgttgccctgactttcttggagaaaactagagagaaggtcaagtctagcgatgaggcagtcattctttgcaagaccgccattggtgcactgaaactgaatattggcgacctgcaagtcactaaagagacaatagaggatgtggaagagatgctcaacaacctaccaggagttacgagtgtgcattcacgcttctatgacctgtcttccaagtattaccagaccatagggaatcacgcttcctattataaggatgctctcagattcttaggatgtgtagatatcaaggatctgcccgtgtcagagcagcaggagagggcgttcactctggggcttgctggtcttctgggtgaaggcgtgtttaacttcggcgagttgttgatgcatcctgtgctggagtctctccgcaatactgatcggcagtggctaattgataccttgtacgcgttcaactctgggaacgtcgagcggttccagaccctgaagaccgcctggggacagcaaccagacctcgctgccaacgaagcccaactcctaagaaagatccaactgctctgcctgatggagatgacattcacacgacccgctaatcatcggcagctgacatttgaagagatcgcgaagtctgccaagatcactgttaacgaagtcgagttgcttgtgatgaaagccctctccgtgggactcgtaaaagggagtatcgatgaggtcgacaagagagtgcatatgacgtgggtgcagccccgggttctggaccttcagcaaatcaaaggcatgaaagatagactggagttctggtgtaccgatgtcaaatcaatggaaatgctcgtggagcaccaagctcatgatatcctgacttag

SEQ ID NO: 132385 - DNA, 936 bp, Artificial Sequence
  derived and/or modified sequence
atggtgagcctgcgggtgaaccccctgagcctggtggagatcatcctgcacgtagtgagacaaatgaccgatcctaacgtcgctctcacatttctcgagaaaactcgcgaaaaggtgaaaagcagcgatgaggccgtcattctctgcaaaacggccataggggctttaaaattgaacatcggcgacctacaagtaaccaaggagactattgaggatgtggaggaaatgctcaataatctgccaggagtgacctctgtgcactcaaggttctacgatttgagtagcaaatattaccagacaatcgggaatcacgccagctactataaagatgcactacgttttctggggtgtgttgacatcaaagacttgcctgtcagtgagcagcaggagcgtgccttcactctgggcttagctggactcctgggggagggtgtgtttaatttcggggagcttctcatgcacccggtactggaatccctaagaaacaccgaccggcagtggctgatcgacaccctgtacgccttcaacagtggtaacgttgagaggttccagactctaaaaaccgcctggggtcaacagcccgatctcgccgcaaatgaagcccagctcctgcgaaaaattcagctactctgtctgatggagatgacatttacacgccctgctaatcaccggcagctcacattcgaggagatcgccaaatcagcaaagatcacagtgaatgaagttgagctacttgtgatgaaagccttgtctgtggggctggtcaagggttcgattgatgaagtcgataagcgcgtgcacatgacctgggttcagcccagagtcttagacctgcagcagattaagggcatgaaggacagactggaattttggtgcaccgatgtcaagagtatggaaatgctggtggaacaccaggctcacgatatcttaacctag

SEQ ID NO: 132386 - DNA, 1131 bp, Artificial Sequence
  derived and/or modified sequence
atgaaagacgtgccgggtttcctgcagcagagtcagaactccggcccagggcaaccagctgtttggcatcgcttggaggaactgtacacaaaaaagctgtggcaccagcttactctccaggtcctggatttcgtccaggacccatgcttcgctcagggagacggcctgattaaactgtacgagaactttatctctgaatttgaacaccgtgtcaaccccctgtcactagtggaaatcatcctgcacgtggttcgccagatgaccgaccccaatgtggcactgactttcctggaaaagactcgagaaaaagtgaaatcaagcgacgaggccgtgattctctgcaagaccgccatcggcgctctaaagttaaacatcggtgatttacaagtcacaaaagagactatcgaggacgtcgaagaaatgctgaataatctgccaggtgtgaccagcgtgcattccagattctacgacctcagcagtaagtactaccagaccatcgggaatcatgccagctactataaggacgccctgcggtttctgggctgcgtagatataaaggacctcccggtctccgagcaacaggaacgggctttcacattaggactggctgggctcctgggcgaaggagtctttaatttcggtgaactgctcatgcacccagtcctggaatcactaaggaacaccgacagacagtggctcatagacacgctatatgctttcaatagtggaaatgtggagcgttttcagacactcaagaccgcttggggtcagcagccggatcttgcagctaatgaagcccagctattacgcaaaatccagttgctgtgtctcatggaaatgacatttacgaggcccgctaaccacaggcagctgactttcgaggagattgccaaatcggccaagatcacggtaaacgaggtcgaattgctggttatgaaggccttgagcgtcggactggttaagggttctattgatgaagtggacaagcgggtgcatatgacctgggtccagccaagggtgcttgatctccaacagattaaaggcatgaaagaccgcctggagttctggtgtaccgacgtgaaatcaatggagatgcttgtcgaacatcaagctcatgacatactgacctag

SEQ ID NO: 132387 - DNA, 936 bp, Artificial Sequence
  derived and/or modified sequence
atggtatctttgcgcgttaacccgttgtctctggtcgagataatcctccacgtcgttagacaaatgacagaccctaacgtggccctcacattcctcgaaaaaacacgggaaaaagtgaagtctagcgacgaagcagtcattttgtgcaagaccgcgatcggggcactaaagttaaatattggagatctgcaagtgactaaggagacaatcgaagacgtggaagagatgctcaataacttaccaggtgttacatctgtccattccaggttctacgatctgtcatccaaatactatcagacaattgggaatcacgcaagctactataaagatgccctgagatttcttgggtgtgtcgatattaaagatctgcccgtgagtgaacaacaggaacgggcttttacactggggttggcaggcctgttgggagagggcgtcttcaactttggcgaacttctgatgcatccagtactagaatcacttaggaatactgaccggcagtggctgattgacacgctctatgcatttaatagtggaaacgtggagaggtttcagacgctgaagacagcatggggacagcagcctgatctcgccgcaaatgaagcccagctgctgagaaaaatacagctgctatgtctgatggagatgacattcacccggcctgccaaccatcgccaactcacctttgaggaaatcgcgaagagcgccaagatcacagtgaatgaagtggaacttctagtcatgaaggccctcagcgttgggctggttaagggctccatcgacgaggtggataagcgagtgcatatgacgtgggtgcagcctagggtgcttgacttgcagcagatcaaaggaatgaaggatcggcttgagttttggtgcacagatgtgaaatccatggagatgctcgtagaacaccaagctcatgacattctcacttag

SEQ ID NO: 132388 - DNA, 1991 bp, Artificial Sequence
  derived and/or modified sequence
agtctggtgtctcatctctcgccccggaggtcaaacctggagccagcatttctgtaccctgcgctcacacctttttcaacccggatggcggtgatagttaatactttctgagcgcttttactatggtcaggcattatatttacacctaatcctcgcaaaacactactgggaagatcctcatttgacaggagcaattccgggtcacaaaggctgacaccacaaagctagtccgtagcgggttcgaccacaggcgcccacactctttgacgcctcaatggcacagccaagtgcgcgggaagtgggctgcaaacgccggagagttttgtccggagcgcagagacgcgctgtaaccgagcaaccagcggggcccgcccccggcctgctacggcgctcccagcctgccccgcgccgctcggcgccggaagtgagtgagcatttccggcagccatccccgcggtgctgacatcccggttgttcttctgtgccgggggtcttcctgctgtcatgaaggacgtaccgggcttcctacagcagagccagaactccgggcccgggcagcccgctgtgtggcaccgtctggaggagctctacacgaagaagttgtggcatcagctgacacttcaggtgcttgattttgtgcaggatccgtgctttgcccaaggagatggtctcattaagctttatgaaaactttatcagtgaatttgaacacagggtgaaccctttgtccctcgtggaaatcattcttcatgtagttagacagatgactgatcctaatgtggctcttacttttctggaaaagactcgtgagaaggtgaaaagtagtgatgaggcagtgatcctgtgtaaaacagcaattggagctctaaaattaaacatcggggacctacaggttacaaaggaaacaattgaagatgttgaagaaatgctcaacaaccttcctggtgtgacatcggttcacagtcgtttctatgatctctccagtaaatactatcaaacaatcggaaaccacgcgtcctactacaaagatgctctgcggtttttgggctgtgttgacatcaaggatctaccagtgtctgagcagcaggagagagccttcacgctggggctagcaggacttctcggcgagggagtttttaactttggagaactcctcatgcaccctgtgctggagtccctgaggaatactgaccggcagtggctgattgacaccctctatgccttcaacagtggcaacgtagagcggttccagactctgaagactgcctggggccagcagcctgatttagcagctaatgaagcccagcttctgaggaaaattcagttgttgtgcctcatggagatgactttcacacgacctgccaatcacagacaactcacttttgaagaaattgccaaaagtgctaaaatcacagtgaatgaggtggagcttctggtgatgaaggccctttcggtggggctggtgaaaggcagtatagacgaggtggacaaacgagtccacatgacctgggtgcagccccgagtgttggatttgcaacagatcaagggaatgaaggaccgcctggagttctggtgcacggatgtgaagagcatggagatgctggtggagcaccaggcccatgacatcctcacctagggccccctggttccccgtcgtgtctcctttgactcacctgagagaggcgtttgcagccaatgaagctggctgctcagacggtcgacattgaatttgggtgggggttgggatcctgtctgaagtacagactgttcttgctctaaaaacaggactgtccctgatgggagccaggccacagggaggaggcttctttgtgggtctctcctgcagagggtgggggtctcagggtcttaggtgatacgggagagaaagaacgtgccaggcaggaggccccctgaagtctgtgtactccgaggtggatctccatccccatccacctgtacggacatcttttccgttgcggtttgagaatgttc

SEQ ID NO: 132389 - DNA, 1434 bp, Artificial Sequence
  derived and/or modified sequence
gagcatttccggcagccatccccgcggtgctgacatcccggttgttcttctgtgccgggggtcttcctgctgtcatgaaggacgtaccgggcttcctacagcagagccagaactccgggcccgggcagcccgctgtgtggcaccgtctggaggagctctacacgaagaagttgtggcatcagctgacacttcaggtgcttgattttgtgcaggatccgtgctttgcccaaggagatggtctcattaagggtgaaccctttgtccctcgtggaaatcattcttcatgtagttagacagatgactgatcctaatgtggctcttacttttctggaaaagactcgtgagaaggtgaaaagtagtgatgaggcagtgatcctgtgtaaaacagcaattggagctctaaaattaaacatcggggacctacaggttacaaaggaaacaattgaagatgttgaagaaatgctcaacaaccttcctggtgtgacatcggttcacagtcgtttctatgatctctccagtaaatactatcaaacaatcggaaaccacgcgtcctactacaaagatgctctgcggtttttgggctgtgttgacatcaaggatctaccagtgtctgagcagcaggagagagccttcacgctggggctagcaggacttctcggcgagggagtttttaactttggagaactcctcatgcaccctgtgctggagtccctgaggaatactgaccggcagtggctgattgacaccctctatgccttcaacagtggcaacgtagagcggttccagactctgaagactgcctggggccagcagcctgatttagcagctaatgaagcccagcttctgaggaaaattcagttgttgtgcctcatggagatgactttcacacgacctgccaatcacagacaactcacttttgaagaaattgccaaaagtgctaaaatcacagtgaatgaggtggagcttctggtgatgaaggccctttcggtggggctggtgaaaggcagtatagacgaggtggacaaacgagtccacatgacctgggtgcagccccgagtgttggatttgcaacagatcaagggaatgaaggaccgcctggagttctggtgcacggatgtgaagagcatggagatgctggtggagcaccaggcccatgacatcctcacctagggccccctggttccccgtcgtgtctcctttgactcacctgagagaggcgtttgcagccaatgaagctggctgctcagacggtcgacattgaatttgggtgggggtctcagggtcttaggtgatacgggagagaaagaacgtgccaggcaggaggccccctgaagtctgtgtactccgaggtggatctccatccccatccacctgtacggacatcttttccgttgcggtttgagaatgttcctataataaacccctctgctttgt

SEQ ID NO: 132390 - protein, 239 aa, Artificial Sequence
  derived and/or modified sequence
MAKPCGVRLSGEARKQVEVFRQNLFQEAEEFLYRFLPQKIIYLNQLLQEDSLNVADLTSLRAPLDIPIPDPPPKDDEMETDKQEKKEVHKCGFLPGNEKVLSLLALVKPEVWTLKEKCILVITWIQHLIPKIEDGNDFGVAIQEKVLERVNAVKTKVEAFQTTISKYFSERGDAVAKASKETHVMDYRALVHERDEAAYGELRAMVLDLRAFYAELYHIISSNLEKIVNPKGEEKPSMY

SEQ ID NO: 132391 - DNA, 720 bp, Artificial Sequence
  derived and/or modified sequence
atggccaagccttgtggggtccggctttcaggggaggctcgcaagcaggtcgaagtattccgccagaacctgttccaggaggctgaagaattcctataccggttccttccccagaagatcatctacctcaatcagctgctgcaggaagatagcttaaacgtggccgacttgacctcactgcgtgctccccttgacatccctatccccgatccgcccccaaaggacgatgagatggaaaccgacaagcaggagaagaaagaagttcataagtgcggattcctcccagggaacgaaaaagtgctgtcactcctggcgcttgtgaagcctgaagtttggaccctgaaagaaaagtgtattttagtgattacctggatccagcatctgatccccaagatcgaggacggcaatgattttggggttgctattcaagagaaggtgctggaaagggtcaacgccgttaagacaaaagtggaagctttccagactaccattagcaaatatttcagcgaaagaggggacgccgtggcaaaggcttcgaaggaaacccatgtgatggattaccgggccctcgtccacgaaagagatgaggccgcttatggggagttgcgcgctatggtgttagacctgcgggccttctacgcagagttataccacatcatctcatcaaacttggaaaagatcgtcaaccctaagggcgaggaaaaaccaagtatgtattag

SEQ ID NO: 132392 - DNA, 720 bp, Artificial Sequence
  derived and/or modified sequence
atggccaagccctgtggggtgcggctgagcggggaggccaggaagcaggtggaggtgttccggcagaacctcttccaggaggccgaggagttcctgtaccgcttcctgccccagaagatcatctacctgaaccagctgctgcaggaggacagcctgaatgtggccgacctgaccagcctgcgggcccccctggacatccccatcccagaccccccacccaaggatgatgagatggagacagacaagcaggagaagaaggaggtgcacaagtgtggcttcctgcctggaaatgagaaggtgctgagcctgctggccctggtgaagccagaggtgtggaccctgaaggagaagtgcatcctggtgatcacctggatccagcacctgatccccaagattgaagatggaaatgactttggagtggccatccaggagaaggtgctggagcgggtgaatgctgtgaagaccaaggtggaggccttccagaccaccatcagcaagtacttcagcgagagaggagatgctgtggccaaggccagcaaggagacccacgtgatggactaccgggccctggtgcatgaaagagatgaagctgcctatggagagctgcgggccatggtgctggacctgcgggccttctacgccgagctgtaccacatcatcagcagcaacctggagaagatcgtgaaccccaagggggaggagaagcccagcatgtactag

SEQ ID NO: 132393 - DNA, 720 bp, Artificial Sequence
  derived and/or modified sequence
atggccaagccctgcggcgtgcggctgagcggcgaggcccggaagcaggttgaggtatttaggcagaatctgttccaggaggctgaagaatttctctatagatttctgcctcagaagatcatctatctgaaccagttgctccaggaggatagtctcaacgtcgccgacctcacctcgcttcgagctccactcgatattccgatccctgacccgcctcctaaggatgacgagatggaaactgacaagcaggagaagaaagaggttcataaatgcggattcctcccgggtaacgaaaaagtgttatccctgcttgctcttgtgaaacccgaggtctggactttaaaagagaaatgtattcttgtgattacatggattcagcatctcattcccaagatcgaggatgggaacgacttcggcgtggcaatacaagagaaggttctggagcgggttaatgcagtgaaaaccaaggtcgaagctttccaaacaacaatcagtaaatacttcagcgagcgaggcgacgccgtcgctaaagcttctaaggaaacccatgtaatggactacagagccctcgtgcatgagcgggacgaagcagcctacggggagctgcgggccatggtgttggatctaagggccttctatgcggaactttaccatatcatttcgagtaatctggagaagatcgtcaaccctaagggagaggagaagccctccatgtactag

SEQ ID NO: 132394 - DNA, 720 bp, Artificial Sequence
  derived and/or modified sequence
atggccaagccatgcggcgttcgattgagtggcgaagctcgaaaacaagtcgaggtattccgacagaatttgttccaggaggctgaggaattcctgtatcgattcctgccccaaaaaatcatctatcttaaccaactgctccaggaggacagtctaaatgtggcagacctgacatctcttagggctcctctggatatccctattcctgatccccctcccaaagatgacgagatggaaacagataaacaagaaaagaaggaggtgcacaagtgcgggttcctccctgggaacgagaaggtgctgtctctgctggccctagtgaaacccgaagtttggaccctcaaggagaagtgcattttggtgattacgtggattcaacatctgatccccaaaatcgaagatggcaacgacttcggggtggccattcaggagaaggtcctcgaacgtgtgaacgcagtgaaaacaaaagttgaggcattccagaccaccatatccaagtacttctctgagcggggagacgcagttgctaaggcttcaaaggagacccacgtgatggactacagagccttagtgcacgagagggatgaggccgcttacggcgagttaagagcaatggtgctggacttaagggccttttacgccgaattgtaccacatcattagcagcaatttagaaaagattgtgaatccaaagggagaagagaagccatccatgtattag

SEQ ID NO: 132395 - DNA, 720 bp, Artificial Sequence
  derived and/or modified sequence
atggccaagccctgcggcgtgagactgagcggcgaggccagaaagcaggtggaggtgttcagacagaacctgttccaggaggccgaggagttcctgtacagattcctgccccagaagatcatctacctgaaccagctgctgcaggaggacagcctgaacgtggccgacctgaccagcctgagagcccccctggacatccccatccccgaccccccccccaaggacgacgagatggagaccgacaagcaggagaagaaggaggtgcacaagtgcggcttcctgcccggcaacgagaaggtgctgagcctgctggccctggtgaagcccgaggtgtggaccctgaaggagaagtgcatcctggtgatcacctggatccagcacctgatccccaagatcgaggacggcaacgacttcggcgtggccatccaggagaaggtgctggagagagtgaacgccgtgaagaccaaggtggaggccttccagaccaccatcagcaagtacttcagcgagagaggcgacgccgtggccaaggccagcaaggagacccacgtgatggactacagagccctggtgcacgagagagacgaggccgcctacggcgagctgagagccatggtgctggacctgagagccttctacgccgagctgtaccacatcatcagcagcaacctggagaagatcgtgaaccccaagggcgaggagaagcccagcatgtactag

SEQ ID NO: 132396 - DNA, 1404 bp, Artificial Sequence
  derived and/or modified sequence
ctggaccagtccggtacgctccgggcctcaccgaggaagtcccaccctgcaggggaaccgactctggccggccctaacccctctcgagcgagtcccgccccatctccggtctgtcctgaaggcagagggaagaccctcacccaacccctgcccgctctcttctaagagctgctagtccttctccaccccaggcgctccctctggctgcccctcccactcgctctgatctctctccgtccgctacttgcggtcgagccttcttgggggagccccgccactgaataccccctttgccatactcccacctctcttaccccaaccctggacttccagttggccctagctataagccccgcccctctccgagggacagcccccgctccagtctccgcggtcccacttaccctagcccctccctcgggcagcccctggactgtgacccagccagcaccgcctctcctagtggcaactggctgggaatggctgaggggctacctactgcttgcggcctgccagcgggaggaggggggcggaaagaagaaagggggcggggttgaggggggcgggcctggacctggggagtgaaagcgaaagcccgggcgactagccgggagaccagagatctagcgactgaagcagcatggccaagccgtgtggggtgcgcctgagcggggaagcccgcaaacaggtggaggtcttcagacagaatcttttccaggaggctgaggaattcctctacagattcttgccacagaaaatcatatacctgaatcagctcttgcaagaggactccctcaatgtggctgacttgacttccctccgggccccactggacatccccatcccagaccctccacccaaggatgatgagatggaaacagataagcaggagaagaaagaagtccataagtgtggatttctccctgggaatgagaaagtcctgtccctgcttgccctggttaagccagaagtctggactctcaaagagaaatgcattctggtgattacatggatccaacacctgatccccaagattgaagatggaaatgattttggggtagcaatccaggagaaggtgctggagagggtgaatgccgtcaagaccaaagtggaagctttccagacaaccatttccaagtacttctcagaacgtggggatgctgtggccaaggcctccaaggagactcatgtaatggattaccgggccttggtgcatgagcgagatgaggcagcctatggggagctcagggccatggtgctggacctgagggccttctatgctgagctttatcatatcatcagcagcaacctggagaaaattgtcaacccaaagggtgaagaaaagccatctatgtactgaacccgggactagaaggaaaataaatgatctatatgttgtgtgga

SEQ ID NO: 132397 - protein, 557 aa, Artificial Sequence
  derived and/or modified sequence
MDGIVPDIAVGTKRGSDELFSTCVTNGPFIMSSNSASAANGNDSKKFKGDSRSAGVPSRVIHIRKLPIDVTEGEVISLGLPFGKVTNLLMLKGKNQAFIEMNTEEAANTMVNYYTSVTPVLRGQPIYIQFSNHKELKTDSSPNQARAQAALQAVNSVQSGNLALAASAAAVDAGMAMAGQSPVLRIIVENLFYPVTLDVLHQIFSKFGTVLKIITFTKNNQFQALLQYADPVSAQHAKLSLDGQNIYNACCTLRIDFSKLTSLNVKYNNDKSRDYTRPDLPSGDSQPSLDQTMAAAFGAPGIISASPYAGAGFPPTFAIPQAAGLSVPNVHGALAPLAIPSAAAAAAAAGRIAIPGLAGAGNSVLLVSNLNPERVTPQSLFILFGVYGDVQRVKILFNKKENALVQMADGNQAQLAMSHLNGHKLHGKPIRITLSKHQNVQLPREGQEDQGLTKDYGNSPLHRFKKPGSKNFQNIFPPSATLHLSNIPPSVSEEDLKVLFSSNGGVVKGFKFFQKDRKMALIQMGSVEEAVQALIDLHNHDLGENHHLRVSFSKSTI

SEQ ID NO: 132398 - DNA, 1674 bp, Artificial Sequence
  derived and/or modified sequence
atggacggaatcgttccagacattgctgttggcacgaagagaggcagcgacgaactgttctccacttgtgtgaccaatgggcccttcattatgtccagtaactccgcctcggctgccaatggaaatgatagtaaaaagttcaagggggatagccgcagcgccggcgttccatctcgtgtgatccatatcagaaagcttcccatcgatgtgactgaaggtgaagtgatctctcttggcctgcccttcggaaaggtgactaatttgctcatgctgaagggtaagaaccaggccttcatagaaatgaataccgaagaggccgccaacacaatggttaattattataccagtgtgactcccgtgctgcgggggcagccaatttatatccagttttctaaccataaagaactgaaaacagatagttctcccaaccaagcacgggcgcaggccgcactgcaggccgtgaactccgttcagtcagggaatctggcgttagcagcttcagccgccgcggtagacgctggcatggccatggccggccagagccccgtcttacggataattgttgaaaatctgttttaccccgtgactctcgacgtgctgcaccagatcttctccaaatttgggacggtccttaagattattacttttactaaaaataatcagtttcaggcattactgcagtacgctgaccctgtatccgcacaacatgcaaaactgtcactcgacggccagaatatttataatgcttgttgcacgctccgtattgacttctctaaactgaccagcctcaacgtgaagtataacaatgataagtcccgcgactatacacggcccgatttgccaagtggagattcacagcccagcctggatcagacgatggcagcagccttcggagcccccggcattattagtgccagcccttacgctggggctggtttccccccaacatttgccattcctcaagctgctgggttgtctgtgccaaacgttcatggggcccttgcccccttggccatcccctccgccgccgccgctgcagccgccgctgggcgcattgccatcccaggactggccggagccggtaattccgtgctgctcgtctccaacctgaatcccgaaagagtaacaccgcaatccctgttcatcctttttggggtatacggcgacgtccagcgagttaaaatcctctttaacaaaaaagagaatgccctggtgcagatggccgatggtaatcaggcccagctcgcaatgtctcacctgaatggacacaaactgcacggcaaaccaatcaggatcaccctgagcaaacaccagaatgtgcagttgccaagggaggggcaggaggaccagggccttaccaaggactatggtaattcaccactccaccggtttaagaagccggggtctaagaactttcaaaacattttccctccttccgctacattgcatctctcgaacattccacccagcgtgtccgaggaggacttaaaagttttgttcagctctaacggaggagtggtgaagggattcaagttctttcaaaaagataggaaaatggcactgatccaaatgggtagcgtggaggaagctgtacaagcgctgatcgacctgcacaaccacgacctgggtgaaaaccaccatctaagggtttctttcagcaagtctacaatctag

SEQ ID NO: 132399 - DNA, 1674 bp, Artificial Sequence
  derived and/or modified sequence
atggatggcatcgtgcctgacattgctgtgggcaccaagaggggcagtgatgagctgttcagcacctgtgtgaccaacggccccttcatcatgagcagcaacagcgccagcgctgccaatggaaatgacagcaagaagttcaagggggacagccgctctgctggggtgcccagcagggtcatccacatcaggaagctgcccattgatgtgacagaaggagaggtgatcagcctgggcctgccctttgggaaggtgaccaacctgctgatgctgaagggcaagaaccaggccttcatcgagatgaacacagaggaggccgccaacaccatggtgaactactacacctctgtgacccctgtgctgcggggccagcccatctacatccagttcagcaaccacaaggagctgaagacagacagcagccccaaccaggcccgggcccaggccgccctgcaggccgtgaacagcgtgcagagcggcaacctggccctggccgccagcgctgctgctgtggatgctggcatggccatggccggccagagccctgtgctgcgcatcatcgtggagaacctcttctaccctgtgaccctggatgtgctgcaccagatcttcagcaagtttggaacagtgctgaagatcatcaccttcaccaagaacaaccagttccaggccctgctgcagtatgctgaccctgtgtctgcccagcacgccaagctgagcctggatggccagaacatctacaatgcctgctgcaccctgagaattgacttcagcaagctgaccagcctgaatgtgaagtacaacaatgacaagagccgggactacaccaggccagacctgcccagcggggacagccagcccagcctggaccagaccatggctgctgcctttggagcccctggcatcatcagcgccagcccctatgctggggccggcttcccccccacctttgccatcccccaggccgccggcctgtctgtgcccaacgtgcatggagccctggcccccctggccatccccagcgctgctgctgctgctgctgctgctggccgcatcgccatccctggcctggccggggccggcaacagcgtgctgctggtgagcaacctgaaccctgagcgggtgaccccccagagcctcttcatcctgtttggagtgtatggagatgtgcagagggtgaagatcctcttcaacaagaaggaaaatgccctggtgcagatggctgatggcaaccaggcccagctggccatgagccacctgaatggccacaagctgcacggcaagcccatccgcatcaccctgagcaagcaccagaatgtgcagctgccccgggagggccaggaggaccagggcctgaccaaggactatggcaacagccccctgcaccgcttcaagaagccaggcagcaagaacttccagaacatcttccccccatctgccaccctgcacctgagcaacatcccccccagcgtgtctgaggaggacctgaaggtgctcttcagcagcaatggaggagtggtgaagggcttcaagttcttccagaaggacaggaagatggccctgatccagatgggctctgtggaggaggccgtgcaggccctgattgacctgcacaaccacgacctgggggagaaccaccacctgcgggtgtccttcagcaagagcaccatctag

SEQ ID NO: 132400 - DNA, 1674 bp, Artificial Sequence
  derived and/or modified sequence
atggacggcatcgtgcccgacatcgccgtgggcaccaagcggggctccgacgaactgttctcgacctgtgtgacaaacggccctttcatcatgtcatccaattctgcaagcgcagcaaatggcaatgactcaaagaagtttaaaggtgactccagaagcgcaggtgttccctcccgcgtgattcatattagaaagctccccatcgatgtaacagagggagaggttatctctctgggactgccatttggcaaggtgactaacctgcttatgcttaagggaaaaaaccaggcgtttatcgaaatgaataccgaggaagctgcgaatactatggttaactattacactagcgtcacccccgttctgaggggtcagccaatttatattcagttcagcaaccataaggagttaaagacagactcatcccctaatcaggctcgagctcaggcagctctgcaagccgtgaattctgttcagtccgggaatcttgccttagcggcaagtgcagccgccgtcgatgctggcatggcgatggccggccagtcaccagtccttcgaattattgtggagaacctcttttacccagtgacgttggatgtgctccaccagatctttagtaagtttgggactgtgctgaaaattataactttcaccaaaaacaaccagtttcaagctctgttacagtacgccgacccagtttctgcccagcacgctaagctgagtctggatgggcagaacatatacaacgcatgttgtacccttaggatcgacttctccaagcttacatcactcaatgtgaaatacaataacgataagagtcgcgattatactcggccagaccttcccagcggtgattctcagcctagtcttgaccagaccatggcggccgcctttggcgctccgggaatcatcagcgcctcgccttatgctggcgctggctttcccccaacttttgccatcccacaagcggccggcctttccgttccaaatgtgcatggggcactcgcaccactggctatcccttctgccgcggcagccgccgcagccgctggtcgtatcgcgatccctggactagcgggagcaggaaacagcgtactcctggtgtcgaatcttaatcccgagcgcgtgacaccacaatccctgttcattctatttggtgtttatggagacgtgcagcgagttaagattctgtttaataaaaaggaaaacgctctggtgcaaatggcagacggcaatcaggctcagctggctatgagccacctgaatggccacaagctacacggtaagcccatacgcattaccctgtctaaacatcaaaacgttcagctgccacgcgaaggacaagaggaccagggactgacaaaagattatggtaattccccactgcatcggtttaagaaaccaggaagcaagaactttcaaaacatctttccaccctcagcaaccctgcacctgtccaacattcctccaagcgtgtcagaggaggacctcaaagttctgttctcttcaaacggcggggtcgtgaaaggattcaaatttttccagaaggaccggaagatggcgctgatccagatgggttcagtagaggaagccgttcaagccctgatcgacctacataaccacgacttgggtgaaaaccaccacctacgtgtctcattctccaagtcaacgatttag

SEQ ID NO: 132401 - DNA, 3281 bp, Artificial Sequence
  derived and/or modified sequence
tgcgggcgtctccgccattttgtgagtctataactcggagccgttgggtcggttcctgctattccggcgcctccactccgtcccccgcgggtctgctctgtgtgccatggacggcattgtcccagatatagccgttggtacaaagcggggatctgacgagcttttctctacttgtgtcactaacggaccgtttatcatgagcagcaactcggcttctgcagcaaacggaaatgacagcaagaagttcaaaggtgacagccgaagtgcaggcgtcccctctagagtgatccacatccggaagctccccatcgacgtcacggagggggaagtcatctccctggggctgccctttgggaaggtcaccaacctcctgatgctgaaggggaaaaaccaggccttcatcgagatgaacacggaggaggctgccaacaccatggtgaactactacacctcggtgacccctgtgctgcgcggccagcccatctacatccagttctccaaccacaaggagctgaagaccgacagctctcccaaccaggcgcgggcccaggcggccctgcaggcggtgaactcggtccagtcggggaacctggccttggctgcctcggcggcggccgtggacgcagggatggcgatggccgggcagagccccgtgctcaggatcatcgtggagaacctcttctaccctgtgaccctggatgtgctgcaccagattttctccaagttcggcacagtgttgaagatcatcaccttcaccaagaacaaccagttccaggccctgctgcagtatgcggaccccgtgagcgcccagcacgccaagctgtcgctggacgggcagaacatctacaacgcctgctgcacgctgcgcatcgacttttccaagctcaccagcctcaacgtcaagtacaacaatgacaagagccgtgactacacacgcccagacctgccttccggggacagccagccctcgctggaccagaccatggccgcggccttcggtgcacctggtataatctcagcctctccgtatgcaggagctggtttccctcccacctttgccattcctcaagctgcaggcctttccgttccgaacgtccacggcgccctggcccccctggccatcccctcggcggcggcggcagctgcggcggcaggtcggatcgccatcccgggcctggcgggggcaggaaattctgtattgctggtcagcaacctcaacccagagagagtcacaccccaaagcctctttattcttttcggcgtctacggtgacgtgcagcgcgtgaagatcctgttcaataagaaggagaacgccctagtgcagatggcggacggcaaccaggcccagctggccatgagccacctgaacgggcacaagctgcacgggaagcccatccgcatcacgctctcgaagcaccagaacgtgcagctgccccgcgagggccaggaggaccagggcctgaccaaggactacggcaactcacccctgcaccgcttcaagaagccgggctccaagaacttccagaacatattcccgccctcggccacgctgcacctctccaacatcccgccctcagtctccgaggaggatctcaaggtcctgttttccagcaatgggggcgtcgtcaaaggattcaagttcttccagaaggaccgcaagatggcactgatccagatgggctccgtggaggaggcggtccaggccctcattgacctgcacaaccacgacctcggggagaaccaccacctgcgggtctccttctccaagtccaccatctaggggcacaggcccccacggccgggccccctggcgacaacttccatcattccagagaaaagccactttaaaaacagctgaagtgaccttagcagaccagagattttatttttttaaagagaaatcagtttacctgtttttaaaaaaattaaatctagttcaccttgctcaccctgcggtgacagggacagctcaggctcttggtgactgtggcagcgggagttcccggccctccacacccggggccagaccctcggggccatgccttggtggggcctgtgtcgggcgtggggcctgcaggtgggcgccccgaccacgacttggcttccttgtgccttaaaaaacctgccttcctgcagccacacacccacccggggtgtcctggggacccaaggggtgggggggtcacaccagagagaggcagggggcctggccggctcctgcaggatcatgcagctggggcgcggcggccgcggctgcgacaccccaaccccagccctctaatcaagtcacgtgattctcccttcaccccgcccccagggccttcccttctgcccccaggcgggctccccgctgctccagctgcggagctggtcgacataatctctgtattatatactttgcagttgcagacgtctgtgcctagcaatatttccagttgaccaaatattctaatcttttttcatttatatgcaaaagaaatagttttaagtaactttttatagcaagatgatacaatggtatgagtgtaatctaaacttccttgtggtattaccttgtatgctgttacttttattttattccttgtaattaagtcacaggcaggacccagtttccagagagcaggcggggccgcccagtgggtcaggcacagggagccccggtcctatcttagagcccctgagcttcagggaaggggcgggcgtgtcgccgcctctggcatcgcctccggttgccttacaccacgccttcacctgcagtcgcctagaaaacttgctctcaaacttcagggttttttcttccttcaaattttggaccaaagtctcatttctgtgttttgcctgcctctgatgctgggacccggaaggcgggcgctcctcctgtcttctctgtgctctttctaccgcccccgcgtcctgtcccgggggctctcctaggatcccctttccgtaaaagcgtgtaacaagggtgtaaatatttataattttttatacctgttgtgagacccgaggggcggcggcgcggttttttatggtgacacaaatgtatattttgctaacagcaattccaggctcagtattgtgaccgcggagccacaggggaccccacgcacattccgttgccttacccgatggcttgtgacgcggagagaaccgattaaaaccgtttgagaaactcctcccttgtctagccctgtgttcgctgtggacgctgtagaggcaggttggccagtctgtacctggacttcgaataaatcttctgtatcctcgctccgttccgcctt

SEQ ID NO: 132402 - DNA, 1674 bp, Artificial Sequence
  derived and/or modified sequence
atggacggcatcgtacccgacatagccgtcggaacgaaaagagggagcgatgagctgttttctacatgcgtgaccaatgggcctttcatcatgagctcgaacagcgcctcagctgcaaatggtaatgactctaagaaatttaagggcgactcccgctctgctggggtccccagtcgggtgatccacattaggaagctacccattgatgtaaccgaaggggaggtgatcagtttaggcctgcctttcggcaaagtcacaaacttgctgatgctcaagggaaagaatcaagccttcatcgagatgaatactgaagaggccgctaacacgatggtaaattactacacttcggtcaccccagtcctccgaggacagcctatctacatccagttctccaaccataaggagctgaaaaccgactcttctcccaatcaggccagggcgcaggccgctctccaagccgttaacagcgtgcagagtggcaatctggccctcgctgcaagcgcggctgctgtggacgctggaatggcgatggctggccagtcacctgtgctaagaataatcgtagagaacctattttaccccgtgacacttgacgttctgcatcagatatttagtaaatttgggacggtgctgaagataattacatttacaaagaacaatcaattccaggcccttctgcaatatgccgacccagtgtcagcccagcatgcaaagctctcccttgacgggcagaacatttataacgcttgctgcacgttgcgcatagactttagcaagcttacaagcttgaacgtgaaatataataatgacaaatccagggattatacacgaccagatctgccttctggagattcccagcccagtctggaccaaaccatggccgcagcttttggcgctcctgggattatatcagcgagtccttacgctggggcaggatttccgcctacgttcgccataccccaggcggcaggattatccgttccgaacgtacacggggctctggcgccactggctatcccatctgcagccgctgccgctgcagctgcgggacgaattgctattcccggtctcgcgggagctgggaactccgtgttgctggtctccaatctcaatcccgagcgtgttaccccccaaagtctcttcatcttgtttggcgtatatggggacgtccagagggtgaagatcctcttcaacaagaaggagaacgctcttgtccagatggctgacgggaatcaggcccaattagctatgtcgcatctgaatggccataagctgcatggcaagcccattcgaatcacattgtccaagcatcagaacgtgcaactgcccagggaagggcaggaggatcagggattaaccaaggactatggcaactccccgttacaccgcttcaaaaagccagggtcaaagaattttcaaaacatttttcctcccagtgcaacactgcacctgtccaatattccaccttctgtgtcagaggaagacttaaaagtgctgttttcaagtaatgggggagtggtgaaaggttttaagtttttccaaaaagacagaaaaatggctctgattcaaatgggctcagtcgaggaagccgtgcaggccctgattgacttacacaatcacgatcttggggagaatcaccatctccgggtttcgttctcaaagagcacaatctag

SEQ ID NO: 132403 - DNA, 1674 bp, Artificial Sequence
  derived and/or modified sequence
atggacggcatcgtgcccgacatcgccgtgggcaccaagagaggcagcgacgagctgttcagcacctgcgtgaccaacggccccttcatcatgagcagcaacagcgccagcgccgccaacggcaacgacagcaagaagttcaagggcgacagcagaagcgccggcgtgcccagcagagtgatccacatcagaaagctgcccatcgacgtgaccgagggcgaggtgatcagcctgggcctgcccttcggcaaggtgaccaacctgctgatgctgaagggcaagaaccaggccttcatcgagatgaacaccgaggaggccgccaacaccatggtgaactactacaccagcgtgacccccgtgctgagaggccagcccatctacatccagttcagcaaccacaaggagctgaagaccgacagcagccccaaccaggccagagcccaggccgccctgcaggccgtgaacagcgtgcagagcggcaacctggccctggccgccagcgccgccgccgtggacgccggcatggccatggccggccagagccccgtgctgagaatcatcgtggagaacctgttctaccccgtgaccctggacgtgctgcaccagatcttcagcaagttcggcaccgtgctgaagatcatcaccttcaccaagaacaaccagttccaggccctgctgcagtacgccgaccccgtgagcgcccagcacgccaagctgagcctggacggccagaacatctacaacgcctgctgcaccctgagaatcgacttcagcaagctgaccagcctgaacgtgaagtacaacaacgacaagagcagagactacaccagacccgacctgcccagcggcgacagccagcccagcctggaccagaccatggccgccgccttcggcgcccccggcatcatcagcgccagcccctacgccggcgccggcttcccccccaccttcgccatcccccaggccgccggcctgagcgtgcccaacgtgcacggcgccctggcccccctggccatccccagcgccgccgccgccgccgccgccgccggcagaatcgccatccccggcctggccggcgccggcaacagcgtgctgctggtgagcaacctgaaccccgagagagtgaccccccagagcctgttcatcctgttcggcgtgtacggcgacgtgcagagagtgaagatcctgttcaacaagaaggagaacgccctggtgcagatggccgacggcaaccaggcccagctggccatgagccacctgaacggccacaagctgcacggcaagcccatcagaatcaccctgagcaagcaccagaacgtgcagctgcccagagagggccaggaggaccagggcctgaccaaggactacggcaacagccccctgcacagattcaagaagcccggcagcaagaacttccagaacatcttcccccccagcgccaccctgcacctgagcaacatcccccccagcgtgagcgaggaggacctgaaggtgctgttcagcagcaacggcggcgtggtgaagggcttcaagttcttccagaaggacagaaagatggccctgatccagatgggcagcgtggaggaggccgtgcaggccctgatcgacctgcacaaccacgacctgggcgagaaccaccacctgagagtgagcttcagcaagagcaccatctag

SEQ ID NO: 132404 - protein, 1070 aa, Artificial Sequence
  derived and/or modified sequence
MGAARGSPARPRRLPLLSVLLLPLLGGTQTAIVFIKQPSSQDALQGRRALLRCEVEAPGPVHVYWLLDGAPVQDTERRFAQGSSLSFAAVDRLQDSGTFQCVARDDVTGEEARSANASFNIKWIEAGPVVLKHPASEAEIQPQTQVTLRCHIDGHPRPTYQWFRDGTPLSDGQSNHTVSSKERNLTLRPAGPEHSGLYSCCAHSAFGQACSSQNFTLSIADESFARVVLAPQDVVVARYEEAMFHCQFSAQPPPSLQWLFEDETPITNRSRPPHLRRATVFANGSLLLTQVRPRNAGIYRCIGQGQRGPPIILEATLHLAEIEDMPLFEPRVFTAGSEERVTCLPPKGLPEPSVWWEHAGVRLPTHGRVYQKGHELVLANIAESDAGVYTCHAANLAGQRRQDVNITVATVPSWLKKPQDSQLEEGKPGYLDCLTQATPKPTVVWYRNQMLISEDSRFEVFKNGTLRINSVEVYDGTWYRCMSSTPAGSIEAQARVQVLEKLKFTPPPQPQQCMEFDKEATVPCSATGREKPTIKWERADGSSLPEWVTDNAGTLHFARVTRDDAGNYTCIASNGPQGQIRAHVQLTVAVFITFKVEPERTTVYQGHTALLQCEAQGDPKPLIQWKGKDRILDPTKLGPRMHIFQNGSLVIHDVAPEDSGRYTCIAGNSCNIKHTEAPLYVVDKPVPEESEGPGSPPPYKMIQTIGLSVGAAVAYIIAVLGLMFYCKKRCKAKRLQKQPEGEEPEMECLNGGPLQNGQPSAEIQEEVALTSLGSGPAATNKRHSTSDKMHFPRSSLQPITTLGKSEFGEVFLAKAQGLEEGVAETLVLVKSLQSKDEQQQLDFRRELEMFGKLNHANVVRLLGLCREAEPHYMVLEYVDLGDLKQFLRISKSKDEKLKSQPLSTKQKVALCTQVALGMEHLSNNRFVHKDLAARNCLVSAQRQVKVSALGLSKDVYNSEYYHFRQAWVPLRWMSPEAILEGDFSTKSDVWAFGVLMWEVFTHGEMPHGGQADDEVLADLQAGKARLPQPEGCPSKLYRLMQRCWALSPKDRPSFSEIASALGDSTVDSKP

SEQ ID NO: 132405 - protein, 384 aa, Artificial Sequence
  derived and/or modified sequence
MTRRGRRRSSHFLGPPAGAAGCTQRRSRELAAAAMSHQTGIQASEDVKEIFARARNGKYRLLKISIENEQLVIGSYSQPSDSWDKDYDSFVLPLLEDKQPCYILFRLDSQNAQGYEWIFIAWSPDHSHVRQKMLYAATRATLKKEFGGGHIKDEVFGTVKEDVSLHGYKKYLLSQSSPAPLTAAEEELRQIKINEVQTDVGVDTKHQTLQGVAFPISREAFQALEKLNNRQLNYVQLEIDIKNEIIILANTTNTELKDLPKRIPKDSARYHFFLYKHSHEGDYLESIVFIYSMPGYTCSIRERMLYSSCKSRLLEIVERQLQMDVIRKIEIDNGDELTADFLYEEVHPKQHAHKQSFAKPKGPAGKRGIRRLIRGPAETEATTD

SEQ ID NO: 132406 - protein, 350 aa, Artificial Sequence
  derived and/or modified sequence
MSHQTGIQASEDVKEIFARARNGKYRLLKISIENEQLVIGSYSQPSDSWDKDYDSFVLPLLEDKQPCYILFRLDSQNAQGYEWIFIAWSPDHSHVRQKMLYAATRATLKKEFGGGHIKDEVFGTVKEDVSLHGYKKYLLSQSSPAPLTAAEEELRQIKINEVQTDVGVDTKHQTLQGVAFPISREAFQALEKLNNRQLNYVQLEIDIKNEIIILANTTNTELKDLPKRIPKDSARYHFFLYKHSHEGDYLESIVFIYSMPGYTCSIRERMLYSSCKSRLLEIVERQLQMDVIRKIEIDNGDELTADFLYEEVHPKQHAHKQSFAKPKGPAGKRGIRRLIRGPAETEATTD

SEQ ID NO: 132407 - DNA, 1155 bp, Artificial Sequence
  derived and/or modified sequence
atgaccagaagaggcagaagaagaagcagccacttcctgggcccccccgccggcgccgccggctgcacccagagaagaagcagagagctggccgccgccgccatgagccaccagaccggcatccaggccagcgaggacgtgaaggagatcttcgccagagccagaaacggcaagtacagactgctgaagatcagcatcgagaacgagcagctggtgatcggcagctacagccagcccagcgacagctgggacaaggactacgacagcttcgtgctgcccctgctggaggacaagcagccctgctacatcctgttcagactggacagccagaacgcccagggctacgagtggatcttcatcgcctggagccccgaccacagccacgtgagacagaagatgctgtacgccgccaccagagccaccctgaagaaggagttcggcggcggccacatcaaggacgaggtgttcggcaccgtgaaggaggacgtgagcctgcacggctacaagaagtacctgctgagccagagcagccccgcccccctgaccgccgccgaggaggagctgagacagatcaagatcaacgaggtgcagaccgacgtgggcgtggacaccaagcaccagaccctgcagggcgtggccttccccatcagcagagaggccttccaggccctggagaagctgaacaacagacagctgaactacgtgcagctggagatcgacatcaagaacgagatcatcatcctggccaacaccaccaacaccgagctgaaggacctgcccaagagaatccccaaggacagcgccagataccacttcttcctgtacaagcacagccacgagggcgactacctggagagcatcgtgttcatctacagcatgcccggctacacctgcagcatcagagagagaatgctgtacagcagctgcaagagcagactgctggagatcgtggagagacagctgcagatggacgtgatcagaaagatcgagatcgacaacggcgacgagctgaccgccgacttcctgtacgaggaggtgcaccccaagcagcacgcccacaagcagagcttcgccaagcccaagggccccgccggcaagagaggcatcagaagactgatcagaggccccgccgagaccgaggccaccaccgactag

SEQ ID NO: 132408 - DNA, 1053 bp, Artificial Sequence
  derived and/or modified sequence
atgagccaccagaccggcatccaggccagcgaggacgtgaaggagatcttcgccagagccagaaacggcaagtacagactgctgaagatcagcatcgagaacgagcagctggtgatcggcagctacagccagcccagcgacagctgggacaaggactacgacagcttcgtgctgcccctgctggaggacaagcagccctgctacatcctgttcagactggacagccagaacgcccagggctacgagtggatcttcatcgcctggagccccgaccacagccacgtgagacagaagatgctgtacgccgccaccagagccaccctgaagaaggagttcggcggcggccacatcaaggacgaggtgttcggcaccgtgaaggaggacgtgagcctgcacggctacaagaagtacctgctgagccagagcagccccgcccccctgaccgccgccgaggaggagctgagacagatcaagatcaacgaggtgcagaccgacgtgggcgtggacaccaagcaccagaccctgcagggcgtggccttccccatcagcagagaggccttccaggccctggagaagctgaacaacagacagctgaactacgtgcagctggagatcgacatcaagaacgagatcatcatcctggccaacaccaccaacaccgagctgaaggacctgcccaagagaatccccaaggacagcgccagataccacttcttcctgtacaagcacagccacgagggcgactacctggagagcatcgtgttcatctacagcatgcccggctacacctgcagcatcagagagagaatgctgtacagcagctgcaagagcagactgctggagatcgtggagagacagctgcagatggacgtgatcagaaagatcgagatcgacaacggcgacgagctgaccgccgacttcctgtacgaggaggtgcaccccaagcagcacgcccacaagcagagcttcgccaagcccaagggccccgccggcaagagaggcatcagaagactgatcagaggccccgccgagaccgaggccaccaccgactag

SEQ ID NO: 132409 - DNA, 1155 bp, Artificial Sequence
  derived and/or modified sequence
atgacccgacgcgggcgccggaggtcttcacattttctgggtccgccagccggcgctgctggctgcacccagcggcggagtcgcgagcttgccgctgcagctatgagccaccagactgggatccaggcgtctgaagacgttaaggagatttttgcacgagctcgtaatggaaagtaccggctgctgaagatctccattgagaacgagcaactcgttatcggctcatacagccagcctagcgatagctgggacaaggattatgatagcttcgtgcttccacttttagaggataaacagccgtgctatatcctatttcgcttggatagtcagaacgcacagggttacgagtggatttttatcgcctggtccccggaccatagtcatgtgcggcaaaagatgctctatgccgctacccgagccacattgaagaaggagttcggtggtggccacatcaaagatgaagtgttcggtactgttaaagaagacgtcagtctacatggctacaagaaatacctacttagtcagtcttctcctgcgccacttaccgccgcagaagaggaactgcggcagattaaaatcaacgaagtgcagaccgacgtcggagtagataccaagcatcagactctgcaaggggtggctttccctatctcccgggaagcctttcaggcactggaaaaacttaacaatcgccagctcaattacgttcagctggagatcgatattaagaacgagatcattattctggccaacaccacaaacactgagttaaaagatttgccaaagcggattcccaaagacagtgcacgctaccacttctttctgtacaaacactctcatgagggagactatctggaatctatcgttttcatatattccatgcccggctatacttgttcgatcagggagcggatgctgtatagtagttgcaaatctagattgctggagattgttgagagacagcttcagatggacgttatcaggaaaattgaaatcgataatggtgatgaacttacagctgacttcctctacgaagaagttcaccccaagcaacacgcccacaagcaatccttcgctaaacccaaggggccagcgggcaagagaggaattcgaaggttgattcgtggtcccgccgaaacagaggccactaccgactag

SEQ ID NO: 132410 - DNA, 1053 bp, Artificial Sequence
  derived and/or modified sequence
atgtctcaccagacagggattcaggcatccgaggacgtgaaggagatctttgcccgagcacgtaacgggaaataccgtttgctgaagatttccatcgaaaacgagcagttggtaatcggatcttactcccaacctagcgacagttgggacaaagattacgactctttcgtgctgcctctgttagaggacaagcagccctgctatatcctcttccggctcgatagccagaatgcccagggttatgaatggatcttcatcgcctggtctcctgaccacagccacgttagacagaaaatgctgtacgccgctacccgcgccacccttaaaaaagaattcggcggcggacacatcaaggatgaggtcttcgggacagtcaaagaggacgtgtcgctgcatgggtacaagaagtacctgttgtcacaatccagtcccgctcccctgactgccgcggaggaggagctgagacaaatcaaaatcaacgaggttcagacggacgtcggggtcgacaccaagcaccagacattgcagggcgtggcttttcccattagtagggaagcctttcaggcactggagaaactgaataatcgccagctgaattatgtccaactcgaaatcgacattaagaatgaaataatcattctggcaaataccaccaacactgaattgaaggacctgccaaaaagaatcccaaaagactctgctagatatcatttcttcctgtacaagcactcgcacgaaggcgactacctggaatccattgtcttcatatattccatgcctgggtatacttgttccatcagggagcgaatgttgtattcaagttgcaaatcccggcttctcgaaattgtggagaggcagctgcagatggacgtaatccggaaaattgagatagataatggcgacgagctcacagctgattttctctatgaggaggtccaccccaaacagcacgcccataagcagagtttcgccaagccgaaaggtccggctgggaaacgaggaatccgacggctcattcgtggacccgccgaaaccgaggcaacgacggattag

SEQ ID NO: 132411 - DNA, 1155 bp, Artificial Sequence
  derived and/or modified sequence
atgacccggcggggcagaagaagaagcagccacttcctgggccccccagctggagctgctggctgcacccagaggaggagccgggagctggccgctgctgccatgagccaccagacaggcatccaggcctctgaagatgtgaaggagatctttgcccgggccagaaatggcaagtaccgcctgctgaagatcagcattgaaaatgagcagctggtgattggcagctacagccagcccagcgacagctgggacaaggactatgacagctttgtgctgcccctgctggaggacaagcagccctgctacatcctcttccggctggacagccagaatgcccagggctatgagtggatcttcatcgcctggagcccagaccacagccacgtgcggcagaagatgctgtatgctgccacccgggccaccctgaagaaggagtttggaggcggccacatcaaggatgaggtgtttggcaccgtgaaggaggatgtgtccctgcacggctacaagaagtacctgctgagccagagcagccctgcccccctgacagctgctgaggaggagctgcggcagatcaagatcaatgaggtgcagacagatgtgggcgtggacaccaagcaccagaccctgcagggcgtggccttccccatcagccgggaggccttccaggccctggagaagctgaacaaccggcagctgaactacgtgcagctggagattgacatcaagaatgagatcatcatcctggccaacaccaccaacacagagctgaaggacctgcccaagaggatccccaaggacagcgcccgctaccacttcttcctgtacaagcacagccatgaaggagactacctggagagcatcgtgttcatctacagcatgcctggctacacctgcagcatccgggagaggatgctgtacagcagctgcaagagccggctgctggagatcgtggagcggcagctgcagatggatgtgatcaggaagattgaaattgacaatggagatgagctgacagctgacttcctgtatgaggaggtgcaccccaagcagcacgcccacaagcagagctttgccaagcccaagggccctgctgggaagaggggcatccggcggctcatccggggccctgctgagacagaggccaccacagactag

SEQ ID NO: 132412 - DNA, 1053 bp, Artificial Sequence
  derived and/or modified sequence
atgagccaccagacaggcatccaggcctctgaagatgtgaaggagatctttgcccgggccagaaatggcaagtaccgcctgctgaagatcagcattgaaaatgagcagctggtgattggcagctacagccagcccagcgacagctgggacaaggactatgacagctttgtgctgcccctgctggaggacaagcagccctgctacatcctcttccggctggacagccagaatgcccagggctatgagtggatcttcatcgcctggagcccagaccacagccacgtgcggcagaagatgctgtatgctgccacccgggccaccctgaagaaggagtttggaggcggccacatcaaggatgaggtgtttggcaccgtgaaggaggatgtgtccctgcacggctacaagaagtacctgctgagccagagcagccctgcccccctgacagctgctgaggaggagctgcggcagatcaagatcaatgaggtgcagacagatgtgggcgtggacaccaagcaccagaccctgcagggcgtggccttccccatcagccgggaggccttccaggccctggagaagctgaacaaccggcagctgaactacgtgcagctggagattgacatcaagaatgagatcatcatcctggccaacaccaccaacacagagctgaaggacctgcccaagaggatccccaaggacagcgcccgctaccacttcttcctgtacaagcacagccatgaaggagactacctggagagcatcgtgttcatctacagcatgcctggctacacctgcagcatccgggagaggatgctgtacagcagctgcaagagccggctgctggagatcgtggagcggcagctgcagatggatgtgatcaggaagattgaaattgacaatggagatgagctgacagctgacttcctgtatgaggaggtgcaccccaagcagcacgcccacaagcagagctttgccaagcccaagggccctgctgggaagaggggcatccggcggctcatccggggccctgctgagacagaggccaccacagactag

SEQ ID NO: 132413 - DNA, 1155 bp, Artificial Sequence
  derived and/or modified sequence
atgacccggcggggccggcggcggagcagccacttcctgggccccccagccggtgctgccggttgtacacagaggagatcccgcgagttggctgctgccgccatgtcccatcaaaccggcatccaggcctcagaggacgtcaaggaaatttttgccagggcccgtaacggcaagtacaggctcttaaaaatttccatcgaaaacgagcagcttgtcatcgggtcatatagccagccgtccgatagctgggataaggattatgatagcttcgtgttaccacttctcgaggacaagcaaccttgctatatactctttcggttggatagccaaaatgcacagggctacgaatggatttttatagcatggtctccagaccacagccatgtgaggcagaagatgctgtatgcggcaactagggccacactgaaaaaagaattcggagggggacatatcaaggacgaggtgttcggaactgtcaaggaggacgtgtccctccacggctataaaaagtatcttctgtcccagagttcccccgcacccctgaccgccgcagaagaggaactccgccagatcaagatcaacgaagttcagaccgatgtgggcgtggacactaagcaccagacactgcagggagtcgcatttcccatctctcgtgaggctttccaggcactcgagaagctcaacaaccggcagctgaactatgtgcagttagagatagatattaagaatgaaatcatcatactggcgaatacaacgaacacagagctcaaggaccttcccaaaagaatccctaaggattccgccaggtatcatttttttctgtacaaacacagtcatgaaggagactatctcgaaagtattgtgttcatttattcaatgccgggctatacctgttcaatccgggagagaatgctttacagttcctgtaaatcccggctgttggagatcgtggagaggcaactccagatggatgtgatacgaaaaatagagattgacaacggggacgaattgaccgctgattttctgtatgaggaagtccaccctaaacagcacgcacacaagcagagctttgcaaaacctaaaggcccagctggtaaacggggaatacggcgactgataagaggcccggccgagaccgaagctactactgattag

SEQ ID NO: 132414 - DNA, 1053 bp, Artificial Sequence
  derived and/or modified sequence
atgagccaccagaccggcatccaggccagcgaggacgtgaaggagatcttcgctcgggcaagaaacggtaaataccggcttctcaaaatcagcattgagaacgaacagttggttatcggttcctactcccaacccagcgatagttgggataaggactacgatagcttcgtactgccactgctggaggacaagcaaccttgttatatccttttccgtttggattcacagaatgcacagggatacgaatggatttttatagcctggtctcctgatcacagtcacgtgaggcaaaaaatgctgtacgccgctacacgcgctacattgaagaaggaatttggcggaggccatattaaagacgaggtgttcggcacagtgaaggaggatgtgtctctgcacgggtataagaagtatttacttagtcagagcagccccgcccccctgacagcagcggaagaagaactgagacagatcaagatcaatgaggttcaaaccgacgtcggtgtggatacaaagcatcagacactgcagggtgtggcatttccgatctctagagaagcctttcaagcacttgagaaactgaataatagacaactcaactacgttcagcttgagattgatattaaaaacgagatcatcattttggccaataccaccaataccgagctgaaggatctgcccaaaagaataccgaaggatagtgcgaggtaccacttctttctgtacaaacacagtcatgaaggggactatctcgagtctattgtgtttatctattcaatgcctgggtatacatgctctattagagaacgcatgttgtatagctcctgcaagagccgcttattagagatcgtagagaggcaactgcaaatggacgtgattcgcaagatagaaatagacaatggggatgaattaaccgccgacttcctgtacgaagaggtgcatcctaaacaacatgcccacaagcaatcctttgccaaaccgaagggacccgcagggaaacggggaatcaggcgtctgattcggggacctgccgaaaccgaggccacaactgactag

SEQ ID NO: 132415 - DNA, 1155 bp, Artificial Sequence
  derived and/or modified sequence
atgactaggcgtgggagacgcagatccagtcatttcctcgggcctcctgctggggctgcgggatgcacacagagaagaagtcgggaactggccgctgccgcaatgtcccaccagaccggcattcaagcctctgaggacgtgaaggagatcttcgctagagccagaaatggcaagtataggctgctgaaaatctcaattgagaatgaacaactcgttatcggatcttattctcaacctagtgatagctgggataaagattacgatagctttgtgctgccgctcctcgaggacaagcagccgtgttacattctgtttaggctggacagccagaatgctcagggttatgagtggatttttatagcctggtcccctgatcattctcacgtgagacagaagatgttatacgcagctacgagggcaactcttaagaaggaatttggaggtgggcacattaaagatgaagtatttggaactgtaaaggaggatgtgagcctacatgggtacaagaagtacctactcagccagagcagtcccgctcctctcaccgcggcagaggaagagctgaggcagatcaagattaacgaggtacagactgacgtaggggtggacactaagcatcagacactgcagggagtggctttcccaatatctagagaggccttccaggcgctcgagaaacttaacaatcgccaactgaattacgtgcagctcgagatcgatataaagaacgagattatcatactggccaatacaacaaacacagagctgaaagacctgcccaagcgaattcccaaggactccgcaagataccactttttcctatataaacactcccacgagggagactatctcgagtctattgtctttatttatagtatgcctgggtacacttgctctatccgggagcgaatgttatacagcagctgcaaatccaggttactggagatagtcgagaggcagcttcagatggatgttattcgtaaaattgagatcgacaatggggatgaactgaccgccgactttctgtatgaggaggtgcaccccaagcagcacgcccataaacaaagcttcgcgaaaccaaagggcccagctggcaagcgcggtatcagaagattaatccggggtcctgcggagactgaggccactacagattag

SEQ ID NO: 132416 - DNA, 1053 bp, Artificial Sequence
  derived and/or modified sequence
atgagtcaccagactgggattcaggctagtgaggatgtgaaagagattttcgcacgtgctaggaacggaaagtaccgattgctgaagatttcaatcgagaatgaacagctcgtgatcgggagttatagccagccttctgactcgtgggataaagactatgacagttttgttctccctctcctggaggacaagcaaccttgttacatactgtttagattggacagtcagaacgcccagggatatgagtggatcttcattgcttggtcccctgatcactcacatgttagacaaaagatgctgtatgcagcgaccagggccacactcaagaaagaatttggaggaggccacatcaaagacgaggtttttggtacagtcaaagaggacgtgtctctacatggctataaaaaatatttgctctcacagtccagtcctgctcccctgacagctgctgaagaggaattacggcagatcaagattaatgaggtccagactgacgtgggggttgacaccaagcatcagacccttcaaggcgtcgcatttccaatttctagagaggcctttcaagccctggagaagcttaacaacagacagctaaactatgtccagctagaaatcgatattaaaaacgaaatcattatccttgcaaacactactaacaccgagctcaaggacctccctaaaaggattccaaaggattctgctcgctaccacttctttctatacaaacacagtcacgagggggactatctggagagcatcgtgtttatttacagcatgcccggatacacctgttctatacgggagagaatgctgtactcatcctgcaaatcccggctgctggagattgtagaaagacagttacagatggatgtcatccgtaagatagaaatagacaacggggacgaacttactgccgacttcctatatgaagaggtccacccaaagcagcacgcgcataaacagtccttcgccaaacctaaggggccagccggaaaacgcggaatccgcaggcttatccgcggtcccgctgagactgaagcgaccactgactag

SEQ ID NO: 132417 - DNA, 3043 bp, Artificial Sequence
  derived and/or modified sequence
gggcggggcggccgcgggtcgcgggcggatgacgcgccggggccggcggaggagcagccacttcctggggccgccggccggggccgctggctgcactcagcgccggagccgggagctagcggccgccgccatgtcccaccagaccggcatccaagcaagtgaagatgttaaagagatctttgccagagccagaaatggaaagtacagacttctgaaaatatctattgaaaatgagcaacttgtgattggatcatatagtcagccttcagattcctgggataaggattatgattcctttgttttacccctgttggaggacaaacaaccatgctatatattattcaggttagattctcagaatgcccagggatatgaatggatattcattgcatggtctccagatcattctcatgttcgtcaaaaaatgttgtatgcagcaacaagagcaactctgaagaaggaatttggaggtggccacattaaagatgaagtatttggaacagtaaaggaagatgtatcattacatggatataaaaaatacttgctgtcacaatcttcccctgccccactgactgcagctgaggaagaactacgacagattaaaatcaatgaggtacagactgacgtgggtgtggacactaagcatcaaacactacaaggagtagcatttcccatttctcgagaagcctttcaggctttggaaaaattgaataatagacagctcaactatgtgcagttggaaatagatataaaaaatgaaattataattttggccaacacaacaaatacagaactgaaagatttgccaaagaggattcccaaggattcagctcgttaccatttctttctgtataaacattcccatgaaggagactatttagagtccatagtttttatttattcaatgcctggatacacatgcagtataagagagcggatgctgtattctagctgcaagagccgtctgctagaaattgtagaaagacaactacaaatggatgtaattagaaagatcgagatagacaatggggatgagttgactgcagacttcctttatgaagaagtacatcccaagcagcatgcacacaagcaaagttttgcaaaaccaaaaggtcctgcaggaaaaagaggaattcgaagactaattaggggcccagcggaaactgaagctactactgattaaagtcatcacattaaacattgtaatactagttttttaaaagtccagcttttagtacaggagaactgaaatcattccatgttgatataaagtagggaaaaaaattgtactttttggaaaatagcacttttcacttctgtgtgtttttaaaattaatgttatagaagactcatgatttctatttttgagttaaagctagaaaagggttcaacataatgtttaattttgtcacactgttttcatagcgttgattccacacttcaaatacttcttaaaattttatacagttgggccagttctagaaagtctgatgtctcaaagggtaaacttactactttcttgtgggacagaaagaccttaaaatattcatattacttaatgaatatgttaaggaccaggctagagtattttctaagctggaaacttagtgtgccttggaaaaggccgcaagttgcttactccgagtagctgtgctagctctgtcagactgtaggatcatgtctgcaacttttagaaatagtgctttatattgcagcagtcttttatatttgacttttttttaatagcattaaaattgcagatcagctcactctgaaactttaagggtaccagatattttctatactgcaggatttctgatgacattgaaagactttaaacagccttagtaaattatctttctaatgctctgtgaggccaaacatttatgttcagattgaaatttaaattaatatcattcaaaaggaaacaaaaaatgttgagttttaaaaatcaggattgacttttttctccaaaaccatacatttatgggcaaattgtgttctttatcacttccgagcaaatactcagatttaaaattactttaaagtcctggtacttaacaggctaacgtagataaacaccttaataatctcagttaatactgtatttcaaaacacatttaactgttttctaatgctttgcattatcagttacaacctagagagattttgagcctcatatttctttgatacttgaaatagagggagctagaacacttaatgtttaatctgttaaacctgctgcaagagccataactttgaggcattttctaaatgaactgtggggatccaggatttgtaatttcttgatctaaactttatgctgcataaatcacttatcggaaatgcacatttcatagtgtgaagcactcatttctaaaccttattatctaaggtaatatatgcacctttcagaaatttgtgttcgagtaagtaaagcatattagaataattgtgggttgacagatttttaaaatagaatttagagtatttggggttttgtttgtttacaaataatcagactataatatttaaacatgcaaaataactgacaataatgttgcacttgtttactaaagatataagttgttccatgggtgtacacgtagacagacacacatacacccaaattattgcattaagaatcctggagcagaccatagctgaagctgttattttcagtcaggaagactacctgtcatgaaggtataaaataatttagaagtgaatgtttttctgtaccatctatgtgcaattatactctaaattccactacactacattaaagtaaatggacattccagaatatagatgtgattatagtcttaaactaattattattaaaccaatgattgctgaaaatcagtgatgcatttgttatagagtataactcatcgtttacagtatgttttagttggcagtatcatacctagatggtgaataacatattcccagtaaatttatatagcagtgaagaattacatgccttctggtggacattttataagtgcattttatatcacaataaaaattttttctcttt

SEQ ID NO: 132418 - DNA, 3045 bp, Artificial Sequence
  derived and/or modified sequence
gggcggggcggccgcgggtcgcgggcggatgacgcgccggggccggcggaggagcagccacttcctggggccgccggccggggccgctggctgcactcagcgccggagccgggagctagcggccgccgccatgtcccaccagaccggcatccaagcaagtgaagatgttaaagagatctttgccagagccagaaatggaaagtacagacttctgaaaatatctattgaaaatgagcaacttgtgattggatcatatagtcagccttcagattcctgggataaggattatgattcctttgttttacccctgttggaggacaaacaaccatgctatatattattcaggttagattctcagaatgcccagggatatgaatggatattcattgcatggtctccagatcattctcatgttcgtcaaaaaatgttgtatgcagcaacaagagcaactctgaagaaggaatttggaggtggccacattaaagatgaagtatttggaacagtaaaggaagatgtatcattacatggatataaaaaatacttgctgtcacaatcttcccctgccccactgactgcagctgaggaagaactacgacagattaaaatcaatgaggtacagactgacgtgggtgtggacactaagcatcaaacactacaaggagtagcatttcccatttctcgagaagcctttcaggctttggaaaaattgaataatagacagctcaactatgtgcagttggaaatagatataaaaaatgaaattataattttggccaacacaacaaatacagaactgaaagatttgccaaagaggattcccaaggattcagctcgttaccatttctttctgtataaacattcccatgaaggagactatttagagtccatagtttttatttattcaatgcctggatacacatgcagtataagagagcggatgctgtattctagctgcaagagccgtctgctagaaattgtagaaagacaactacaaatggatgtaattagaaagatcgagatagacaatggggatgagttgactgcagacttcctttatgaagaagtacatcccaagcagcatgcacacaagcaaagttttgcaaaaccaaaaggtcctgcaggaaaaagaggaattcgaagactaattaggggcccagcggaaactgaagctactactgattaaagtcatcacattaaacattgtaatactagttttttaaaagtccagcttttagtacaggagaactgaaatcattccatgttgatataaagtagggaaaaaaattgtactttttggaaaatagcacttttcacttctgtgtgtttttaaaattaatgttatagaagactcatgatttctatttttgagttaaagctagaaaagggttcaacataatgtttaattttgtcacactgttttcatagcgttgattccacacttcaaatacttcttaaaattttatacagttgggccagttctagaaagtctgatgtctcaaagggtaaacttactactttcttgtgggacagaaagaccttaaaatattcatattacttaatgaatatgttaaggaccaggctagagtattttctaagctggaaacttagtgtgccttggaaaaggccgcaagttgcttactccgagtagctgtgctagctctgtcagactgtaggatcatgtctgcaacttttagaaatagtgctttatattgcagcagtcttttatatttgacttttttttaatagcattaaaattgcagatcagctcactctgaaactttaagggtaccagatattttctatactgcaggatttctgatgacattgaaagactttaaacagccttagtaaattatctttctaatgctctgtgaggccaaacatttatgttcagattgaaatttaaattaatatcattcaaaaggaaacaaaaaatgttgagttttaaaaatcaggattgacttttttctccaaaaccatacatttatgggcaaattgtgttctttatcacttccgagcaaatactcagatttaaaattactttaaagtcctggtacttaacaggctaacgtagataaacaccttaataatctcagttaatactgtatttcaaaacacatttaactgttttctaatgctttgcattatcagttacaacctagagagattttgagcctcatatttctttgatacttgaaatagagggagctagaacacttaatgtttaatctgttaaacctgctgcaagagccataactttgaggcattttctaaatgaactgtggggatccaggatttgtaatttcttgatctaaactttatgctgcataaatcacttatcggaaatgcacatttcatagtgtgaagcactcatttctaaaccttattatctaaggtaatatatgcacctttcagaaatttgtgttcgagtaagtaaagcatattagaataattgtgggttgacagatttttaaaatagaatttagagtatttggggttttgtttgtttacaaataatcagactataatatttaaacatgcaaaataactgacaataatgttgcacttgtttactaaagatataagttgttccatgggtgtacacgtagacagacacacatacacccaaattattgcattaagaatcctggagcagaccatagctgaagctgttattttcagtcaggaagactacctgtcatgaaggtataaaataatttagaagtgaatgtttttctgtaccatctatgtgcaattatactctaaattccactacactacattaaagtaaatggacattccagaatatagatgtgattatagtcttaaactaattattattaaaccaatgattgctgaaaatcagtgatgcatttgttatagagtataactcatcgtttacagtatgttttagttggcagtatcatacctagatggtgaataacatattcccagtaaatttatatagcagtgaagaattacatgccttctggtggacattttataagtgcattttatatcacaataaaaattttttctctttaa

SEQ ID NO: 132419 - protein, 110 aa, Artificial Sequence
  derived and/or modified sequence
MSDAAVDTSSEITTKDLKEKKEVVEEAENGRDAPANGNANEENGEQEADNEVDEEEEEGGEEEEEEEEGDGEEEDGDEDEEAESATGKRAAEDDEDDDVDTKKQKTDEDD

SEQ ID NO: 132420 - DNA, 336 bp, Artificial Sequence
  derived and/or modified sequence
atgtctgacgccgcagttgacacatcatccgaaatcactaccaaagatttaaaagaaaagaaggaggtggtggaagaggcggaaaacggaagggacgcccctgcaaatggcaacgcggagaacgaggagaatggggagcaggaggcggataacgaggtggatgaagaagaagaagagggcggggaggaggaggaagaagaagaagagggcgacggtgaggaggaagacggcgatgaggacgaggaggccgagtctgcaactggaaaaagagcagcagaagatgatgaggatgatgacgtggacaccaaaaagcagaagaccgacgaggacgattag

SEQ ID NO: 132421 - DNA, 333 bp, Artificial Sequence
  derived and/or modified sequence
atgtcggatgcagccgtcgacacctcaagcgaaattacaactaaggatctgaaagagaaaaaagaggttgtagaggaagctgagaatgggagagacgcccctgctaacgggaacgctaacgaggaaaacggcgagcaggaggcagacaatgaagttgatgaggaagaagaagaaggcggtgaggaagaggaggaagaagaggagggggatggggaagaagaggatggcgacgaagacgaggaggctgagagtgcaacaggaaagagggccgccgaggatgacgaggatgatgacgttgacacgaagaagcagaagacagatgaagatgactag

SEQ ID NO: 132422 - DNA, 336 bp, Artificial Sequence
  derived and/or modified sequence
atgtctgatgctgctgtggacaccagcagcgagatcaccaccaaggacctgaaggagaagaaggaggtggtggaggaggccgagaatggaagagatgccccagccaatggaaatgcagaaaatgaagaaaatggagagcaggaggccgacaatgaggtggatgaggaggaggaggagggcggggaggaggaggaggaggaggaggagggagatggagaggaggaggatggagatgaagatgaggaggccgagagcgccaccgggaagagagctgctgaagatgatgaagatgatgatgtggacaccaagaagcagaagacagatgaagatgactag

SEQ ID NO: 132423 - DNA, 333 bp, Artificial Sequence
  derived and/or modified sequence
atgtctgatgctgctgtggacaccagcagcgagatcaccaccaaggacctgaaggagaagaaggaggtggtggaggaggccgagaatggaagagatgccccagccaatggaaatgccaatgaggagaatggagagcaggaggccgacaatgaggtggatgaggaggaggaggagggcggggaggaggaggaggaggaggaggagggagatggagaggaggaggatggagatgaagatgaggaggccgagagcgccaccgggaagagagctgctgaagatgatgaagatgatgatgtggacaccaagaagcagaagacagatgaagatgactag

SEQ ID NO: 132424 - DNA, 336 bp, Artificial Sequence
  derived and/or modified sequence
atgagcgacgccgccgtggacaccagcagcgagatcaccaccaaggatctgaaagagaaaaaggaagtggtggaggaggcggagaatggcagagacgctcctgcgaatggaaacgccgagaatgaagaaaacggggagcaggaagctgacaatgaggtcgacgaggaggaggaggagggaggagaggaggaggaggaagaggaggaaggagatggggaagaagaagacggtgacgaggacgaagaagcggaaagcgctaccggtaaaagagccgcggaggatgacgaggacgacgatgtggacaccaaaaagcaaaaaacagatgaagacgattag

SEQ ID NO: 132425 - DNA, 333 bp, Artificial Sequence
  derived and/or modified sequence
atgagcgacgccgccgtggacaccagcagcgagatcaccaccaaggacctgaaggaaaagaaggaggtggtcgaggaggccgagaatggacgtgatgctccggcaaatgggaacgctaatgaggaaaacggcgagcaggaagcagataacgaggtggatgaggaagaggaagaagggggagaggaggaagaagaggaagaggagggagacggagaggaagaagatggcgatgaagacgaagaggcagaatctgcaactggtaagcgcgccgccgaagacgacgaggacgatgacgtggacactaagaaacagaagactgatgaggacgactag

SEQ ID NO: 132426 - DNA, 336 bp, Artificial Sequence
  derived and/or modified sequence
atgtccgatgccgctgtggataccagcagtgagatcaccaccaaagaccttaaggaaaagaaggaggtcgtggaggaagccgaaaacgggcgagacgctcccgcaaacggaaacgcggaaaacgaggagaacggagaacaggaggcggataacgaggtggacgaggaggaggaggaaggtggagaagaggaggaagaggaggaggagggtgacggcgaggaggaagatggggatgaggatgaagaggccgaaagtgctaccggcaagagggccgcagaggatgatgaggatgacgatgtcgatacaaagaagcaaaaaactgacgaggatgactag

SEQ ID NO: 132427 - DNA, 333 bp, Artificial Sequence
  derived and/or modified sequence
atgagcgatgccgcagtagacacatcctccgagattactaccaaggaccttaaggaaaagaaggaggtggtggaggaggccgagaacggacgcgacgcaccggcaaatggtaacgccaatgaagagaatggagaacaagaggccgacaacgaggtcgacgaggaggaggaggaggggggagaagaagaggaggaagaggaggagggggatggggaggaggaggatggtgacgaggacgaggaggccgaatccgccacaggtaagcgagcagctgaggacgacgaagatgacgatgtggacaccaagaaacagaagacagacgaggacgattag

SEQ ID NO: 132428 - DNA, 336 bp, Artificial Sequence
  derived and/or modified sequence
atgagcgacgccgccgtggacaccagcagcgagatcaccaccaaggacctgaaggagaagaaggaggtggtggaggaggccgagaacggcagagacgcccccgccaacggcaacgccgagaacgaggagaacggcgagcaggaggccgacaacgaggtggacgaggaggaggaggagggcggcgaggaggaggaggaggaggaggagggcgacggcgaggaggaggacggcgacgaggacgaggaggccgagagcgccaccggcaagagagccgccgaggacgacgaggacgacgacgtggacaccaagaagcagaagaccgacgaggacgactag

SEQ ID NO: 132429 - DNA, 333 bp, Artificial Sequence
  derived and/or modified sequence
atgagcgacgccgccgtggacaccagcagcgagatcaccaccaaggacctgaaggagaagaaggaggtggtggaggaggccgagaacggcagagacgcccccgccaacggcaacgccaacgaggagaacggcgagcaggaggccgacaacgaggtggacgaggaggaggaggagggcggcgaggaggaggaggaggaggaggagggcgacggcgaggaggaggacggcgacgaggacgaggaggccgagagcgccaccggcaagagagccgccgaggacgacgaggacgacgacgtggacaccaagaagcagaagaccgacgaggacgactag

SEQ ID NO: 132430 - protein, 102 aa, Artificial Sequence
  derived and/or modified sequence
MSEKSVEAAAELSAKDLKEKKEKVEEKASRKERKKEVVEEEENGAEEEEEETAEDGEEEDEGEEEDEEEEEEDDEGPALKRAAEEEDEADPKRQKTENGASA

SEQ ID NO: 132431 - protein, 101 aa, Artificial Sequence
  derived and/or modified sequence
SRDPACRAAELSAKDLKEKKEKVEEKASRKERKKEVVEEEENGAEEEEEETAEDGEEEDEGEEEDEEEEEEDDEGPALKRAAEEEDEADPKRQKTENGASA

SEQ ID NO: 132432 - DNA, 309 bp, Artificial Sequence
  derived and/or modified sequence
atgtctgaaaagagtgtggaagctgctgccgaactttccgcaaaagacctgaaagaaaaaaaggaaaaggtggaggagaaggcttctagaaaggagaggaagaaggaggtcgttgaggaagaagagaacggcgcagaggaagaagaggaggagaccgctgaagatggagaggaggaagatgagggagaggaagaggatgaggaggaagaggaagaggacgacgaaggtccagccctgaagcgcgccgcggaagaagaagatgaggctgacccgaagcgccagaaaacagagaatggcgcaagtgcatag

SEQ ID NO: 132433 - DNA, 306 bp, Artificial Sequence
  derived and/or modified sequence
tcccgcgaccctgcttgcagagcagctgagctctccgctaaagacctcaaagaaaagaaggagaaagtcgaggaaaaggcatctcggaaggagaggaaaaaggaggtggtcgaggaggaggaaaacggcgcagaggaggaagaggaagagaccgccgaggatggggaagaggaggatgagggagaagaagaagatgaggaggaagaagaggaggatgatgaagggcccgcccttaagcgggccgctgaggaggaggacgaggctgacccaaaacggcagaagacagagaatggtgcttccgcctag

SEQ ID NO: 132434 - DNA, 309 bp, Artificial Sequence
  derived and/or modified sequence
atgtctgagaagtctgtggaggccgctgctgagctgagcgccaaggacctgaaggagaagaaggagaaggtggaggagaaggccagcaggaaggagaggaagaaggaggtggtggaggaggaggagaatggagctgaggaggaggaggaggagacagcagaagatggagaggaggaggatgaaggagaggaggaggatgaggaggaggaggaggaggatgatgagggccctgccctgaagagagctgctgaggaggaggatgaagctgaccccaagaggcagaagacagaaaatggagccagcgcctag

SEQ ID NO: 132435 - DNA, 306 bp, Artificial Sequence
  derived and/or modified sequence
agccgggaccctgcctgcagagctgctgagctgagcgccaaggacctgaaggagaagaaggagaaggtggaggagaaggccagcaggaaggagaggaagaaggaggtggtggaggaggaggagaatggagctgaggaggaggaggaggagacagcagaagatggagaggaggaggatgaaggagaggaggaggatgaggaggaggaggaggaggatgatgagggccctgccctgaagagagctgctgaggaggaggatgaggccgaccccaagaggcagaagacagaaaatggagccagcgcctag

SEQ ID NO: 132436 - DNA, 309 bp, Artificial Sequence
  derived and/or modified sequence
atgagcgagaagagcgtggaggccgccgccgagctgagcgccaaggatttgaaggaaaagaaggaaaaagtcgaagagaaggcctccaggaaggagcggaaaaaggaggtcgtggaggaggaggagaatggagcagaagaagaggaggaagagactgctgaagacggggaagaggaggatgagggcgaggaagaagatgaagaagaggaggaagaggacgatgaaggtccagcccttaagcgggctgccgaagaggaagatgaggcagatcctaaacggcagaagacagagaatggagctagtgcctag

SEQ ID NO: 132437 - DNA, 306 bp, Artificial Sequence
  derived and/or modified sequence
agccgggaccccgcctgccgggccgccgagctgagcgccaaggacttaaaggagaagaaggaaaaggtggaggaaaaggctagtaggaaggagcgcaagaaggaggttgtcgaggaagaggagaatggcgccgaagaagaagaggaggagacagccgaggatggtgaagaagaagatgaaggcgaggaagaagacgaggaagaggaggaggaggacgacgaggggccagccctgaagagggcggctgaggaggaggatgaggcagatcctaagagacagaaaacagaaaatggtgcgtcagcctag

SEQ ID NO: 132438 - DNA, 1139 bp, Artificial Sequence
  derived and/or modified sequence
ggcagctctgctggtgcgggggcggcgagcccgggatcgagctaccgcggccgagcgcgccggccaccgcctgcaccgcccttccgcccgccctccggacggccgcagccctgcgggtctccgctccagacccacccccgccccaccccgcgcgcctctgccgcctcttccagagacccagcttgccgagcggccgccgctgccgctgtcgccgccgccgccgccaccgcgccaggttccggccgcggccaccctccgccgtccagggcccctccgtctcggccccgggaccccggctccccgccagccccggccccggccccggcaccatgtcggagaaaagcgtggaggcagcggccgagttgagcgccaaggacctgaaggagaagaaggagaaggtggaggagaaggcaagccggaaagagcgaaagaaagaagtggtggaggaggaggagaacggggctgaggaggaagaagaagaaactgccgaggatggagaggaggaagatgaaggggaagaagaagatgaggaagaagaagaagaggatgatgaagggcccgcgctgaagagagctgccgaagaggaggatgaagcggatcccaaacggcagaagacagaaaatggggcatcggcgtgagcccctgccaacaggctggggttgggaggcctctctgggcctggaggtgggggtgggggcagccaagtccagccactcttcacctggctccctgctctgggccctgcaccagagctgccaccctcttctttctccccagccttctcatttccgcctctccagacactgcgccctccaccctcactctgccattgttccacctcctgacctgctccatctgagctctccagctggcccccaattgctcctctctctctttgctctctttctccctcccctaccagcctcattcttcctccggtagcctctcccacctaacctctgcatcccccagcctcatgtcctgccccatccctatcctgcctgatccctggatctccctcagatcccctcttctcagacagcgccaggccggggtggggccggggttggggccgagccccacagctgcccccctcccctccctttttgtataatttaataaagaaatggtcgcgcttc

SEQ ID NO: 132439 - DNA, 773 bp, Artificial Sequence
  derived and/or modified sequence
gcggcagctctgctggtgcgggggcggcgagcccgggatcgagctaccgcggccgagcgcgccggccaccgcctgcaccgcccttccgcccgccctccggacggccgcagccctgcgggtctccgctccagacccacccccgccccaccccgcgcgcctctgccgcctcttccagagacccagcttgccgagcggccgccgctgccgctgtcgccgccgccgccgccaccgcgccaggttccggccgcggccaccctccgccgtccagggcccctccgtctcggccccgggaccccggctccccgccagccccggccccggccccggcaccatgtcggagaaaagcgtggaggcagcggccgagttgagcgccaaggacctgaaggagaagaaggagaaggtggaggagaaggcaagccggaaagagcgaaagaaagaagtggtggaggctccagtcccattggtggtgatggtgggcaaggcatgcagccagcctgaggctactccctctcctggtccccacaggaggaggagaacggggctgaggaggaagaagaagaaactgccgaggatggagaggaggaagatgaaggggaagaagaagatgaggaagaagaagaagaggatgatgaagggcccgcgctgaagagagctgccgaagaggaggatgaagcggatcccaaacggcagaagacagaaaatggggcatcggcgtgagcccctgccaacaggctggggttgggaggcctctctgggcctggaggtgggggtgg

SEQ ID NO: 132440 - DNA, 816 bp, Artificial Sequence
  derived and/or modified sequence
tccagagacccagcttgccgagcggccgagttgagcgccaaggacctgaaggagaagaaggagaaggtggaggagaaggcaagccggaaagagcgaaagaaagaagtggtggaggaggaggagaacggggctgaggaggaagaagaagaaactgccgaggatggagaggaggaagatgaaggggaagaagaagatgaggaagaagaagaagaggatgatgaagggcccgcgctgaagagagctgccgaagaggaggatgaagcggatcccaaacggcagaagacagaaaatggggcatcggcgtgagcccctgccaacaggctggggttgggaggcctctctgggcctggaggtgggggtgggggcagccaagtccagccactcttcacctggctccctgctctgggccctgcaccagagctgccaccctcttctttctccccagccttctcatttccgcctctccagacactgcgccctccaccctcactctgccattgttccacctcctgacctgctccatctgagctctccagctggcccccaattgctcctctctctctttgctctctttctccctcccctaccagcctcattcttcctccggtagcctctcccacctaacctctgcatcccccagcctcatgtcctgccccatccctatcctgcctgatccctggatctccctcagatcccctcttctcagacagcgccaggccggggtggggccggggttggggccgagccccacagctgcccccctcccctccctttttgtataatttaataaagaaatggtcgcgcttctgtttttaa

SEQ ID NO: 132441 - DNA, 309 bp, Artificial Sequence
  derived and/or modified sequence
atgtctgagaaatcagttgaggccgcagcggaactgtccgctaaagacctgaaagagaaaaaagaaaaggtcgaggaaaaggcctctagaaaggagcgcaaaaaagaagtggttgaggaagaggagaacggggctgaggaggaggaagaggaaaccgccgaggacggggaagaggaggacgaaggcgaagaggaggacgaagaggaagaagaagaggatgacgagggaccggctctgaagagagcagccgaggaggaagatgaggcagaccctaagcgccaaaaaaccgaaaacggagcctcagcttag

SEQ ID NO: 132442 - DNA, 306 bp, Artificial Sequence
  derived and/or modified sequence
tctagggacccagcctgtcgcgcagccgagttaagcgccaaggatttgaaagagaagaaagagaaggtcgaagagaaagcctcccggaaggagcgaaagaaggaggtcgtggaagaagaggaaaatggggctgaagaggaggaggaggagacagcggaggatggggaagaggaagatgagggggaagaggaagacgaagaggaagaggaggaggacgatgaagggccagccttgaaaagagcagcagaggaggaggatgaagccgatcctaaaagacaaaaaaccgagaacggcgcatcggcctag

SEQ ID NO: 132443 - DNA, 309 bp, Artificial Sequence
  derived and/or modified sequence
atgagcgagaagagcgtggaggccgccgccgagctgagcgccaaggacctgaaggagaagaaggagaaggtggaggagaaggccagcagaaaggagagaaagaaggaggtggtggaggaggaggagaacggcgccgaggaggaggaggaggagaccgccgaggacggcgaggaggaggacgagggcgaggaggaggacgaggaggaggaggaggaggacgacgagggccccgccctgaagagagccgccgaggaggaggacgaggccgaccccaagagacagaagaccgagaacggcgccagcgcctag

SEQ ID NO: 132444 - DNA, 306 bp, Artificial Sequence
  derived and/or modified sequence
agcagagaccccgcctgcagagccgccgagctgagcgccaaggacctgaaggagaagaaggagaaggtggaggagaaggccagcagaaaggagagaaagaaggaggtggtggaggaggaggagaacggcgccgaggaggaggaggaggagaccgccgaggacggcgaggaggaggacgagggcgaggaggaggacgaggaggaggaggaggaggacgacgagggccccgccctgaagagagccgccgaggaggaggacgaggccgaccccaagagacagaagaccgagaacggcgccagcgcctag

SEQ ID NO: 132445 - protein, 747 aa, Artificial Sequence
  derived and/or modified sequence
MRRCNSGSGPPPSLLLLLLWLLAVPGANAAPRSALYSPSDPLTLLQADTVRGAVLGSRSAWAVEFFASWCGHCIAFAPTWKALAEDVKAWRPALYLAALDCAEETNSAVCRDFNIPGFPTVRFFKAFTKNGSGAVFPVAGADVQTLRERLIDALESHHDTWPPACPPLEPAKLEEIDGFFARNNEEYLALIFEKGGSYLGREVALDLSQHKGVAVRRVLNTEANVVRKFGVTDFPSCYLLFRNGSVSRVPVLMESRSFYTAYLQRLSGLTREAAQTTVAPTTANKIAPTVWKLADRSKIYMADLESALHYILRIEVGRFPVLEGQRLVALKKFVAVLAKYFPGRPLVQNFLHSVNEWLKRQKRNKIPYSFFKTALDDRKEGAVLAKKVNWIGCQGSEPHFRGFPCSLWVLFHFLTVQAARQNVDHSQEAAKAKEVLPAIRGYVHYFFGCRDCASHFEQMAAASMHRVGSPNAAVLWLWSSHNRVNARLAGAPSEDPQFPKVQWPPRELCSACHNERLDVPVWDVEATLNFLKAHFSPSNIILDFPAAGSAARRDVQNVAAAPELAMGALELESRNSTLDPGKPEMMKSPTNTTPHVPAEGPEASRPPKLHPGLRAAPGQEPPEHMAELQRNEQEQPLGQWHLSKRDTGAALLAESRAEKNRLWGPLEVRRVGRSSKQLVDIPEGQLEARAGRGRGQWLQVLGGGFSYLDISLCVGLYSLSFMGLLAMYTYFQAKIRALKGHAGHPAA

SEQ ID NO: 132446 - DNA, 2244 bp, Artificial Sequence
  derived and/or modified sequence
atgaggagatgtaatagtgggtccgggcctccgcctagtcttttgttgttacttctgtggctcttagctgtccccggagcgaatgctgctcctagaagtgcgctatattctccctcagatcccctaacccttctgcaggctgacaccgtacggggtgcagttttaggttccaggtccgcttgggccgtggaattcttcgcttcctggtgtggtcactgtatcgccttcgcacccacgtggaaagccctggccgaagatgtgaaggcctggcgtcccgcactgtatctcgcagcactcgactgcgccgaagaaaccaattcggcagtctgtagggactttaatatccccggattccctaccgttagatttttcaaggcttttaccaagaacggatctggggcagtgtttccggtcgccggtgcagacgtgcagacgttgagggagcgcctgattgatgccttggagagccaccatgatacttggccaccggcttgtcctccccttgagcctgctaaacttgaggagatcgacgggtttttcgctaggaacaacgaagagtacttggcgttgattttcgagaagggaggctcctatctgggccgtgaggtggccctcgatttgtcgcagcataaaggagtggccgttcggagagtgctgaacaccgaagcgaatgtagtgagaaagtttggggtgacggactttcccagctgctacctcctgttcagaaacggcagcgtaagtcgcgttcctgttttgatggagtcacgatccttctacaccgcataccttcagaggctgtccggcttaaccagagaagcagcccagaccactgtggccccaacaacggccaacaagattgctcctaccgtctggaagctggccgatagaagcaaaatctacatggcagacctggagagcgcgctgcattatatactacgcattgaagtgggcaggttcccagtactcgagggccaacgcctggtggcgctgaaaaaattcgtggcggtgcttgctaagtacttccccggacggcctctcgtgcaaaatttcctgcactcagttaatgagtggcttaaacggcaaaaacggaataaaatcccctatagctttttcaagacagctctggacgaccgaaaagagggagccgtcctggcaaaaaaagtaaattggattggatgccagggatccgaacctcactttcgcggatttccttgttcactgtgggtgctgtttcacttcttgactgttcaggcagctcgccagaatgtggaccactcccaggaggctgcgaaagccaaggaggtgctccctgcgataagaggctatgtgcattacttctttgggtgtcgagattgcgccagtcacttcgagcagatggctgcagcctccatgcacagggtaggatcccccaacgccgcagtcctgtggctttggtcatcacacaaccgggtgaatgcgcgactcgcaggagcgccatccgaagacccccagttcccaaaggtgcaatggccaccacgggaactctgtagcgcctgccataacgagaggctggacgtccctgtttgggacgtagaagccactttgaactttctgaaagcgcattttagtccttctaatattattttagactttcccgcagcgggtagcgccgctaggcgcgacgtgcagaacgtggcagcggcaccagaattagcaatgggcgctctcgagctggaatctaggaattctacacttgatcctggaaagcccgagatgatgaagtctccgactaatactacacctcatgtgccagcggaggggcctgaggcatcgcgccctccgaagctccaccctggtctgagggccgctcctggtcaagagccgcctgagcatatggctgagcttcagaggaacgaacaggagcagccattgggccagtggcatctgtccaaacgggacacaggcgcagcgctgttagccgaaagcagggcagagaaaaataggttgtggggccctctcgaggtacgaagggtggggagaagttccaagcaattagtggacatccctgaaggacagctggaggcacgagccggtcgcggacgagggcagtggctgcaggtgctgggtggtgggttcagttacctggatatctcactttgcgtcggtctttactcactctcattcatgggattgctcgccatgtacacctactttcaagccaagatcagggccctgaaaggacacgccggacaccccgcagcctag

SEQ ID NO: 132447 - DNA, 2244 bp, Artificial Sequence
  derived and/or modified sequence
atgagacggtgtaattcagggtctgggcctcctccaagtctgctgcttctgctactctggctcctggccgttccaggcgccaacgcagcccctagaagcgccttgtattccccttccgaccccctcacgctgttacaggccgatacagtaaggggggccgtgctaggatcacggtccgcttgggctgtcgaattctttgcgagctggtgtggacactgcattgccttcgccccgacctggaaggcgctggcagaggatgtcaaagcctggcgcccagccttgtatcttgctgcgctggactgcgccgaagaaacaaatagtgccgtttgcagggatttcaatatacccggtttccccacagtgagattcttcaaagccttcactaaaaatggttccggcgccgtgttcccagtggccggggccgatgtgcagactctgagagagagactcattgacgcactcgagagccatcatgatacatggccgcccgcctgtccacccctagaaccggctaaattggaggaaattgatggttttttcgctcggaataacgaagagtatctggcactgatcttcgagaaaggagggtcttacttgggacgggaagtggccttggatctaagccaacataagggtgtagcagtgcgccgcgtgctgaacaccgaagcgaacgtcgtgcgaaagttcggagtgacggactttccaagctgctatcttctgtttcgcaacggaagtgtgtcccgggtgcctgtgttgatggaatcaagatccttctatacagcttacctgcaaagactaagcggactgacgagagaggctgcccagactactgtcgccccgacaacagccaataaaattgcgccaaccgtgtggaagctggccgatcgctcaaaaatatacatggcagacttagagagcgccctgcactatatcctgagaatagaagtaggacggtttccagtgctggaaggacaaagattagtcgccctaaagaagtttgtggcagtgctcgctaagtatttcccaggccgccccctggtgcagaatttcctccacagcgttaacgaatggctcaagaggcaaaagcgaaataaaataccttactcatttttcaagacagcactcgacgacagaaaggagggcgccgtacttgccaaaaaagttaattggatcggctgtcagggttccgagcctcactttaggggatttccatgttcactatgggtactgtttcacttcctcaccgtgcaggcagcacgtcagaacgttgaccatagccaagaggccgccaaagccaaggaggtattgcccgcaattcgggggtacgttcactactttttcggatgcagagactgtgccagccacttcgagcagatggccgcagccagcatgcacagggttggaagtcctaatgccgccgtcctgtggctgtggtccagccacaaccgcgtgaatgccagactggccggggccccttctgaagacccgcagtttccgaaggtgcagtggccgcccagagaattgtgtagtgcatgtcacaatgagcgtcttgatgtacctgtgtgggatgtggaagccacccttaactttttaaaggcacatttcagtccctcaaatatcatcctggacttccctgccgctggatctgcggctaggcgcgatgttcagaatgtcgctgcggcaccagaacttgctatgggagcactggaactggaatctcgcaactcgacattggatcctggcaagcctgaaatgatgaaatccccgactaatacaacccctcatgtgccagccgaaggtccagaggcatcccggccccccaagcttcaccccggcttacgtgctgcccccggacaagagccgcccgaacacatggcagagctccagcgcaatgagcaggaacagcccctgggccagtggcatcttagtaagcgagacaccggggccgcgttattagccgaaagtcgtgcagaaaagaatcggttgtggggcccactcgaagtgcgcagagtgggacgtagtagcaaacaactggtagacatacccgagggccagttagaggctcgcgccgggagaggtcgggggcaatggctccaggtgttgggcggtggattctcctatctggacatttccctctgtgtaggactatatagccttagtttcatgggtctgctggcaatgtatacatattttcaggccaagatacgtgcactcaagggtcatgcgggtcatcccgcggcctag

SEQ ID NO: 132448 - DNA, 2244 bp, Artificial Sequence
  derived and/or modified sequence
atgaggagatgcaattcgggtagcggccctcccccttccttactgctcctgttgttatggcttctcgcagttcctggagccaacgctgccccccgctcagcgttgtattccccatccgatcccttaaccctgttgcaggccgacacagtgcgcggtgccgtcctgggctccagatctgcttgggccgtcgagtttttcgccagttggtgcggccattgcatagccttcgctcctacttggaaggccctcgcagaagacgtcaaggcttggaggcccgccctctatttagctgcacttgattgcgcagaagagacaaactctgctgtatgcagagatttcaatatccccggctttccaaccgtccggttttttaaggcgttcaccaagaacggcagtggcgctgtattccctgtagccggagctgacgtgcagactctgcgagagaggcttatcgatgctttagaatcccaccacgatacatggccccccgcctgccctccactagaaccagctaaattagaagagatcgatgggttttttgcccggaataacgaagaatacctggctctgatttttgaaaaaggtggatcatacctgggccgtgaggtggccctggatcttagccagcacaagggcgttgcagtaagaagggtgctgaatactgaagctaatgtggtgagaaaattcggtgttactgactttcctagctgctatttattgtttcgaaatggaagtgtcagccgcgtccccgtcttaatggaatcaagatccttttacaccgcctacctgcaacgactcagcggactaacacgagaagctgcacaaaccactgtggccccaacaacagcaaataagatagctcccaccgtgtggaagctggccgataggtcaaagatctatatggcagacttagagagcgccctgcactatatcctgagaatagaagtaggacggtttccagtgctggaaggacaaagattagtcgccctaaagaagtttgtggcagtgctcgctaagtatttcccaggccgccccctggtgcagaatttcctccacagcgttaacgaatggctcaagaggcaaaagcgaaataaaataccttactcatttttcaagacagcactcgacgacagaaaggagggcgccgtacttgccaaaaaagttaattggatcggctgtcagggttccgagcctcactttagaggttttccttgctctctatgggtactttttcactttcttaccgtgcaggcagctcggcagaatgtggatcacagtcaggaagccgccaaggctaaagaggtacttccagccatccgaggctacgttcactactttttcgggtgtcgtgattgcgcctctcacttcgagcagatggccgcggcaagtatgcacagagtgggaagtccaaacgcggccgtgctctggttatggtcaagtcacaaccgagttaacgcacgcctagcgggggcaccttccgaagatccccagtttcctaaagtgcagtggccgcccagagaattgtgtagtgcatgtcacaatgagcgtcttgatgtacctgtgtgggatgtggaagccacccttaactttttaaaggcacatttcagtccctcaaatatcatcctggacttccctgccgctggatctgcggctaggcgcgatgttcagaatgtcgctgcggcaccagaacttgctatgggagcactggaactggaatctcgcaactcgacattggatcctggcaagcctgaaatgatgaaatccccgactaatacaacccctcatgtgccagccgaaggtcccgaggccagcagacctccaaaacttcatcctggattacgggctgcaccagggcaggaaccacccgagcacatggcagagttacaacggaatgagcaggagcagccattaggccagtggcacctgtctaaaagagatacaggcgctgctctgctggctgagtctagagccgagaaaaataggttgtggggtcctctggaagtccggagagtcggaaggtccagcaaacagcttgtcgacattcccgaaggccaattggaagcgcgggctgggaggggccggggacagtggctgcaggtgcttggcgggggattctcttatctggacatctcactgtgtgtcggtctgtattctctgtcttttatgggcctgctcgccatgtacacctatttccaagccaagattcgagccctgaagggacacgccggacacccagctgcctag

SEQ ID NO: 132449 - DNA, 2244 bp, Artificial Sequence
  derived and/or modified sequence
atgagaagatgcaacagcggcagcggccccccccccagcctgctgctgctgctgctgtggctgctggccgtgcccggcgccaacgccgcccccagaagcgccctgtacagccccagcgaccccctgaccctgctgcaggccgacaccgtgagaggcgccgtgctgggcagcagaagcgcctgggccgtggagttcttcgccagctggtgcggccactgcatcgccttcgcccccacctggaaggccctggccgaggacgtgaaggcctggagacccgccctgtacctggccgccctggactgcgccgaggagaccaacagcgccgtgtgcagagacttcaacatccccggcttccccaccgtgagattcttcaaggccttcaccaagaacggcagcggcgccgtgttccccgtggccggcgccgacgtgcagaccctgagagagagactgatcgacgccctggagagccaccacgacacctggccccccgcctgcccccccctggagcccgccaagctggaggagatcgacggcttcttcgccagaaacaacgaggagtacctggccctgatcttcgagaagggcggcagctacctgggcagagaggtggccctggacctgagccagcacaagggcgtggccgtgagaagagtgctgaacaccgaggccaacgtggtgagaaagttcggcgtgaccgacttccccagctgctacctgctgttcagaaacggcagcgtgagcagagtgcccgtgctgatggagagcagaagcttctacaccgcctacctgcagagactgagcggcctgaccagagaggccgcccagaccaccgtggcccccaccaccgccaacaagatcgcccccaccgtgtggaagctggccgacagaagcaagatctacatggccgacctggagagcgccctgcactacatcctgagaatcgaggtgggcagattccccgtgctggagggccagagactggtggccctgaagaagttcgtggccgtgctggccaagtacttccccggcagacccctggtgcagaacttcctgcacagcgtgaacgagtggctgaagagacagaagagaaacaagatcccctacagcttcttcaagaccgccctggacgacagaaaggagggcgccgtgctggccaagaaggtgaactggatcggctgccagggcagcgagccccacttcagaggcttcccctgcagcctgtgggtgctgttccacttcctgaccgtgcaggccgccagacagaacgtggaccacagccaggaggccgccaaggccaaggaggtgctgcccgccatcagaggctacgtgcactacttcttcggctgcagagactgcgccagccacttcgagcagatggccgccgccagcatgcacagagtgggcagccccaacgccgccgtgctgtggctgtggagcagccacaacagagtgaacgccagactggccggcgcccccagcgaggacccccagttccccaaggtgcagtggccccccagagagctgtgcagcgcctgccacaacgagagactggacgtgcccgtgtgggacgtggaggccaccctgaacttcctgaaggcccacttcagccccagcaacatcatcctggacttccccgccgccggcagcgccgccagaagagacgtgcagaacgtggccgccgcccccgagctggccatgggcgccctggagctggagagcagaaacagcaccctggaccccggcaagcccgagatgatgaagagccccaccaacaccaccccccacgtgcccgccgagggccccgaggccagcagaccccccaagctgcaccccggcctgagagccgcccccggccaggagccccccgagcacatggccgagctgcagagaaacgagcaggagcagcccctgggccagtggcacctgagcaagagagacaccggcgccgccctgctggccgagagcagagccgagaagaacagactgtggggccccctggaggtgagaagagtgggcagaagcagcaagcagctggtggacatccccgagggccagctggaggccagagccggcagaggcagaggccagtggctgcaggtgctgggcggcggcttcagctacctggacatcagcctgtgcgtgggcctgtacagcctgagcttcatgggcctgctggccatgtacacctacttccaggccaagatcagagccctgaagggccacgccggccaccccgccgcctag

SEQ ID NO: 132450 - DNA, 2244 bp, Artificial Sequence
  derived and/or modified sequence
atgcggcgctgcaactcaggttccggacctcctccaagccttctgctactgctgctgtggctactggcagtcccgggagccaacgcagccccgagatccgctctgtactctccatccgacccccttactcttctgcaggcagacaccgtcaggggagcagtactgggctccaggagcgcctgggccgtggagtttttcgctagctggtgtggccattgcattgcatttgcccctacttggaaagcgctggctgaagatgtgaaagcatggcgaccggctttgtaccttgctgccttagactgtgccgaggagacaaatagtgctgtttgcagagacttcaatattccaggcttccccaccgtacgattttttaaagcctttacaaagaacggctccggcgctgtgtttccagtggctggtgcagacgtgcaaacattgagggagcggctgattgacgctctcgagtcccaccatgatacctggccccccgcatgtcctcccttagagcctgcaaaactcgaagaaatcgatggtttctttgcacggaataacgaggaatatttggcactgatttttgagaaaggaggctcttacctgggcagggaggtggcactcgatctgagccagcacaagggggtggcagtcagacgggtactaaacaccgaagctaacgtggtccgcaaatttggcgtgaccgatttccccagctgctatcttctgttccgtaacgggtctgtaagccgggtgccggtcttgatggaatcccgatcgttctatacagcgtatctccagcgactctctgggctgacgcgcgaggccgcccaaaccaccgttgcgcccacgactgctaataagatcgctcccacagtgtggaagttggcggatcggtcaaaaatttatatggccgatctggagagtgccctccactacatactccgaatcgaggtcggtcggtttcccgttttagaggggcagcgcttggtcgctctgaagaagttcgtggctgtccttgcgaaatatttcccggggcggccattagtgcagaattttctccattcagttaatgaatggctgaagcgccagaaacggaacaaaatcccttattcattttttaaaactgccttggatgatcgtaaagaaggagctgtcctcgctaagaaggttaactggattggttgtcagggatcagaaccccacttccgcggctttccctgtagcttgtgggtgttgtttcatttcctcacggtgcaagcagcaaggcagaacgtggatcactcccaggaagccgcaaaggccaaagaagtgctgccagcaattcgcggatacgtgcattatttttttggctgccgagactgtgcctcccactttgagcagatggcagctgcttccatgcacagggtcggcagccctaacgcggctgtgctgtggctgtggtcctcccacaatagagtgaacgctagactggccggggccccaagcgaagatccccaattccccaaggtgcaatggcctccacgggaattgtgctcggcctgccataatgagcgcctggacgttccagtgtgggatgtggaggctacactcaatttcttgaaggcccacttcagcccttcaaatataatcctagatttccccgccgcaggatccgccgcaagacgggacgttcagaacgtggcagcagcccccgaacttgccatgggagcattggaactggaaagcaggaattccacactggacccaggcaagcccgagatgatgaaatcacccacgaacaccactccccacgtccctgccgaaggacccgaggcgagccgacccccaaaactgcaccccggacttcgagcagcgccagggcaggagccccccgaacatatggcagagttgcagcgaaatgagcaggaacaaccgctgggccagtggcacctatccaaacgcgatacaggagcagcactcctggccgaaagccgggctgagaagaatcgtctttggggcccattagaggtgcggcgcgtggggcggtcgtcaaagcagttagtagatattccagaagggcagctcgaggctagagccggccggggacggggacaatggctgcaagtgttgggtggcggcttttcatatctcgacatctccttgtgtgtcggcctgtattctctttcgttcatgggcctcctcgccatgtacacatactttcaggcaaagattcgggctcttaaaggacacgccggacacccagccgcctag

SEQ ID NO: 132451 - DNA, 9311 bp, Artificial Sequence
  derived and/or modified sequence
gaggcaggcggtgccgcggcgccgggacccgactcatccggtgcttgcgtgtggtggtgagcgcagcgccgaggatgaggaggtgcaacagcggctccgggccgccgccgtcgctgctgctgctgctgctgtggctgctcgcggttcccggcgctaacgcggccccgcggtcggcgctctattcgccttccgacccgctgacgctgctgcaggcggacacggtgcgcggcgcggtgctgggctcccgcagcgcctgggccgtggagttcttcgcctcctggtgcggccactgcatcgccttcgccccgacgtggaaggcgctggccgaagacgtcaaagcctggaggccggccctgtatctcgccgccctggactgtgctgaggagaccaacagtgcagtctgcagagacttcaacatccctggcttcccgactgtgaggttcttcaaggcctttaccaagaacggctcgggagcagtatttccagtggctggtgctgacgtgcagacactgcgggagaggctcattgacgccctggagtcccatcatgacacgtggcccccagcctgtcccccactggagcctgccaagctggaggagattgatggattctttgcgagaaataacgaagagtacctggctctgatctttgaaaagggaggctcctacctgggtagagaggtggctctggacctgtcccagcacaaaggcgtggcggtgcgcagggtgctgaacacagaggccaatgtggtgagaaagtttggtgtcaccgacttcccctcttgctacctgctgttccggaatggctctgtctcccgagtccccgtgctcatggaatccaggtccttctataccgcttacctgcagagactctctgggctcaccagggaggctgcccagaccacagttgcaccaaccactgctaacaagatagctcccactgtttggaaattggcagatcgctccaagatctacatggctgacctggaatctgcactgcactacatcctgcggatagaagtgggcaggttcccggtcctggaagggcagcgcctggtggccctgaaaaagtttgtggcagtgctggccaagtatttccctggccggcccttagtccagaacttcctgcactccgtgaatgaatggctcaagaggcagaagagaaataaaattccctacagtttctttaaaactgccctggacgacaggaaagagggtgccgttcttgccaagaaggtgaactggattggctgccaggggagtgagccgcatttccggggctttccctgctccctgtgggtcctcttccacttcttgactgtgcaggcagctcggcaaaatgtagaccactcacaggaagcagccaaggccaaggaggtcctcccagccatccgaggctacgtgcactacttcttcggctgccgagactgcgctagccacttcgagcagatggctgctgcctccatgcaccgggtggggagtcccaacgccgctgtcctctggctctggtctagccacaacagggtcaatgctcgccttgcaggtgcccccagcgaggacccccagttccccaaggtgcagtggccaccccgtgaactttgttctgcctgccacaatgaacgcctggatgtgcccgtgtgggacgtggaagccaccctcaacttcctcaaggcccacttctccccaagcaacatcatcctggacttccctgcagctgggtcagctgcccggagggatgtgcagaatgtggcagccgccccagagctggcgatgggagccctggagctggaaagccggaattcaactctggaccctgggaagcctgagatgatgaagtcccccacaaacaccaccccacatgtgccggctgagggacctgaggcaagtcgacccccgaagctgcaccctggcctcagagctgcaccaggccaggagcctcctgagcacatggcagagcttcagaggaatgagcaggagcagccgcttgggcagtggcacttgagcaagcgagacacaggggctgcattgctggctgagtccagggctgagaagaaccgcctctggggccctttggaggtcaggcgcgtgggccgcagctccaagcagctggtcgacatccctgagggccagctggaggcccgagctggacggggccgaggccagtggctgcaggtgctgggagggggcttctcttacctggacatcagcctctgtgtggggctctattccctgtccttcatgggcctgctggccatgtacacctacttccaggccaagataagggccctgaagggccatgctggccaccctgcagcctgaaccacctggggaggaggcgggagagggagctgccatctctaggcacctcaagccccctgaccccattccctcccctcccaccccttgctccttgtctggcctagaagtgtgggaaattcaggaaaacgagttgctccagtgaagcttcttggggttgctaggacagagagctcctttgacacaaaagacaggagcagggtccaggttcccctgctgtgcagggagggcagccccgggcagtgggcatagggcagctcagtccctggcctcttagcaccacattcctgtttttcagcttatttgaagtcctgcctcattctcactggagcctcagtctctcctgcttggtcttggccctcaactggggcaagtgaagccagaggagggtcccccagctgggtgggctggaatggaactcctcactagctgctggggctccgcccaccctgctcccttccggacaatgaagaagcctttgcaccctgggaggaaggaccaccccgggccctctatgcctggccagcctccagctcctcagacctcctgggtggggtttggcttcagggtggggtttggaagcttctggaagtcgtgctggtctcccaggtgaggcaagccatggttgctgggctgtagggtgagtggcttgcttggtgggacctgacgagttggtggcatgggaaggatgtgggtctctagtgccttgccctggcttagctgcaggagaagatggctgctttcacttccccccattgagctctgctccctctgagcctggtcttttgtccttttttattttggtctccaagatgaatgctcatctttggagggtgccaggtagaagctagggaggggagtgtcttctctctccaggtttcaccttccagtgtgcagaagttagaagggtctggcgggggcagtgccttacacatgcttgattcccacgctaccccctgccttgggaggtgtgtggaataaattatttttgttaaggcaagcattggtgtgttctttaacttgctacttggagacctagtgtccagtctggacagaatgcacagagaccagcctcacctggaatgcagccagactcgatgtccctcagcacacacagctcctggccacagactgcccatagaactgtctgcacccaaaccccatggccttttcatgcacggagacaggcctctggatgtgcagccttgccaccccctgccccaatcctccctgagagctcctgcctcagtgccctgggctggtgagggagaagcctgtctgcacctgcctaattccagctcctccaggaagcaagggcttgtttgtcagagctgcagggttggccactcggtggggaggagtcagccaggattagagagcctgcccctaatccggcctgctgggttttacaaggatcagagctgctgataatgaacctcattaagggggagcaggagcctcaatccgatttggttttctctttgacatcttcactctgctcagatggcctgggtgctatgtggagcaggtgggatgccaaggccactcctgctatggggcagctggggctggggagggatggcagtctccctgcatgtttccctcgacctctttagctgcagcgccttgctgggctcctgggttggactccctctctgtgcccctgctccaggcacccattggctccatcctcctggttgtgctctgcaccccctgctcccttgggctggccctggctgggggcctgagagacagacaggaacccacaatcaggaggcaaccctggcctgcaagaggaagacagaggctcccagggccggtgccctgtgtgcccactgcaccaaggccgctgaataagcctgcccttcaccccctaagggctccttgcccaatgccaagtgctggggatttctgtcagcaagccctgtggctccagtgacggtatttctaaagccaaacttagttacctagaattagcgccatgttggaaacactgtcgcagcagcccgggctgcacagtgtgtagcccagcctccaggtccacggagtggtgtggacctcccacctcacagctgcctctggcagccaagcctcttttcgcccggccccagcccctctggttgataaacgggtgggcctcctcagcagcgtggctgcctttcaccttgatttccccagggctctcggcaacatcgataaaccagcctcgcccaccagctgggccctcccccacccagtctgccaggctgggagctggagcttgctgagtcttgaatgcccttctagatggcttctctagaggctctcctggcaagagagggtcccaaggggagccctgcaaagcaaaggctccttgtctggggcgggatagagaatctcgcctctgtctggtgtgttacctactgggggcacaggaacaatttcctcaaggagacagtggcatggagctttgaaagacgagtaggtgttagcaaggaaataaggaggaacgggggttacgggcagaggagaaagcacatgccaagtcagcaaagaaaagtagaattcgaaaactttttaaaaatattactaaggattttcacaatgctgcactgggctagaaactgaagctaaaacagatacgtggtccctgctgctatggggcttccgttctagaggcaaggacaggttgtgatgagggttctgaaggatagagaccaagcagggagggtgttgaggaggcttctgcgagacctgaaggatgggaagccaggaagtgggaggggtgggggtccaggctggaggggcccaatgtaggtgtagagggactacagccctgaggggctgctccatgcggcattcttggaggtccaagaggggcagcgccaccttgggccaggctcctctccagcagccttggtatggggtgggggtgggaagacccctgatgcagcctgtcctctgggtgtgggggtggaggagagggctccaggggacccagccagccttgaccctggaggaaagtcaggtgggctcagagagagccctcaaatctgggccctgggtcagggtggggtcaagtccagccttgaagagaatggactctggaatctgacgtctgggtttgaatccagcttccaacactcactggctgtgtgactttgggcaagataacttatccccttgtccccatgtgtcattggagataaactacccacctaccagattgttgtaccatgctgggcaaacactaagtgcttaataatggtagcccactgctcatgtcgtgtcgtctcctgtcttgatacctgaaaactcaaggggccctgttgtgcttggaggggggtgccgttcccacaggatattctgtgaagggtgtccctggagctgggcctccaggtggcaagccccaagccaccccggcaggtgccactggccagagttgaactgaggtgttgagtggaaagtgcctccccacccccatctgccacagtagtatggatttccttcatgagatggggctcctaaaatgcctgaaatgtgtatgctgttggagaattgatgtgtatgatttattgaactttgcactcatttaaatctcatttaatcctccaacaacgcaagatgaagaagctgaggcttaaagagattaagaaacatcctatcccctttactcccaccaaaataaatacatttgccctattctcccaaatggtgagaggtagatccaggacttgaccccagatcccacccactcaaccctggagctgcagtctctaccccttctaacacatgtgattctgtttcatgtcctgttccatcggtagagttacacactttcctgagactttatatggtggtgctgctgggtgccagcccttcttccctccaacagtggcagtaaccactgttgtgtgttggtgtcaaggagtggggacaccctgaaggaatccgccttttctagagctctcgctccattccctacatcgaggctgaagtgccctgtctcgggtccttgtttttaggcctcgtttgaaggaggggaagaaaccaggttcgttgggcgtgaccttggctcagctcgtctgtgaaattggggccgcagacttagtttgcgggtccctgctaaattcctctccctcttcctgggattcccatccatgtattgccagctacatgtagagtggagaggagaggtttttcctgcagggccttccagagaaaggattcttggccagaggaaatcacagcctataagatcaatatcctgatagaatcccgggccaggtgtgagaggggagagctcactcacaccagcctgacagtcttggggcagagcgccccataggcctctgcagccccatcactgcctcattctccctcaggtgccaaggaagctccagggtgggcccagtatccttccacagcatccctcctcttccccttcaacacccctttcacccctccctccaccacctctgaaaggtgctccttgggcagggcgataggattcccacccctagctttaagaactaaaccaaacttcaagaggagcaatttaatcttcatacctgactccttgtccctcctcaggcatgctgttgtgcaggacagagccctggcttctcctggatgtcacacctggcctgtctctgacccttgctttccctttctctgctgccctcaagggtcattcacacccaagagggtaagaagctgccctctcatcccttcctctcccaccctgggcctctgccctctgcctggccccagcagcacagtcttctccatagagaggggctgggccatgggaccccagttcctggggtctcggtgacacagttcactgtttgctgcagaggaggccccactcgcagccttggcctctgccctgcagaagaattccctgtaactcactcaccaatggccgtgggagccagtggcctcggcgagggtcagttggactgcatagctgccggctgagtctctctggccaccctcactggccccatcactccaggttgcactgctgcccagggggtttgtgccaggcctgggtcacagtggaagagagtctggaaatcacaaggcagaggaggagacctttgccaatgtgagagaacaaagttaaggggcagtccatgggggcattgaccttacttaggtgaggaggactcagggaacatctacagactctagggctagggtgagatcctcctgatagtgctggtagctccagctgctgctttggcaagacttggtcgtctctatactgagagagcaaaagctcttttcctggggctgcatgttcttccataggaaagtgggcttcaggtgctgcctattaaacctcctgcctcccctgctgcagtgctttgatgcctttcacctgtgtctacctgcgaacctctgcccaccacggaagagcagctcacatttggaaggggctaaaatttttacctagtttgaatctgctctgcaatgtccccatcaagttcttaaccatcccgggttccaatggttacagagttctgccctggggagggaggaattgcttagcaaatgatgttgagaatagtgattatttgggggaaaattcaggtaagatctcaccttcataccatataccaaaatacatctcagtagattagtaagctaatgcaaaaaaaaaaaaaaaaggggaaatataattgaatacttcactgtttttgaaagcatgaaaacaatggaaaatgcaactgatgtgagtaatccatctacttgacgtcacttttaagaaataaggccaggcacggtggctcacgcttgtaatcctagcactttgggaggccgaggtgggtggatcacgaggtcaggagtttgagaccagcttggccaacatggtgaaacccccatctctactaaaatattacacaggcattgtggcacacatctgtaatcccagctactcaggaggctgaggcaggagaatcacttgaacctgggaggtggaggttgcagtgagctgagatcgcgccattgcactccagcctgggggacagagcgagactctgtctcaaaaaaataaaaaaataaaaataaaaaaataaagtaaagctacatatttaaaagctggggaaatatatgctgtaaatatgacaaagggctgtgactcttctgcaacacaccattttaagaatgagctaggtctgcatttattgacctgataaaatgtcccaagaaggacacatttttataaacataagttactattgttatatatatgctaacgtttgtctagaaaaagtctagaaaaatacacactgaactgtgaatagcagttatatttagaaagcaacattaggatgaacttaagtcagggcttggactagagcaaggcaagtgaggtgccaggatgcaaaagttaaggagacacctgacctcaggggcccacaactgcagagcccctgacagtgagtgtctcagtagcctcgccctagtcctggctttcacttaaatatgttttcgaatgtttgtaataaaatatttcttttggaaggcaaaaatagcaaggaaaataaataggattaaaggatactaaagcccattcaataaaatttgtaggaggccactgatttggcctaggctcctatgatgtaaccaacagaccaaaccaatatggagtcattcatgctaaatgaaactagttaggagtatattcatataacaagtggctaagtgtcagttacagcctctgagctttagtcaattgtaggtggtcaatagattcagataaggcaatccagttaaactgtatatcccacttgctgttttctgtccctaaattctctctgagtacactgcagccctgaagttctttgaacctgttctgggttctgagggctgtccaattactgaatcatacataaaagccaagtaagattttaaaatttgttataattttggtttttaacaacttctgttgtaaataataaaagcactaaatccctactgaaaataaagggcctaaagactgaa

SEQ ID NO: 132452 - DNA, 2244 bp, Artificial Sequence
  derived and/or modified sequence
atgaggcgctgcaacagcggcagcggccccccacccagcctgctgctgctgctgctgtggctgctggccgtgcctggggccaatgctgcccccaggtctgccctgtacagccccagcgaccccctgaccctgctgcaggccgacacagtgagaggagctgtgctgggcagccgcagcgcctgggccgtggagttctttgcctcctggtgtggccactgcatcgcctttgcccccacctggaaggccctggctgaagatgtgaaggcctggaggcctgccctgtacctggccgccctggactgtgccgaggagaccaacagcgctgtgtgccgggacttcaacatccctggcttccccaccgtgcgcttcttcaaggccttcaccaagaatggcagcggggctgtgtttcctgtggccggggctgatgtgcagaccctgcgggagcggctgattgatgccctggagagccaccacgacacctggcccccagcctgcccccccctggagcccgccaagctggaggagattgatggcttctttgccaggaacaatgaggagtacctggccctgatctttgagaagggcggcagctacctgggccgggaggtggccctggacctgagccagcacaagggcgtggccgtgcggcgggtgctgaacacagaggccaacgtggtgaggaagtttggagtgacagacttccccagctgctacctgctcttcagaaatggatctgtgtcccgggtgcctgtgctgatggagagccgctccttctacacagcctacctgcagaggctgagcggcctgacccgggaggccgcccagaccaccgtggcccccaccacagccaacaagatcgcccccaccgtgtggaagctggccgacaggagcaagatctacatggctgacctggagagcgccctgcactacatcctgcgcatcgaggtgggccgcttccctgtgctggagggccagaggctggtggccctgaagaagtttgtggccgtgctggccaagtacttccctggccggcccctggtgcagaacttcctgcacagcgtgaatgagtggctgaagaggcagaagaggaacaagatcccctacagcttcttcaagacagccctggatgacaggaaggagggcgctgtgctggccaagaaggtgaactggattggctgccagggcagcgagccccacttccggggcttcccctgcagcctgtgggtgctcttccacttcctgactgtgcaggccgcccggcagaatgtggaccacagccaggaggccgccaaggccaaggaggtgctgcctgccatccggggctacgtgcactacttcttcggctgccgggactgtgccagccactttgagcagatggctgctgcctccatgcaccgggtgggcagccccaatgctgctgtgctgtggctgtggagcagccacaacagagtgaatgcccggctggccggggcccccagcgaggacccccagttccccaaggtgcagtggccaccccgggagctgtgcagcgcctgccacaatgaaaggctggatgtgcctgtgtgggatgtggaggccaccctgaacttcctgaaggcccacttcagccccagcaacatcatcctggacttccctgctgctggcagcgctgccaggagagatgtgcagaatgtggccgccgcccctgagctggccatgggcgccctggagctggagagcaggaacagcaccctggaccccgggaagccagagatgatgaagagccccaccaacaccacccctcatgtgcctgctgagggccctgaggccagccggccccccaagctgcaccctggcctgcgggccgcccctggccaggagcccccagagcacatggccgagctgcagagaaatgagcaggagcagcccctgggccagtggcacctgagcaagagggacacaggagctgccctgctggccgagagcagagctgagaagaaccggctgtggggccccctggaggtgagaagagtgggccgcagcagcaagcagctggtggacatccctgagggccagctggaggcccgggccggccggggccggggccagtggctgcaggtgctgggcggcggcttctcctacctggacatcagcctgtgtgtgggcctgtacagcctgtccttcatgggcctgctggccatgtacacctacttccaggccaagatccgggccctgaagggccacgccggccaccctgctgcctag

SEQ ID NO: 132453 - DNA, 2244 bp, Artificial Sequence
  derived and/or modified sequence
atgcggcggtgcaacagcggcagcggccccccccccagcctgctgcttttattgctgtggttacttgccgttcccggcgcgaatgccgctccaaggtccgccttgtattccccatccgacccacttactctgttgcaggcggataccgtaagaggagcagtgctgggcagccgttctgcgtgggcggtagaatttttcgcctcctggtgtgggcattgtatcgcttttgctccaacttggaaagccctggcagaggatgtgaaggcatggagacccgccctgtatctggctgccttggactgcgctgaggaaaccaacagcgcagtgtgtcgcgattttaacatacccggttttcccacagtgcgcttcttcaaggccttcactaaaaatggttcaggagctgtgtttccagtggcaggggcagacgtgcagactctccgtgaacggctgatcgatgcgctggagtcccaccacgacacttggccgcctgcctgccctcctctggaacccgccaaattggaggagattgacggctttttcgcccgaaacaacgaggagtatctggccctgatcttcgagaaaggcggtagctacttggggagagaagttgccctggatttgtcccaacataagggcgtggcagtaaggcgtgttttgaatacagaggccaacgtcgtccgaaagttcggtgtcacggacttcccttcctgttacctgctctttaggaatggctccgtgtctagagtgcccgtcttgatggagtcgcgttctttctatactgcctacctacagagattatcaggcctaacccgggaagctgcccagactacagtggcccccaccaccgcgaacaaaatagctcccactgtgtggaagctggccgaccggagcaaaatctacatggctgatcttgagagcgccctgcactatatcctgaggattgaggtagggagatttcctgtcctggagggccagcgattggtggccctcaagaagtttgtggctgtactggccaaatactttccagggcgccctttagtgcagaacttcctccacagtgtaaacgagtggctcaagaggcagaagcgcaacaagatcccatacagtttctttaaaacagccttggatgacagaaaagagggggctgtccttgcaaaaaaagtgaattggattggctgccaaggctctgagccgcactttcgaggatttccatgctccctgtgggtgttgttccacttcctgaccgttcaggctgcacgtcagaatgtcgatcactctcaagaggcggccaaggctaaggaagtgctacctgctattcgagggtacgtccattacttctttggatgtcgggactgcgcgagccatttcgagcagatggcagccgcctccatgcatcgtgttggcagtcccaacgcagccgtgctctggttgtggtcgtcacacaatcgagtgaacgcccggctggcaggggcccccagtgaggatcctcagttccccaaagtgcagtggcctccacgtgagctgtgtagcgcctgtcataatgaaaggctggatgtccccgtgtgggatgtcgaggccacgcttaattttcttaaggcacacttcagtccgtccaacatcattctggattttcctgctgctggaagcgccgcccggagagacgtgcaaaacgtggccgccgcacccgagttggccatgggcgctctggagttggaatccaggaactctacgcttgacccgggcaaacccgagatgatgaagagtcctactaacaccaccccacacgtacccgcggagggacccgaagcaagtagaccaccaaagctgcatcctggcctacgggctgctccaggccaggaacctccagaacacatggctgagctgcaaaggaacgaacaggagcagcccctcggccaatggcatctgtctaaaagagatactggcgccgccttgctggctgaaagcagagccgagaaaaatagactgtgggggccccttgaggtccggagagtcgggcggagctccaaacagctcgtggacatccctgaagggcagctagaggccagggcaggacgcggcagggggcagtggctgcaggtgttaggcgggggattttcctacctcgacatctcattgtgtgtaggtttgtactccctctccttcatgggcctgctggccatgtacacatattttcaagccaagatacgagccctgaaggggcacgctggacacccagccgcatag

SEQ ID NO: 132454 - RNA, 2244 nt, Artificial Sequence
  derived and/or modified sequence
augagacgguguaauucagggucugggccuccuccaagucugcugcuucugcuacucuggcuccuggccguuccaggcgccaacgcagccccuagaagcgccuuguauuccccuuccgacccccucacgcuguuacaggccgauacaguaaggggggccgugcuaggaucacgguccgcuugggcugucgaauucuuugcgagcugguguggacacugcauugccuucgccccgaccuggaaggcgcuggcagaggaugucaaagccuggcgcccagccuuguaucuugcugcgcuggacugcgccgaagaaacaaauagugccguuugcagggauuucaauauacccgguuuccccacagugagauucuucaaagccuucacuaaaaaugguuccggcgccguguucccaguggccggggccgaugugcagacucugagagagagacucauugacgcacucgagagccaucaugauacauggccgcccgccuguccaccccuagaaccggcuaaauuggaggaaauugaugguuuuuucgcucggaauaacgaagaguaucuggcacugaucuucgagaaaggagggucuuacuugggacgggaaguggccuuggaucuaagccaacauaaggguguagcagugcgccgcgugcugaacaccgaagcgaacgucgugcgaaaguucggagugacggacuuuccaagcugcuaucuucuguuucgcaacggaagugugucccgggugccuguguugauggaaucaagauccuucuauacagcuuaccugcaaagacuaagcggacugacgagagaggcugcccagacuacugucgccccgacaacagccaauaaaauugcgccaaccguguggaagcuggccgaucgcucaaaaauauacauggcagacuuagagagcgcccugcacuauauccugagaauagaaguaggacgguuuccagugcuggaaggacaaagauuagucgcccuaaagaaguuuguggcagugcucgcuaaguauuucccaggccgcccccuggugcagaauuuccuccacagcguuaacgaauggcucaagaggcaaaagcgaaauaaaauaccuuacucauuuuucaagacagcacucgacgacagaaaggagggcgccguacuugccaaaaaaguuaauuggaucggcugucaggguuccgagccucacuuuaggggauuuccauguucacuauggguacuguuucacuuccucaccgugcaggcagcacgucagaacguugaccauagccaagaggccgccaaagccaaggagguauugcccgcaauucggggguacguucacuacuuuuucggaugcagagacugugccagccacuucgagcagauggccgcagccagcaugcacaggguuggaaguccuaaugccgccguccuguggcugugguccagccacaaccgcgugaaugccagacuggccggggccccuucugaagacccgcaguuuccgaaggugcaguggccgcccagagaauuguguagugcaugucacaaugagcgucuugauguaccugugugggauguggaagccacccuuaacuuuuuaaaggcacauuucagucccucaaauaucauccuggacuucccugccgcuggaucugcggcuaggcgcgauguucagaaugucgcugcggcaccagaacuugcuaugggagcacuggaacuggaaucucgcaacucgacauuggauccuggcaagccugaaaugaugaaauccccgacuaauacaaccccucaugugccagccgaagguccagaggcaucccggccccccaagcuucaccccggcuuacgugcugcccccggacaagagccgcccgaacacauggcagagcuccagcgcaaugagcaggaacagccccugggccaguggcaucuuaguaagcgagacaccggggccgcguuauuagccgaaagucgugcagaaaagaaucgguuguggggcccacucgaagugcgcagagugggacguaguagcaaacaacugguagacauacccgagggccaguuagaggcucgcgccgggagaggucgggggcaauggcuccagguguugggcgguggauucuccuaucuggacauuucccucuguguaggacuauauagccuuaguuucaugggucugcuggcaauguauacauauuuucaggccaagauacgugcacucaagggucaugcgggucaucccgcggccuag

SEQ ID NO: 132455 - RNA, 2244 nt, Artificial Sequence
  derived and/or modified sequence
augaggagaugcaauucggguagcggcccucccccuuccuuacugcuccuguuguuauggcuucucgcaguuccuggagccaacgcugccccccgcucagcguuguauuccccauccgaucccuuaacccuguugcaggccgacacagugcgcggugccguccugggcuccagaucugcuugggccgucgaguuuuucgccaguuggugcggccauugcauagccuucgcuccuacuuggaaggcccucgcagaagacgucaaggcuuggaggcccgcccucuauuuagcugcacuugauugcgcagaagagacaaacucugcuguaugcagagauuucaauauccccggcuuuccaaccguccgguuuuuuaaggcguucaccaagaacggcaguggcgcuguauucccuguagccggagcugacgugcagacucugcgagagaggcuuaucgaugcuuuagaaucccaccacgauacauggccccccgccugcccuccacuagaaccagcuaaauuagaagagaucgauggguuuuuugcccggaauaacgaagaauaccuggcucugauuuuugaaaaagguggaucauaccugggccgugagguggcccuggaucuuagccagcacaagggcguugcaguaagaagggugcugaauacugaagcuaauguggugagaaaauucgguguuacugacuuuccuagcugcuauuuauuguuucgaaauggaagugucagccgcguccccgucuuaauggaaucaagauccuuuuacaccgccuaccugcaacgacucagcggacuaacacgagaagcugcacaaaccacuguggccccaacaacagcaaauaagauagcucccaccguguggaagcuggccgauaggucaaagaucuauauggcagacuuagagagcgcccugcacuauauccugagaauagaaguaggacgguuuccagugcuggaaggacaaagauuagucgcccuaaagaaguuuguggcagugcucgcuaaguauuucccaggccgcccccuggugcagaauuuccuccacagcguuaacgaauggcucaagaggcaaaagcgaaauaaaauaccuuacucauuuuucaagacagcacucgacgacagaaaggagggcgccguacuugccaaaaaaguuaauuggaucggcugucaggguuccgagccucacuuuagagguuuuccuugcucucuauggguacuuuuucacuuucuuaccgugcaggcagcucggcagaauguggaucacagucaggaagccgccaaggcuaaagagguacuuccagccauccgaggcuacguucacuacuuuuucgggugucgugauugcgccucucacuucgagcagauggccgcggcaaguaugcacagagugggaaguccaaacgcggccgugcucugguuauggucaagucacaaccgaguuaacgcacgccuagcgggggcaccuuccgaagauccccaguuuccuaaagugcaguggccgcccagagaauuguguagugcaugucacaaugagcgucuugauguaccugugugggauguggaagccacccuuaacuuuuuaaaggcacauuucagucccucaaauaucauccuggacuucccugccgcuggaucugcggcuaggcgcgauguucagaaugucgcugcggcaccagaacuugcuaugggagcacuggaacuggaaucucgcaacucgacauuggauccuggcaagccugaaaugaugaaauccccgacuaauacaaccccucaugugccagccgaaggucccgaggccagcagaccuccaaaacuucauccuggauuacgggcugcaccagggcaggaaccacccgagcacauggcagaguuacaacggaaugagcaggagcagccauuaggccaguggcaccugucuaaaagagauacaggcgcugcucugcuggcugagucuagagccgagaaaaauagguugugggguccucuggaaguccggagagucggaagguccagcaaacagcuugucgacauucccgaaggccaauuggaagcgcgggcugggaggggccggggacaguggcugcaggugcuuggcgggggauucucuuaucuggacaucucacugugugucggucuguauucucugucuuuuaugggccugcucgccauguacaccuauuuccaagccaagauucgagcccugaagggacacgccggacacccagcugccuag

SEQ ID NO: 132456 - protein, 435 aa, Artificial Sequence
  derived and/or modified sequence
MEMEKEFEQIDKSGSWAAIYQDIRHEASDFPCRVAKLPKNKNRNRYRDVSPFDHSRIKLHQEDNDYINASLIKMEEAQRSYILTQGPLPNTCGHFWEMVWEQKSRGVVMLNRVMEKGSLKCAQYWPQKEEKEMIFEDTNLKLTLISEDIKSYYTVRQLELENLTTQETREILHFHYTTWPDFGVPESPASFLNFLFKVRESGSLSPEHGPVVVHCSAGIGRSGTFCLADTCLLLMDKRKDPSSVDIKKVLLEMRKFRMGLIQTADQLRFSYLAVIEGAKFIMGDSSVQDQWKELSHEDLEPPPEHIPPPPRPPKRILEPHNGKCREFFPNHQWVKEETQEDKDCPIKEEKGSPLNAAPYGIESMSQDTEVRSRVVGGSLRGAQAASPAKGEPSLPEKDEDHALSYWKPFLVNMCVATVLTAGAYLCYRFLFNSNT

SEQ ID NO: 132457 - protein, 362 aa, Artificial Sequence
  derived and/or modified sequence
MEEAQRSYILTQGPLPNTCGHFWEMVWEQKSRGVVMLNRVMEKGSLKCAQYWPQKEEKEMIFEDTNLKLTLISEDIKSYYTVRQLELENLTTQETREILHFHYTTWPDFGVPESPASFLNFLFKVRESGSLSPEHGPVVVHCSAGIGRSGTFCLADTCLLLMDKRKDPSSVDIKKVLLEMRKFRMGLIQTADQLRFSYLAVIEGAKFIMGDSSVQDQWKELSHEDLEPPPEHIPPPPRPPKRILEPHNGKCREFFPNHQWVKEETQEDKDCPIKEEKGSPLNAAPYGIESMSQDTEVRSRVVGGSLRGAQAASPAKGEPSLPEKDEDHALSYWKPFLVNMCVATVLTAGAYLCYRFLFNSNT

SEQ ID NO: 132458 - DNA, 1308 bp, Artificial Sequence
  derived and/or modified sequence
atggagatggagaaggagttcgagcagatcgacaagagcggcagctgggccgccatctaccaggacatcagacacgaggccagcgacttcccctgcagagtggccaagctgcccaagaacaagaacagaaacagatacagagacgtgagccccttcgaccacagcagaatcaagctgcaccaggaggacaacgactacatcaacgccagcctgatcaagatggaggaggcccagagaagctacatcctgacccagggccccctgcccaacacctgcggccacttctgggagatggtgtgggagcagaagagcagaggcgtggtgatgctgaacagagtgatggagaagggcagcctgaagtgcgcccagtactggccccagaaggaggagaaggagatgatcttcgaggacaccaacctgaagctgaccctgatcagcgaggacatcaagagctactacaccgtgagacagctggagctggagaacctgaccacccaggagaccagagagatcctgcacttccactacaccacctggcccgacttcggcgtgcccgagagccccgccagcttcctgaacttcctgttcaaggtgagagagagcggcagcctgagccccgagcacggccccgtggtggtgcactgcagcgccggcatcggcagaagcggcaccttctgcctggccgacacctgcctgctgctgatggacaagagaaaggaccccagcagcgtggacatcaagaaggtgctgctggagatgagaaagttcagaatgggcctgatccagaccgccgaccagctgagattcagctacctggccgtgatcgagggcgccaagttcatcatgggcgacagcagcgtgcaggaccagtggaaggagctgagccacgaggacctggagcccccccccgagcacatcccccccccccccagaccccccaagagaatcctggagccccacaacggcaagtgcagagagttcttccccaaccaccagtgggtgaaggaggagacccaggaggacaaggactgccccatcaaggaggagaagggcagccccctgaacgccgccccctacggcatcgagagcatgagccaggacaccgaggtgagaagcagagtggtgggcggcagcctgagaggcgcccaggccgccagccccgccaagggcgagcccagcctgcccgagaaggacgaggaccacgccctgagctactggaagcccttcctggtgaacatgtgcgtggccaccgtgctgaccgccggcgcctacctgtgctacagattcctgttcaacagcaacacctag

SEQ ID NO: 132459 - DNA, 1308 bp, Artificial Sequence
  derived and/or modified sequence
atggaaatggaaaaggagtttgagcagatcgataaatccggttcctgggctgctatctatcaggatatcagacatgaggcctccgactttccatgcagggttgctaaactgcctaagaataaaaaccgaaacaggtaccgcgacgtgagccctttcgaccactcccggatcaaactgcaccaggaggacaatgattatattaacgccagcctcattaagatggaagaagcccagagatcatacatcctgacacaggggccattgcctaacacttgcggccatttttgggaaatggtgtgggaacagaaaagtcgaggcgtcgttatgctcaatcgcgtgatggaaaaagggagcctgaaatgcgcacagtattggcctcagaaggaggagaaggaaatgattttcgaggataccaacctgaagctgactctgatctccgaggatattaagagctattacacagtacgtcagttagagctcgagaatctgacaacgcaagagacgcgcgagatattacactttcattatacgacgtggcccgacttcggggtgccagaatcccccgcctcattcctcaatttcctgttcaaagttcgagagtccgggtccctctctccagaacatggaccagtggtggtacattgctcagctggcatcgggcgtagcggcacgttctgcctggcagacacctgcctcctgctgatggacaagagaaaggaccccagcagcgtggatataaagaaagtgcttctggaaatgcggaagtttaggatgggccttatacagactgcagaccagctgcgattttcttacctcgcggtgattgagggagccaaatttatcatgggggacagtagtgtgcaggaccagtggaaagagttaagccacgaggatctggaaccgcccccggaacatataccacccccccctcggccgccgaaacggattctggagcctcacaacggaaagtgtagggaattttttcccaatcatcagtgggtcaaggaggaaacccaagaggataaggattgcccaataaaggaagaaaagggtagtccactgaatgcggccccgtatgggatcgaaagcatgtcccaggacactgaagttagaagcagggttgtcggtgggagcctgcgcggggcgcaagcagcgtccccggccaagggtgaacccagcctgcccgagaaggacgaggatcacgcactatcttattggaagccttttctggtgaatatgtgtgtcgccaccgtgctaacagccggggcctatctgtgctaccgcttcctattcaatagcaatacatag

SEQ ID NO: 132460 - DNA, 1308 bp, Artificial Sequence
  derived and/or modified sequence
atggagatggagaaggagtttgagcagattgacaagagcggctcctgggccgccatctaccaggacatcagacatgaggccagtgacttcccctgccgggtggccaagctgcccaagaacaagaacagaaaccgctacagagatgtgagcccctttgaccacagccgcatcaagctgcaccaggaggacaatgactacatcaatgccagcctcatcaagatggaggaggcccagaggagctacatcctgacccagggccccctgcccaacacctgtggccacttctgggagatggtgtgggagcagaagagccggggcgtggtgatgctgaacagagtgatggagaagggcagcctgaagtgtgcccagtactggccccagaaggaggagaaggagatgatctttgaggacaccaacctgaagctgaccctcatcagcgaggacatcaagagctactacacagtgcggcagctggagctggagaacctgaccacccaggagacccgggagatcctgcacttccactacaccacctggccagactttggagtgcctgagagccctgccagcttcctgaacttcctgttcaaggtgcgggagagcggcagcctgagccctgagcacggccctgtggtggtgcactgcagcgctggcatcggccgcagcggcaccttctgcctggccgacacctgcctgctgctgatggacaagaggaaggaccccagctctgtggacatcaagaaggtgctgctggagatgaggaagttcaggatgggcctcatccagacagctgaccagctgcgcttctcctacctggccgtgattgaaggagccaagttcatcatgggagacagctctgtgcaggaccagtggaaggagctgagccatgaggacctggagcccccacctgagcacatccccccaccaccccggccccccaagaggatcctggagccccacaatggaaaatgtcgggagttcttccccaaccaccagtgggtgaaggaggagacccaggaggacaaggactgccccatcaaggaggagaagggcagccccctgaatgctgccccctatggaattgaatccatgagccaggacacagaggtgcgcagccgggtggtgggcggcagcctgcggggggcccaggccgccagccctgccaagggggagcccagcctgcctgagaaggatgaagatcatgccctgagctactggaagcccttcctggtgaacatgtgtgtggccaccgtgctgacagctggggcctacctgtgctaccgcttcctgttcaacagcaacacctag

SEQ ID NO: 132461 - DNA, 1308 bp, Artificial Sequence
  derived and/or modified sequence
atggagatggagaaggagttcgagcagatcgacaagagcggcagctgggccgcgatttatcaggacatccggcacgaggcaagcgatttcccgtgccgagtagcaaaactgcccaaaaacaaaaataggaaccgttatcgggacgtcagcccgttcgatcactcccgaatcaagttgcaccaggaagacaacgactatatcaatgccagcttgatcaaaatggaggaggcccaacggtcatatatactgacccagggccccctacctaacacctgtggtcatttttgggagatggtgtgggagcaaaagtcacgaggagtggtgatgcttaacagagtgatggaaaagggtagtctcaaatgcgcccagtattggcctcaaaaagaggaaaaggaaatgatattcgaggatacgaacctcaagttgacgcttatttctgaagacataaaaagctactataccgtccgccaactggagctagagaatctgacaacccaggaaacccgtgagattctccactttcactacactacctggcctgatttcggggtccccgaaagcccagcctcatttcttaacttcctgtttaaggtgagagagtctgggagcttgtctcccgagcacggaccagtcgtggttcattgtagcgctggaattggaagaagcggaacattctgcctcgcggacacttgcctgcttctcatggacaaacgcaaggatccaagttctgtcgacattaaaaaggtccttctggaaatgcgcaagttcaggatgggtctgatccaaacagcagaccaactgcgtttctcttacctcgcggtgattgaaggtgccaagtttattatgggggactccagcgtgcaggatcagtggaaggaactctcacacgaggacttggagccgccacctgagcatatcccccccccgcctcgaccacctaagaggattcttgagcctcacaatggaaagtgtagagagtttttccccaaccaccagtgggtcaaagaggagacccaggaggacaaggactgtcccattaaggaggaaaaaggcagtccactgaatgccgcaccctacggcatagagtcaatgagtcaggataccgaagtccgaagcagggtggtggggggaagcttacggggtgcccaggctgcttcccctgcgaagggcgagccttctttgcccgaaaaagacgaagatcacgccctatcctactggaagccgttcttagtgaacatgtgtgtggccacagtactgactgcgggcgcttacctttgttaccgctttttgttcaacagtaatacctag

SEQ ID NO: 132462 - DNA, 1308 bp, Artificial Sequence
  derived and/or modified sequence
atggagatggagaaggagttcgagcaaattgataaatcaggctcttgggccgcaatataccaggatatcaggcatgaggcttccgatttcccatgtcgagtggccaaactacctaagaacaaaaacaggaatcggtaccgtgacgtgtcaccctttgatcactctcgaattaaactgcaccaggaagataatgactacatcaatgcatctctcattaagatggaagaggcccagaggtcatacatcctaacacaaggcccattgcctaatacatgcgggcatttttgggagatggtttgggaacagaaaagcagaggtgttgtcatgctgaatcgggtgatggaaaagggttcactcaagtgtgcccagtattggccccagaaagaggagaaagagatgatcttcgaggatacaaacctgaagctcactctaatctcagaggatatcaagagctactatacagtccgacagctggagctcgaaaatctgactacacaggaaacccgcgagatcctccacttccactatacaacgtggcccgatttcggcgtgcccgaatcacccgcatctttcctcaactttctgttcaaagtgcgagagtctggtagcctgagcccagagcatgggccagtggtggtccactgctcagccggtatcggacgttccggaaccttttgtttggcagatacttgtttgctgctcatggataaaagaaaagaccccagctctgtcgacattaagaaggtgctgttggaaatgcgcaagttccgaatggggttgattcagaccgcagaccagctacgcttttcctatctggcagttatcgaaggagcaaagtttatcatgggggacagcagtgtgcaggatcaatggaaagagctgagtcatgaggatctcgagcctccacccgagcacatcccgccacccccaagacctccaaagcggatcttggagccccataatggaaaatgtagggaattctttccgaaccaccaatgggtgaaggaagaaacacaagaagacaaggactgtccaattaaggaggaaaaagggtcaccactgaatgcagccccttatggaattgagtcgatgagtcaagatacagaggtgagatctcgagtggtaggcggttctttgaggggagctcaggcggcttcacccgctaagggagaaccttccctacctgaaaaagatgaagatcatgccctgtcttactggaagccattcctcgtaaacatgtgtgtggcaactgttctaactgcaggggcatacctgtgttatagatttcttttcaactctaacacctag

SEQ ID NO: 132463 - DNA, 3529 bp, Artificial Sequence
  derived and/or modified sequence
gtgatgcgtagttccggctgccggttgacatgaagaagcagcagcggctagggcggcggtagctgcaggggtcggggattgcagcgggcctcggggctaagagcgcgacgcggcctagagcggcagacggcgcagtgggccgagaaggaggcgcagcagccgccctggcccgtcatggagatggaaaaggagttcgagcagatcgacaagtccgggagctgggcggccatttaccaggatatccgacatgaagccagtgacttcccatgtagagtggccaagcttcctaagaacaaaaaccgaaataggtacagagacgtcagtccctttgaccatagtcggattaaactacatcaagaagataatgactatatcaacgctagtttgataaaaatggaagaagcccaaaggagttacattcttacccagggccctttgcctaacacatgcggtcacttttgggagatggtgtgggagcagaaaagcaggggtgtcgtcatgctcaacagagtgatggagaaaggttcgttaaaatgcgcacaatactggccacaaaaagaagaaaaagagatgatctttgaagacacaaatttgaaattaacattgatctctgaagatatcaagtcatattatacagtgcgacagctagaattggaaaaccttacaacccaagaaactcgagagatcttacatttccactataccacatggcctgactttggagtccctgaatcaccagcctcattcttgaactttcttttcaaagtccgagagtcagggtcactcagcccggagcacgggcccgttgtggtgcactgcagtgcaggcatcggcaggtctggaaccttctgtctggctgatacctgcctcttgctgatggacaagaggaaagacccttcttccgttgatatcaagaaagtgctgttagaaatgaggaagtttcggatggggctgatccagacagccgaccagctgcgcttctcctacctggctgtgatcgaaggtgccaaattcatcatgggggactcttccgtgcaggatcagtggaaggagctttcccacgaggacctggagcccccacccgagcatatccccccacctccccggccacccaaacgaatcctggagccacacaatgggaaatgcagggagttcttcccaaatcaccagtgggtgaaggaagagacccaggaggataaagactgccccatcaaggaagaaaaaggaagccccttaaatgccgcaccctacggcatcgaaagcatgagtcaagacactgaagttagaagtcgggtcgtggggggaagtcttcgaggtgcccaggctgcctccccagccaaaggggagccgtcactgcccgagaaggacgaggaccatgcactgagttactggaagcccttcctggtcaacatgtgcgtggctacggtcctcacggccggcgcttacctctgctacaggttcctgttcaacagcaacacatagcctgaccctcctccactccacctccacccactgtccgcctctgcccgcagagcccacgcccgactagcaggcatgccgcggtaggtaagggccgccggaccgcgtagagagccgggccccggacggacgttggttctgcactaaaacccatcttccccggatgtgtgtctcacccctcatccttttactttttgccccttccactttgagtaccaaatccacaagccattttttgaggagagtgaaagagagtaccatgctggcggcgcagagggaaggggcctacacccgtcttggggctcgccccacccagggctccctcctggagcatcccaggcgggcggcacgccaacagccccccccttgaatctgcagggagcaactctccactccatatttatttaaacaattttttccccaaaggcatccatagtgcactagcattttcttgaaccaataatgtattaaaattttttgatgtcagccttgcatcaagggctttatcaaaaagtacaataataaatcctcaggtagtactgggaatggaaggctttgccatgggcctgctgcgtcagaccagtactgggaaggaggacggttgtaagcagttgttatttagtgatattgtgggtaacgtgagaagatagaacaatgctataatatataatgaacacgtgggtatttaataagaaacatgatgtgagattactttgtcccgcttattctcctccctgttatctgctagatctagttctcaatcactgctcccccgtgtgtattagaatgcatgtaaggtcttcttgtgtcctgatgaaaaatatgtgcttgaaatgagaaactttgatctctgcttactaatgtgccccatgtccaagtccaacctgcctgtgcatgacctgatcattacatggctgtggttcctaagcctgttgctgaagtcattgtcgctcagcaatagggtgcagttttccaggaataggcatttgcctaattcctggcatgacactctagtgacttcctggtgaggcccagcctgtcctggtacagcagggtcttgctgtaactcagacattccaagggtatgggaagccatattcacacctcacgctctggacatgatttagggaagcagggacaccccccgccccccacctttgggatcagcctccgccattccaagtcaacactcttcttgagcagaccgtgatttggaagagaggcacctgctggaaaccacacttcttgaaacagcctgggtgacggtcctttaggcagcctgccgccgtctctgtcccggttcaccttgccgagagaggcgcgtctgccccaccctcaaaccctgtggggcctgatggtgctcacgactcttcctgcaaagggaactgaagacctccacattaagtggctttttaacatgaaaaacacggcagctgtagctcccgagctactctcttgccagcattttcacattttgcctttctcgtggtagaagccagtacagagaaattctgtggtgggaacattcgaggtgtcaccctgcagagctatggtgaggtgtggataaggcttaggtgccaggctgtaagcattctgagctgggcttgttgtttttaagtcctgtatatgtatgtagtagtttgggtgtgtatatatagtagcatttcaaaatggacgtactggtttaacctcctatccttggagagcagctggctctccaccttgttacacattatgttagagaggtagcgagctgctctgctatatgccttaagccaatatttactcatcaggtcattattttttacaatggccatggaataaaccatttttacaaaaataaaaacaaaaaaagcaaggtgttttggtataataccttttcaggtgtgtgtggatacgtggctgcatgaccgggtgggtgggggggagtgtctcagggtcttctgtgacctcacagaactgtcagactgtacagttttccaacttgccatattcatgatgggtttgcattttagctgcaacaataaaatttttttctaaagaacatgaa

SEQ ID NO: 132464 - DNA, 1632 bp, Artificial Sequence
  derived and/or modified sequence
atgaagaagcagcagcggctagggcggcggtagctgcaggggtcggggattgcagcgggcctcggggctaagagcgcgacgcggcctagagcggcagacggcgcagtgggccgagaaggaggcgcagcagccgccctggcccgtcatggagatggaaaaggagttcgagcagatcgacaagtccgggagctgggcggccatttaccagttgaccatagtcggattaaactacatcaagaagataatgactatatcaacgctagtttgataaaaatggaagaagcccaaaggagttacattcttacccagggccctttgcctaacacatgcggtcacttttgggagatggtgtgggagcagaaaagcaggggtgtcgtcatgctcaacagagtgatggagaaaggttcgttaaaatgcgcacaatactggccacaaaaagaagaaaaagagatgatctttgaagacacaaatttgaaattaacattgatctctgaagatatcaagtcatattatacagtgcgacagctagaattggaaaaccttacaacccaagaaactcgagagatcttacatttccactataccacatggcctgactttggagtccctgaatcaccagcctcattcttgaactttcttttcaaagtccgagagtcagggtcactcagcccggagcacgggcccgttgtggtgcactgcagtgcaggcatcggcaggtctggaaccttctgtctggctgatacctgcctcttgctgatggacaagaggaaagacccttcttccgttgatatcaagaaagtgctgttagaaatgaggaagtttcggatggggctgatccagacagccgaccagctgcgcttctcctacctggctgtgatcgaaggtgccaaattcatcatgggggactcttccgtgcaggatcagtggaaggagctttcccacgaggacctggagcccccacccgagcatatccccccacctccccggccacccaaacgaatcctggagccacacaatgggaaatgcagggagttcttcccaaatcaccagtgggtgaaggaagagacccaggaggataaagactgccccatcaaggaagaaaaaggaagccccttaaatgccgcaccctacggcatcgaaagcatgagtcaagacactgaagttagaagtcgggtcgtggggggaagtcttcgaggtgcccaggctgcctccccagccaaaggggagccgtcactgcccgagaaggacgaggaccatgcactgagttactggaagcccttcctggtcaacatgtgcgtggctacggtcctcacggccggcgcttacctctgctacaggttcctgttcaacagcaacacatagcctgaccctcctccactccacctccacccactgtccgcctctgcccgcagagcccacgcccgactagcaggcatgccgcggtaggtaagggccgccggaccgcgtagagagccgggccccggacggacgttggttctgcactaaaacccatcttccccggatgtgtgtctcacccctcatccttttactttttgccccttccactttgagtaccaaatccacaagccattttttgaggagagtgaaagagagtaccatgctggcggcgca

SEQ ID NO: 132465 - protein, 415 aa, Artificial Sequence
  derived and/or modified sequence
MPTTIEREFEELDTQRRWQPLYLEIRNESHDYPHRVAKFPENRNRNRYRDVSPYDHSRVKLQNAENDYINASLVDIEEAQRSYILTQGPLPNTCCHFWLMVWQQKTKAVVMLNRIVEKESVKCAQYWPTDDQEMLFKETGFSVKLLSEDVKSYYTVHLLQLENINSGETRTISHFHYTTWPDFGVPESPASFLNFLFKVRESGSLNPDHGPAVIHCSAGIGRSGTFSLVDTCLVLMEKGDDINIKQVLLNMRKYRMGLIQTPDQLRFSYMAIIEGAKCIKGDSSIQKRWKELSKEDLSPAFDHSPNKIMTEKYNGNRIGLEEEKLTGDRCTGLSSKMQDTMEENSESALRKRIREDRKATTAQKVQQMKQRLNENERKRKRWLYWQPILTKMGFMSVILVGAFVGWTLFFQQNAL

SEQ ID NO: 132466 - DNA, 1248 bp, Artificial Sequence
  derived and/or modified sequence
atgcccacaacaatcgagagggagttcgaagaactcgacacacagcgtagatggcagcctttgtacttggagataaggaacgagtcccatgactacccccaccgcgttgctaaatttccagagaaccggaacagaaaccggtaccgcgatgtctctccttacgaccactcccgagtgaaactgcaaaatgctgagaatgactacatcaatgcgtccttagtggacatcgaagaggctcaacgctcctatatcctgacacaaggccctttacccaacacctgctgtcacttctggctgatggtctggcagcagaagacaaaggctgtcgtgatgctcaacaggattgttgaaaaggaaagcgtaaaatgcgcacagtattggcccactgatgaccaggaaatgctgttcaaagaaacaggattcagcgtgaaactgctgtccgaagacgtgaagagctactataccgtccatctgcttcagttggagaatatcaacagcggagagaccagaaccatatctcactttcactatactacgtggccagattttggggtgccagagtccccagcatctttcctcaacttcctgtttaaagtgagggagagcgggagcctcaatcccgaccatggcccggcagtgatccactgtagtgctggtatcggccgctcaggcacctttagcctcgtggacacgtgtctggtgctgatggagaagggcgacgacatcaacattaaacaagtcctgcttaatatgcggaaatatagaatgggattgattcagactccggaccaactgagattctcttatatggccattattgaaggcgctaaatgcattaagggagattcatcaattcagaagaggtggaaggagctctccaaagaggacttgagtccagccttcgaccattctcccaataagataatgacagagaagtacaacgggaatagaattggcctggaggaagaaaaactgacaggcgacagatgtacgggactgtcatcgaagatgcaggataccatggaggagaactctgagagtgcccttcgcaaaaggattcgggaagatcgcaaggctaccaccgctcaaaaagtgcagcagatgaaacagcgactgaatgagaatgaacggaaacggaaacggtggttgtactggcaaccgatcttgactaaaatggggtttatgtcagtgattctggtaggagctttcgtgggatggacgctgtttttccaacagaacgccttgtag

SEQ ID NO: 132467 - DNA, 1248 bp, Artificial Sequence
  derived and/or modified sequence
atgcccaccaccatcgagcgggagtttgaggagctggacacccagaggcgctggcagcccctgtacctggagatcagaaatgaaagccatgactacccccaccgggtggccaagttcccagaaaatagaaacagaaaccgctacagagatgtgagcccctatgaccacagccgggtgaagctgcagaatgcagaaaatgactacatcaatgccagcctggtggacatcgaggaggcccagaggagctacatcctgacccagggccccctgcccaacacctgctgccacttctggctgatggtgtggcagcagaagaccaaggctgtggtgatgctgaacagaattgtggagaaggagagcgtgaagtgtgcccagtactggcccacagatgaccaggagatgctgttcaaggagaccggcttctctgtgaagctgctgtctgaagatgtgaagagctactacacagtgcacctgctgcagctggagaacatcaacagcggggagaccaggaccatcagccacttccactacaccacctggccagactttggagtgcctgagagccctgccagcttcctgaacttcctgttcaaggtgcgggagagcggcagcctgaacccagaccacggccctgctgtgatccactgcagcgctggcatcggccgcagcggcaccttcagcctggtggacacctgcctggtgctgatggagaagggagatgacatcaacatcaagcaggtgctgctgaacatgaggaagtacaggatgggcctcatccagaccccagaccagctgcgcttctcctacatggccatcattgaaggagccaagtgcatcaagggggacagcagcatccagaagcgctggaaggagctgagcaaagaagacctgagccctgcctttgaccacagccccaacaagatcatgacagagaagtacaacggcaaccgcatcggcctggaggaggagaagctgaccggggaccgctgcaccggcctgagcagcaagatgcaggacaccatggaggagaacagcgagagcgccctgaggaagaggatccgggaggacaggaaggccaccacagcccagaaggtgcagcagatgaagcagaggctgaatgaaaatgaaaggaagaggaagcgctggctgtactggcagcccatcctgaccaagatgggcttcatgtctgtcatcctggtgggcgcctttgtgggctggaccctcttcttccagcagaatgccctgtag

SEQ ID NO: 132468 - DNA, 1248 bp, Artificial Sequence
  derived and/or modified sequence
atgcccaccaccatcgagcgggagttcgaggagctggacacccagagacgctggcagcccctctatcttgagattaggaacgaatcgcatgattacccccatagggtcgccaagtttccagagaataggaaccggaaccgctaccgtgacgtgagcccctacgatcactcccgggtgaaattgcaaaacgcggagaacgactacatcaatgcgtcccttgtggacatcgaggaggctcaaagatcatacatactaacccagggaccattaccaaatacctgctgtcacttttggctgatggtgtggcaacaaaagaccaaagccgttgtgatgctcaaccgcatcgttgagaaggaatctgttaaatgtgcacagtactggcctacagacgatcaggaaatgcttttcaaagagacaggcttctctgtaaaacttttatctgaagatgtgaagagctactacactgtgcacctcctgcaactcgagaacattaatagtggcgagacccggacaatatctcactttcattacaccacctggcccgatttcggagtgccagagtcacccgcctcattcttaaactttctgtttaaggtccgagagtcagggtcgctgaacccagaccatgggcccgccgtgattcactgcagtgcaggaataggaagaagtggcacctttagtctggtggatacttgcctcgtgctgatggaaaaaggcgacgatattaatattaaacaggttctgcttaacatgcggaagtatcgaatgggcttgatacagacacccgaccaattacgattctcttacatggctatcatcgaaggagcaaaatgtatcaaaggcgactccagtattcagaagcgctggaaggagctctccaaggaagatttgtctccagcttttgaccacagccccaacaaaattatgacggaaaaatacaatggcaacaggatcggcctcgaggaggagaaactgaccggagaccgctgcaccggtcttagctccaaaatgcaggataccatggaagaaaatagcgagagcgctctgagaaagcggataagggaggaccgcaaggccaccacagcacagaaggtgcaacagatgaaacagcggttgaacgaaaatgagagaaaacgcaagagatggctctactggcagcccatcctgactaagatgggattcatgtctgtgatccttgtaggagcttttgtcgggtggaccctcttcttccagcaaaacgctctatag

SEQ ID NO: 132469 - DNA, 1248 bp, Artificial Sequence
  derived and/or modified sequence
atgcccaccacaattgagagagagttcgaagaacttgatactcaaagacggtggcagcctctgtacttagagattcggaatgaatctcatgattacccccatagagtagctaagttccccgagaaccggaatcgaaaccggtatcgcgacgtatccccgtatgaccatagccgcgtaaaactccagaacgccgagaacgactacattaacgcgtcattggttgacatcgaagaggcccagcggtcttacatactcacacagggtccactgcccaatacctgctgccacttttggctgatggtgtggcaacagaagacaaaagctgtcgtcatgctgaaccgcattgttgagaaagaatctgtcaagtgtgcccagtattggccaaccgatgaccaagaaatgctgtttaaggagacagggtttagtgtgaagctgctgtccgaagatgtgaagtcctactataccgtccacctgctgcagttggagaatatcaatagtggggaaacaaggactatcagtcacttccactacactacctggcctgactttggcgtccctgaatcacctgcttcattcctgaacttcctgttcaaagtgagagaaagtggaagtctgaaccccgatcacggacctgcggtaattcattgtagtgcaggcattggtagatctggcaccttcagcctggtggatacatgcctggtcctgatggagaagggcgatgacatcaatatcaagcaggtcttactgaacatgaggaagtatcggatggggcttatccaaaccccagatcagcttagattctcttacatggctataattgagggtgcaaagtgcattaagggagatagctcaatccagaagcgttggaaagagctttccaaggaggatctgtcacctgcatttgaccacagtccaaataaaattatgactgagaagtacaacggtaacagaataggactggaagaagaaaaactgactggagatagatgtacggggttgtcttccaagatgcaggacacgatggaggaaaattccgagtccgcgcttcgcaagaggatcagggaagatagaaaagcaaccacagcccagaaggtccagcaaatgaaacagagactgaacgagaacgagcgaaagcggaagcggtggctctattggcagcccatactcactaaaatgggattcatgagcgtgatactcgttggggcttttgtgggctggacactcttctttcagcagaacgccctttag

SEQ ID NO: 132470 - DNA, 2283 bp, Artificial Sequence
  derived and/or modified sequence
ggggcctgagcctctccgccggcgcaggctctgctcgcgccagctcgctcccgcagccatgcccaccaccatcgagcgggagttcgaagagttggatactcagcgtcgctggcagccgctgtacttggaaattcgaaatgagtcccatgactatcctcatagagtggccaagtttccagaaaacagaaatcgaaacagatacagagatgtaagcccatatgatcacagtcgtgttaaactgcaaaatgctgagaatgattatattaatgccagtttagttgacatagaagaggcacaaaggagttacatcttaacacagggtccacttcctaacacatgctgccatttctggcttatggtttggcagcagaagaccaaagcagttgtcatgctgaaccgcattgtggagaaagaatcggttaaatgtgcacagtactggccaacagatgaccaagagatgctgtttaaagaaacaggattcagtgtgaagctcttgtcagaagatgtgaagtcgtattatacagtacatctactacaattagaaaatatcaatagtggtgaaaccagaacaatatctcactttcattatactacctggccagattttggagtccctgaatcaccagcttcatttctcaatttcttgtttaaagtgagagaatctggctccttgaaccctgaccatgggcctgcggtgatccactgtagtgcaggcattgggcgctctggcaccttctctctggtagacacttgtcttgttttgatggaaaaaggagatgatattaacataaaacaagtgttactgaacatgagaaaataccgaatgggtcttattcagaccccagatcaactgagattctcatacatggctataatagaaggagcaaaatgtataaagggagattctagtatacagaaacgatggaaagaactttctaaggaagacttatctcctgcctttgatcattcaccaaacaaaataatgactgaaaaatacaatgggaacagaataggtctagaagaagaaaaactgacaggtgaccgatgtacaggactttcctctaaaatgcaagatacaatggaggagaacagtgagagtgctctacggaaacgtattcgagaggacagaaaggccaccacagctcagaaggtgcagcagatgaaacagaggctaaatgagaatgaacgaaaaagaaaaaggtggttatattggcaacctattctcactaagatggggtttatgtcagtcattttggttggcgcttttgttggctggacactgttttttcagcaaaatgccctataaacaattaattttgcccagcaagcttctgcactagtaactgacagtgctacattaatcataggggtttgtctgcagcaaacgcctcatatcccaaaaacggtgcagtagaatagacatcaaccagataagtgatatttacagtcacaagcccaacatctcaggactcttgactgcaggttcctctgaaccccaaactgtaaatggctgtctaaaataaagacattcatgtttgttaaaaactggtaaattttgcaactgtattcatacatgtcaaacacagtatttcacctgaccaacattgagatatcctttatcacaggatttgtttttggaggctatctggattttaacctgcacttgatataagcaataaatattgtggttttatctacgttattggaaagaaaatgacatttaaataatgtgtgtaatgtataatgtactattgacatgggcatcaacacttttattcttaagcatttcagggtaaatatattttataagtatctatttaatcttttgtagttaactgtactttttaagagctcaatttgaaaaatctgttactaaaaaaataaattgtatgtcgattgaattgtactggatacattttccatttttctaaagagaagtttgatatgagcagttagaagttggaataagcaatttctactatatattgcatttcttttatgttttacagttttccccattttaaaaagaaaagcaaacaaagaaacaaaagtttttcctaaaaatatctttgaaggaaaattctccttactgggatagtcaggtaaacagttggtcaagactttgtaaagaaattggtttctgtaaatcccattattgatatgtttatttttcatgaaaatttcaatgtagttggggtagattatgatttaggaagcaaaagtaagaagcagcattttatgattcataatttcagtttactagactgaagttttgaagtaaac

SEQ ID NO: 132471 - DNA, 1248 bp, Artificial Sequence
  derived and/or modified sequence
atgcccaccaccatcgagagagagttcgaggagctggacacccagagaagatggcagcccctgtacctggagatcagaaacgagagccacgactacccccacagagtggccaagttccccgagaacagaaacagaaacagatacagagacgtgagcccctacgaccacagcagagtgaagctgcagaacgccgagaacgactacatcaacgccagcctggtggacatcgaggaggcccagagaagctacatcctgacccagggccccctgcccaacacctgctgccacttctggctgatggtgtggcagcagaagaccaaggccgtggtgatgctgaacagaatcgtggagaaggagagcgtgaagtgcgcccagtactggcccaccgacgaccaggagatgctgttcaaggagaccggcttcagcgtgaagctgctgagcgaggacgtgaagagctactacaccgtgcacctgctgcagctggagaacatcaacagcggcgagaccagaaccatcagccacttccactacaccacctggcccgacttcggcgtgcccgagagccccgccagcttcctgaacttcctgttcaaggtgagagagagcggcagcctgaaccccgaccacggccccgccgtgatccactgcagcgccggcatcggcagaagcggcaccttcagcctggtggacacctgcctggtgctgatggagaagggcgacgacatcaacatcaagcaggtgctgctgaacatgagaaagtacagaatgggcctgatccagacccccgaccagctgagattcagctacatggccatcatcgagggcgccaagtgcatcaagggcgacagcagcatccagaagagatggaaggagctgagcaaggaggacctgagccccgccttcgaccacagccccaacaagatcatgaccgagaagtacaacggcaacagaatcggcctggaggaggagaagctgaccggcgacagatgcaccggcctgagcagcaagatgcaggacaccatggaggagaacagcgagagcgccctgagaaagagaatcagagaggacagaaaggccaccaccgcccagaaggtgcagcagatgaagcagagactgaacgagaacgagagaaagagaaagagatggctgtactggcagcccatcctgaccaagatgggcttcatgagcgtgatcctggtgggcgccttcgtgggctggaccctgttcttccagcagaacgccctgtag

SEQ ID NO: 132472 - protein, 926 aa, Artificial Sequence
  derived and/or modified sequence
MTSRFRLPAGRTYNVRASELARDRQHTEVVCNILLLDNTVQAFKVNKHDQGQVLLDVVFKHLDLTEQDYFGLQLADDSTDNPRWLDPNKPIRKQLKRGSPYSLNFRVKFFVSDPNKLQEEYTRYQYFLQIKQDILTGRLPCPSNTAALLASFAVQSELGDYDQSENLSGYLSDYSFIPNQPQDFEKEIAKLHQQHIGLSPAEAEFNYLNTARTLELYGVEFHYARDQSNNEIMIGVMSGGILIYKNRVRMNTFPWLKIVKISFKCKQFFIQLRKELHESRETLLGFNMVNYRACKNLWKACVEHHTFFRLDRPLPPQKNFFAHYFTLGSKFRYCGRTEVQSVQYGKEKANKDRVFARSPSKPLARKLMDWEVVSRNSISDDRLETQSLPSRSPPGTPNHRNSTFTQEGTRLRPSSVGHLVDHMVHTSPSEVFVNQRSPSSTQANSIVLESSPSQETPGDGKPPALPPKQSKKNSWNQIHYSHSQQDLESHINETFDIPSSPEKPTPNGGIPHDNLVLIRMKPDENGRFGFNVKGGYDQKMPVIVSRVAPGTPADLCVPRLNEGDQVVLINGRDIAEHTHDQVVLFIKASCERHSGELMLLVRPNAVYDVVEEKLENEPDFQYIPEKAPLDSVHQDDHSLRESMIQLAEGLITGTVLTQFDQLYRKKPGMTMSCAKLPQNISKNRYRDISPYDATRVILKGNEDYINANYINMEIPSSSIINQYIACQGPLPHTCTDFWQMTWEQGSSMVVMLTTQVERGRVKCHQYWPEPTGSSSYGCYQVTCHSEEGNTAYIFRKMTLFNQEKNESRPLTQIQYIAWPDHGVPDDSSDFLDFVCHVRNKRAGKEEPVVVHCSAGIGRTGVLITMETAMCLIECNQPVYPLDIVRTMRDQRAMMIQTPSQYRFVCEAILKVYEEGFVKPLTTSTNK

SEQ ID NO: 132473 - protein, 559 aa, Artificial Sequence
  derived and/or modified sequence
MDWEVVSRNSISDDRLETQSLPSRSPPGTPNHRNSTFTQEGTRLRPSSVGHLVDHMVHTSPSEVFVNQRSPSSTQANSIVLESSPSQETPGDGKPPALPPKQSKKNSWNQIHYSHSQQDLESHINETFDIPSSPEKPTPNGGIPHDNLVLIRMKPDENGRFGFNVKGGYDQKMPVIVSRVAPGTPADLCVPRLNEGDQVVLINGRDIAEHTHDQVVLFIKASCERHSGELMLLVRPNAVYDVVEEKLENEPDFQYIPEKAPLDSVHQDDHSLRESMIQLAEGLITGTVLTQFDQLYRKKPGMTMSCAKLPQNISKNRYRDISPYDATRVILKGNEDYINANYINMEIPSSSIINQYIACQGPLPHTCTDFWQMTWEQGSSMVVMLTTQVERGRVKCHQYWPEPTGSSSYGCYQVTCHSEEGNTAYIFRKMTLFNQEKNESRPLTQIQYIAWPDHGVPDDSSDFLDFVCHVRNKRAGKEEPVVVHCSAGIGRTGVLITMETAMCLIECNQPVYPLDIVRTMRDQRAMMIQTPSQYRFVCEAILKVYEEGFVKPLTTSTNK

SEQ ID NO: 132474 - DNA, 2781 bp, Artificial Sequence
  derived and/or modified sequence
atgaccagcagattcagactgcccgccggcagaacctacaacgtgagagccagcgagctggccagagacagacagcacaccgaggtggtgtgcaacatcctgctgctggacaacaccgtgcaggccttcaaggtgaacaagcacgaccagggccaggtgctgctggacgtggtgttcaagcacctggacctgaccgagcaggactacttcggcctgcagctggccgacgacagcaccgacaaccccagatggctggaccccaacaagcccatcagaaagcagctgaagagaggcagcccctacagcctgaacttcagagtgaagttcttcgtgagcgaccccaacaagctgcaggaggagtacaccagataccagtacttcctgcagatcaagcaggacatcctgaccggcagactgccctgccccagcaacaccgccgccctgctggccagcttcgccgtgcagagcgagctgggcgactacgaccagagcgagaacctgagcggctacctgagcgactacagcttcatccccaaccagccccaggacttcgagaaggagatcgccaagctgcaccagcagcacatcggcctgagccccgccgaggccgagttcaactacctgaacaccgccagaaccctggagctgtacggcgtggagttccactacgccagagaccagagcaacaacgagatcatgatcggcgtgatgagcggcggcatcctgatctacaagaacagagtgagaatgaacaccttcccctggctgaagatcgtgaagatcagcttcaagtgcaagcagttcttcatccagctgagaaaggagctgcacgagagcagagagaccctgctgggcttcaacatggtgaactacagagcctgcaagaacctgtggaaggcctgcgtggagcaccacaccttcttcagactggacagacccctgcccccccagaagaacttcttcgcccactacttcaccctgggcagcaagttcagatactgcggcagaaccgaggtgcagagcgtgcagtacggcaaggagaaggccaacaaggacagagtgttcgccagaagccccagcaagcccctggccagaaagctgatggactgggaggtggtgagcagaaacagcatcagcgacgacagactggagacccagagcctgcccagcagaagcccccccggcacccccaaccacagaaacagcaccttcacccaggagggcaccagactgagacccagcagcgtgggccacctggtggaccacatggtgcacaccagccccagcgaggtgttcgtgaaccagagaagccccagcagcacccaggccaacagcatcgtgctggagagcagccccagccaggagacccccggcgacggcaagccccccgccctgccccccaagcagagcaagaagaacagctggaaccagatccactacagccacagccagcaggacctggagagccacatcaacgagaccttcgacatccccagcagccccgagaagcccacccccaacggcggcatcccccacgacaacctggtgctgatcagaatgaagcccgacgagaacggcagattcggcttcaacgtgaagggcggctacgaccagaagatgcccgtgatcgtgagcagagtggcccccggcacccccgccgacctgtgcgtgcccagactgaacgagggcgaccaggtggtgctgatcaacggcagagacatcgccgagcacacccacgaccaggtggtgctgttcatcaaggccagctgcgagagacacagcggcgagctgatgctgctggtgagacccaacgccgtgtacgacgtggtggaggagaagctggagaacgagcccgacttccagtacatccccgagaaggcccccctggacagcgtgcaccaggacgaccacagcctgagagagagcatgatccagctggccgagggcctgatcaccggcaccgtgctgacccagttcgaccagctgtacagaaagaagcccggcatgaccatgagctgcgccaagctgccccagaacatcagcaagaacagatacagagacatcagcccctacgacgccaccagagtgatcctgaagggcaacgaggactacatcaacgccaactacatcaacatggagatccccagcagcagcatcatcaaccagtacatcgcctgccagggccccctgccccacacctgcaccgacttctggcagatgacctgggagcagggcagcagcatggtggtgatgctgaccacccaggtggagagaggcagagtgaagtgccaccagtactggcccgagcccaccggcagcagcagctacggctgctaccaggtgacctgccacagcgaggagggcaacaccgcctacatcttcagaaagatgaccctgttcaaccaggagaagaacgagagcagacccctgacccagatccagtacatcgcctggcccgaccacggcgtgcccgacgacagcagcgacttcctggacttcgtgtgccacgtgagaaacaagagagccggcaaggaggagcccgtggtggtgcactgcagcgccggcatcggcagaaccggcgtgctgatcaccatggagaccgccatgtgcctgatcgagtgcaaccagcccgtgtaccccctggacatcgtgagaaccatgagagaccagagagccatgatgatccagacccccagccagtacagattcgtgtgcgaggccatcctgaaggtgtacgaggagggcttcgtgaagcccctgaccaccagcaccaacaagtag

SEQ ID NO: 132475 - DNA, 2781 bp, Artificial Sequence
  derived and/or modified sequence
atgacaagtaggtttcgcttgccagccggccggacatacaacgtcagagcctccgaattagccagagatcgacagcatacagaggtggtgtgtaatattctgctgctagacaataccgtgcaggccttcaaggtgaataaacacgatcagggccaggtgctcttagatgtggtctttaagcacctcgatctgactgagcaggattatttcggcctccagctggccgacgatagcactgacaatcccagatggcttgatcctaacaagccgatacggaaacagttgaagagggggtcaccctactctctaaatttcagagtcaagttcttcgtgtctgatcccaataaacttcaggaagagtacacacgataccagtactttttgcagataaaacaggacattttaaccgggagacttccctgtcccagcaatacagcagcactgctcgctagcttcgccgtgcagtccgaactgggagattatgatcagagcgaaaatttgtctggctacctgagcgattatagcttcatcccaaaccagcctcaggattttgagaaggagatcgccaaactgcatcaacagcatatcggcttgagtccggccgaagctgagtttaattatctaaacactgcgaggaccctggaactctacggcgtggagtttcactacgcaagagaccagagcaacaatgagatcatgatcggggtgatgtccggcggcattctgatctacaaaaatagggtgcgtatgaacacatttccttggctgaaaatcgttaagataagctttaagtgcaagcagttttttattcagctccggaaagagctgcacgaaagccgggagactctgctgggtttcaatatggtgaattatagagcctgcaaaaacttgtggaaagcgtgcgttgagcatcacactttcttccggctagatagaccgctcccaccgcagaaaaatttctttgcccattacttcacccttggatctaagtttagatactgcgggagaacggaggttcagtcagtgcagtacggcaaagaaaaagcgaacaaagatagggtctttgctagatccccctccaaacccctggcccgcaaactgatggactgggaggtcgtatcccgaaactcaatttcggatgaccgcctcgaaacgcagtctctgccgtcgaggtcaccacccggtacccctaaccataggaactcaaccttcacccaggaggggacgcggctccgccccagctcagtcggccatttggtggatcatatggtacacacatccccttcagaggtgtttgttaatcagagatctccttctagtacgcaagcgaactcaatagtgctcgagagcagtccctctcaagaaacacctggcgatgggaagcctcctgccctcccccccaagcagtcaaagaagaactcttggaaccaaatccactattcgcactcacagcaggatctggagtcgcacatcaatgagacatttgatatcccttcaagccctgagaagccaaccccaaacggtggaattccccacgataatctggttctgatacgcatgaaaccagatgagaacggtagattcggctttaatgtcaagggcggatatgatcagaaaatgcccgtcatcgtgagtcgagtcgcccctggtacccccgccgatctctgtgtgccccggctcaacgagggcgaccaggtggtcctgattaatggaagggacattgctgagcatactcatgatcaagtggtgctttttattaaggcaagctgtgaaaggcattcaggggaactaatgttgctggttagacccaacgctgtttatgatgtcgtcgaagaaaagttagagaatgaaccagacttccagtacatacctgagaaggcacccctggattccgttcaccaggacgatcacagtcttagagaatccatgatacagttagccgaggggctaattacaggaaccgttctcactcagtttgatcaactctatcggaagaagccgggaatgacaatgtcttgtgctaagttacctcaaaatattagcaagaataggtatcgtgacatcagtccttacgatgccactagggtcattctgaagggcaatgaggactatatcaacgcaaactatatcaatatggaaatcccttcgagcagcatcatcaatcagtacattgcatgtcaaggcccattgcctcatacctgcaccgacttttggcaaatgacatgggaacaaggaagctccatggtcgtaatgcttaccactcaggtggagcgcggccgtgtgaagtgccaccaatattggcctgaacctaccggatcgtcatcttatggatgctaccaggttacctgccactcggaggagggcaacacagcctatatcttccggaaaatgacactgtttaatcaagagaagaatgaatcccggcctcttacccagatccagtacatcgcttggccagaccacggagtcccagacgactcatctgactttctcgatttcgtctgccacgtacgtaacaaacgggccggtaaggaggagccggttgtggtacactgctccgctggtattgggcggactggcgtcctaataaccatggagacggcgatgtgtctaatcgaatgcaaccaaccagtctaccctctggatatcgtccgcacaatgcgagaccagcgcgcaatgatgatccaaaccccatcccagtatcgctttgtgtgtgaggctatccttaaagtctatgaagagggatttgtaaaacctctcactacatccacgaacaaatag

SEQ ID NO: 132476 - DNA, 2781 bp, Artificial Sequence
  derived and/or modified sequence
atgaccagccgcttccggctgcctgctggccgcacctacaacgtgcgggccagcgagctggcccgggaccggcagcacacagaggtggtgtgcaacatcctgctgctggacaacacagtgcaggccttcaaggtgaacaagcatgaccagggccaggtgctgctggatgtggtgttcaagcacctggacctgacagagcaggactacttcggcctgcagctggctgatgacagcacagacaacccccgctggctggaccccaacaagcccatcaggaagcagctgaagaggggcagcccctacagcctgaacttccgggtgaagttctttgtgtctgaccccaacaagctgcaggaggagtacacccgctaccagtacttcctgcagatcaagcaggacatcctgaccggccgcctgccctgccccagcaacacagctgccctgctggccagctttgctgtgcagagcgagctgggggactatgaccagagcgagaacctgagcggctacctgagtgactacagcttcatccccaaccagccccaggactttgagaaggagatcgccaagctgcaccagcagcacatcggcctgagccctgctgaggccgagttcaactacctgaacacagcccggaccctggagctgtatggagtggagttccactacgcccgggaccagagcaacaatgagatcatgattggagtgatgtctgggggcatcctgatctacaagaacagagtgaggatgaacaccttcccctggctgaagatcgtgaagatctccttcaagtgcaagcagttcttcatccagctgaggaaggagctgcacgagagccgggagaccctgctgggcttcaacatggtgaactaccgggcctgcaagaacctgtggaaggcctgtgtggagcaccacaccttcttccggctggaccggcccctgcccccccagaagaacttctttgcccactacttcaccctgggcagcaagttccgctactgcggccgcacagaggtgcagagcgtgcagtatggcaaggagaaggccaacaaggacagagtgtttgcccggagccccagcaagcccctggccaggaagctgatggactgggaggtggtgtccagaaattccatcagtgatgaccggctggagacccagagcctgcccagccgcagccccccaggcacccccaaccacaggaacagcaccttcacccaggagggcacccggctgcggcccagctctgtgggccacctggtggaccacatggtgcacaccagccccagcgaggtgtttgtgaaccagaggagccccagcagcacccaggccaacagcatcgtgctggagagcagccccagccaggagaccccaggagatggcaagcccccagccctgccccccaagcagagcaagaagaacagctggaaccagatccactacagccacagccagcaggacctggagagccacatcaatgagacctttgacatccccagcagccctgagaagcccaccccaaatggaggcatcccccatgacaacctggtgctgatccgcatgaagccagatgaaaatggccgcttcggcttcaacgtgaagggcggctatgaccagaagatgcctgtgattgtgtcccgggtggcccctggcaccccagctgacctgtgtgtgccccggctgaatgaaggagaccaggtggtgctgatcaatggccgggacattgctgagcacacccatgaccaggtggtgctcttcatcaaggccagctgtgagcggcacagcggggagctgatgctgctggtgcggcccaatgctgtgtatgatgtggtggaggagaagctggagaatgaaccagacttccagtacatccctgagaaggcccccctggacagcgtgcaccaggatgaccacagcctgcgggagagcatgatccagctggccgagggcctcatcaccggcaccgtgctgacccagtttgaccagctgtacaggaagaagccaggcatgaccatgagctgtgccaagctgccccagaacatcagcaagaaccgctacagagacatcagcccctatgatgccaccagggtcatcctgaagggaaatgaagactacatcaatgccaactacatcaacatggagatccccagcagcagcatcatcaaccagtacatcgcctgccagggccccctgccccacacctgcacagacttctggcagatgacctgggagcagggcagctccatggtggtgatgctgaccacccaggtggagcggggccgggtgaagtgccaccagtactggccagagcccaccggcagcagcagctatggctgctaccaggtgacctgccacagcgaggagggcaacacagcctacatcttcaggaagatgaccctcttcaaccaggagaagaatgaaagccggcccctgacccagatccagtacatcgcctggccagaccatggagtgcctgatgacagcagtgacttcctggactttgtgtgccacgtgaggaacaagagagctgggaaggaggagcctgtggtggtgcactgcagcgctggcatcggccgcactggagtgctgatcaccatggagacagccatgtgcctgattgagtgcaaccagcctgtgtaccccctggacatcgtgaggaccatgagggaccagagggccatgatgatccagacccccagccagtacagatttgtgtgtgaggccatcctgaaggtgtatgaggagggctttgtgaagcccctgaccaccagcaccaacaagtag

SEQ ID NO: 132477 - DNA, 2781 bp, Artificial Sequence
  derived and/or modified sequence
atgaccagccggttccggctgcccgccggccggacctacaacgtgagagcctctgagttggcccgggatcggcagcatactgaggtagtgtgtaatattcttctgctggacaacacggtccaggcgtttaaggtgaataagcacgaccaagggcaagttctcctcgatgtggtcttcaaacacctcgacttgaccgagcaggattattttgggcttcaactggccgacgatagcaccgataacccccggtggctcgaccccaataagcctatcagaaagcagctgaagcgagggagtccatacagtctgaatttccgggtgaagttttttgtttcagaccccaacaaattacaggaagagtatactcgataccagtacttcctgcagatcaagcaggacattctcaccggccgcctgccctgcccctccaacaccgccgccctgttagcttccttcgccgtccagtccgagctcggcgactacgatcagtctgagaacctgtcaggatacctgagcgactacagcttcatcccaaaccagccccaggattttgaaaaggagattgccaagctccaccagcagcacatcggcctgagtccagctgaagcggaattcaactacctaaacaccgctcgaaccttagagttgtatggcgtggagtttcattacgcacgagatcagagtaacaatgaaatcatgataggcgtcatgtcaggagggatcctgatttataaaaaccgcgttcgaatgaatacatttccgtggttgaaaatcgttaagatttccttcaaatgtaagcaattctttattcagttgagaaaagagttacatgagtccagggagactttgttgggcttcaacatggtgaactatagagcatgcaaaaacctctggaaggcatgcgtggaacatcacacattcttccgactggaccggcccctgcctcctcagaaaaattttttcgctcattactttacgttaggctctaagtttaggtactgtggacgcacggaggttcagagtgtacagtacggaaaagaaaaggccaacaaagaccgcgtttttgctaggtcacctagtaagccactggccagaaagctgatggactgggaagtggtgtcaaggaatagcatttccgacgaccgattagaaacacaatcactgccaagtagatctccacccggcacaccaaaccatagaaactccacctttacccaggagggcaccagactcaggcctagcagcgtgggacatctggttgaccatatggtgcacactagtccaagcgaggtgtttgtcaaccagagatccccaagcagtacacaggctaactccatagttctcgaatcttccccttcacaggagactcctggagacggcaagccaccagccttaccacctaagcaatctaaaaaaaatagctggaatcagatccattattctcacagtcagcaagatctggagtctcacattaatgaaaccttcgatatcccgagttcacctgaaaagccaactcctaatggtggtattccacatgacaacctggtgctcatcagaatgaagcctgatgaaaatggcaggtttggcttcaatgtcaagggtggctatgaccagaaaatgcccgttattgtcagcagagtagctcccggaacacctgctgatctatgcgtcccgaggctgaacgagggcgaccaggtggtgttaattaacggacgcgacattgccgagcacactcacgaccaagttgtcttattcattaaagccagctgtgagcggcactccggagagttgatgcttctggtaagacctaacgccgtgtacgacgttgttgaagagaaactcgaaaatgaacctgactttcagtacatcccagagaaggctcctctagattctgtacatcaggatgatcacagccttagggaatcaatgatccagctggccgagggtctgatcactggcacagtgctcactcagttcgaccaattgtatagaaagaagccaggaatgaccatgtcttgcgccaaactgccacagaacatcagcaagaacagataccgggacatttccccttacgacgctacgcgggtgatcctgaaaggtaacgaagattatatcaatgcaaattacatcaatatggagatacccagctcctctatcataaaccaatacatcgcctgccagggacctctccctcatacttgtaccgacttttggcagatgacctgggaacagggatccagcatggtggttatgcttaccactcaggtagagcggggccgcgtcaagtgccaccaatattggcctgagcccacaggatcttcatcctatgggtgttatcaggtaacatgtcactcagaggagggcaatacagcatacatctttcggaagatgaccttatttaaccaagagaaaaacgagtcccggcctctcacacaaatccagtacattgcttggccagaccatggagtgcctgacgactccagtgatttcttggattttgtgtgtcatgttcggaacaagcgagcgggcaaggaagaaccggtcgtggtgcattgctcagcaggcatcggtagaactggggtgctgatcacaatggaaacagctatgtgtctgattgaatgcaatcagccagtgtatcccttagatattgttcgcaccatgagggatcagagggcaatgatgatccagacaccaagccagtaccggttcgtgtgcgaagcgattctcaaggtttacgaggagggctttgttaaaccgctaaccaccagcactaataagtag

SEQ ID NO: 132478 - DNA, 10300 bp, Artificial Sequence
  derived and/or modified sequence
cctgcgtgtccctctgcgctccgactggtgcgacttctccctgcgctagcgaggcagggttttggcctcgcctctcgcgagatcgcctcctgttgctgccgccgccgctcctggccactgactggcggcgcctgcgcagccgccatgttcggttgctatgctgcggcctaggagagggggtgtgcttgagggaggaggaagagatagaggaggaggagggggaggaagaggaggtggagaaggaggggggtgactgagctcctcttgcactctcacacacaaacgctgcccaggattacccgccagctcacgccgcgcagtgcgcttttccgctcctcgcgccccaccaccaacattgttctctcaggactcctgggtcccaggggccggaattgggcctgagcgggagaggaaagagacttggctttggccgcggggtcggaggattggggccaggccccctcccccacgcacttttgggggtgtggattatctcatccctgcagggaggtaggagaggtcgccggctgcccgcctccctgccacctccccagcggcgccggcccgcggctgcccagcagcatgaggtggtgctggcggctccgggtcgtggcgcgaccgctgcggcggcggctgctcggggggcgctgaggtagccccccggagcggcacggaggacgcgcttctcctctgcgcgccggggcctcgaggctttttttctccagccgagaggacgcggctgtgatatacgaagactttgtgtggacagtaatgacctcacgtttccgattgcctgctggcagaacctacaatgtacgagcatcagagttggcccgagacagacagcatactgaagtggtttgcaacatccttcttctggataacactgtacaagctttcaaagtcaataaacatgatcaggggcaagtcttgttggatgtcgtcttcaagcatctagatttgactgagcaggactattttggtttacagttggctgatgattccacagataacccaaggtggctggatccaaacaaaccaataaggaagcagctaaagagaggatctccttacagtttgaactttagagtcaaattttttgtaagtgaccccaacaagttacaagaagaatatacaaggtaccagtattttttgcaaattaaacaagacattcttactggaagattaccctgtccttctaatactgctgcccttttagcttcatttgctgttcagtctgaacttggagactacgatcagtcagagaacttgtcaggctacctctcagattattctttcattcctaatcaacctcaagattttgaaaaagaaattgcaaaattacatcagcaacacataggcttatctcctgcagaagcagaatttaattacctaaacacagcacgtaccttagaactctatggagttgaattccactatgcaagggatcagagtaacaatgaaattatgattggagtgatgtcaggaggaattctgatttataagaacagggtacgaatgaatacctttccatggttgaagattgtaaaaatttcttttaagtgcaaacagttttttattcaacttagaaaagaattgcatgaatctagagaaacattattgggatttaatatggtgaattacagagcatgtaaaaatttgtggaaagcatgtgtagaacatcacacattcttccgtttggacagaccacttccacctcaaaagaatttttttgcacattattttacattaggttcaaaattccggtactgtgggagaactgaagtccaatcagttcagtatggcaaagaaaaggcaaataaagacagggtatttgcaagatccccaagtaagcccttggcacggaaattaatggattgggaagtagtaagcagaaattcaatatctgatgacaggttagaaacacaaagtcttccatcacgatctccaccgggaactcctaatcatcgaaattctacattcacgcaggaaggaacccggttacgaccatcttcagttggtcatttggtagaccatatggttcatacttccccaagcgaagtgtttgtaaatcagagatctccgtcatcaacacaagctaatagcattgttctggaatcatcaccatcacaagagacccctggagatgggaagcctccagctttaccacccaaacagtcaaagaaaaacagttggaaccaaattcattattcacattcgcaacaagatctagaaagtcatattaatgaaacatttgatattccatcttctcctgaaaaacccactcctaatggtggtattccacatgataatcttgtcctaatcagaatgaaacctgatgaaaatgggaggtttggattcaatgtaaagggaggatatgatcagaagatgcctgtgattgtgtctcgagtagcaccaggaacacctgctgacctctgtgtccctagactgaatgaaggggaccaagttgtactgatcaatggtcgggacattgcagaacacactcatgatcaggttgtgctgtttattaaagctagttgtgagagacattctggggaactcatgcttctagttcgacctaatgctgtatatgatgtagtggaagaaaagctagaaaatgagccagatttccagtatattcctgagaaagccccactagatagtgtgcatcaggatgaccattccctgcgggagtcaatgatccagctagctgaggggcttatcactggaacagtcctgacacagtttgatcaactgtatcggaaaaaacctggaatgacaatgtcctgtgccaaattacctcagaatatttccaaaaatagatacagagatatttcgccttatgatgccacacgggtcattttaaaaggtaatgaagactacatcaatgcgaactatataaatatggaaattccttcttccagcattataaatcagtacattgcttgtcaagggccattaccacacacttgtacagatttttggcagatgacttgggaacaaggctcctctatggttgtaatgttgaccacacaagttgaacgtggcagagttaaatgtcaccaatattggccagaacccacaggcagttcatcttatggatgctaccaagttacctgccactctgaagaaggaaacactgcctatatcttcaggaagatgaccctatttaaccaagagaaaaatgaaagtcgtccactcactcagatccagtacatagcctggcctgaccatggagtccctgatgattcgagtgactttctagattttgtttgtcatgtacgaaacaagagggctggcaaggaagaacccgttgttgtccattgcagtgctggaatcggaagaactggggttcttattactatggaaacagccatgtgtctcattgaatgcaatcagccagtttatccactagatattgtaagaacaatgagagatcagcgagccatgatgatccaaacacctagtcaatacagatttgtatgtgaagctattttgaaagtttatgaagaaggctttgttaaacccttaacaacatcaacaaataaataagaaagcaaaaagatctgggatatgtgttggaaaactgctttcccttatgttcactgtgccataatgctgctcgcaggaaatggcattttacaaaaaaaaaatgaagaactcaaaaaaactttgaaaacttcagcactgttgcactttatgttttaaaaaatgtcactctttcaaaatctataactcatgtatttgaagactgtttcatgctttgctccgaacaaatagtaaataactgagtatgttcagggtaatttatgaaattttgtggtggtgccatgcaatccccttttggtagaattgccacaaacaaggctcaaaattctcatcatctctgttatacacctgtatcatgaaagcaaaaagaagtaaacatcaggagtcagctctggtcttttgcagtggtttgcgtacttactatactgattaccagattttatttttaaaattttagcaatatcgttcttaatattagccaatacactgcctatggatgcagcacatttttccctgcacaccccctgtagagacctgcctgctgctcagaagaagaaagatggaatttgctgttcccaggaaatgctgcacattgtccatttaccagcatcttatagaaaatataaatatgaatctacaaattctcttggatttaataatgtaacttatatttatcataaggttggcttattccaaatcatgtgatttcacatacttgatgtaaaggaatgcatgcattgtgtcttaaccccttaagtgccttgagacgtccttgtatgtctaacgaaaaggcactcatttgaccccactaggaggtatatatgtatattgtacattcgtatatttttatgcattttgaataagttcacattttaaaaaacagctatattgagtgttatacagtcaaagaagggtaaggaaattctgtttcttactcagtactcgtgatttgctataagaagcaaagataatttgtgttctactgagtgcacactgctgctatggaattgttcaaaatctgcacattcctttacttgagggactgaggggttacggtttagcagctcaactttaaaagatgcttttatgcttcaaatttcatatttatttcatccctaactttaggaagacatctaacatgcagattaatgttaaacatattgataatctaagctaaagttagagcaaataattgtgatttattcatgtccataactaaaatattattctttagcactcatttcagttaatatcaagctttgttcacactgatatattgattgggattcttcaaacgaagaatgaaacattattgacttatttctaagtgtaataactcaataactaaattgagaattttcttgtttttttgtgtacaattaaattattccattttatatatacttattaagttataagcatgttaataaggagacttttgactgtccagcctaatggaggatctgattcccattaaggatgtgggaattcccgtattttcctcttcaggtttttttgtttttaagtctacagagagatagaaccttaacattgcccagtttgataaaagtgaaaatttgctcacctatacaaatgttattttacacaattattttatgtggattggggttttaaaagattcatttcctagcagtttctgaatatttctgtaagatcttgataaagtttagagtcaaatggcagatattttggaaagccatttagtatgaggggaagagtacacattttaaatctttggtataatctaaacgatgtcatttcagacattcaaaactcataataataaatttcaggaaatcaagctcctaaacattaatagccaagataccaaataaattatcatattaaaatatttaagtttatttaaagagagaagtaaacataaacttatgtcaaagagaaattctcttaatctatttcctgacttcacagtcaaaacagtataagatagtgaagtaacttataatcttatttggtcattctgttctataaacagacaaatataatttaggctgctatatgacatgataaattaaaaactgagaaagtaaaattatgtcggggtctacacattaaatgactgttttggcagtttttcacctgaatttaaaaataaaatttgtctgttctatctgtatggacagaatatgacaaccatagaccaaaagatatcattgtatagatgtaaagagacaaaagtcatggttggcatgttctttaatttagggccttgtttatacttgtgagtttaataatttcttggcaatgagcactgctgcctttttaaatcatcaatgcctgtctttaaatgccaatcattagaagtttagaattacatttaaatttctcatatatgaatttttcatctgggaactacccactgtcgtcatttttatgtgcagaaaagatcctttttgaaaaccatatttattgggatcttatttaaatttaaattatcctttacaacttcttaaaatgaatatgctaatagataagactttatccattacatctaagaactttttaacctgtatatcaatctaaataggtttctagaaataatcctagctttcatacaccatgtagttctagactccgtccatatcagtgtaacattgtgtgataaaatgccaaatgtcttgtatctaagctacgctcccactcttccagccacccctacctcccaccttgacacccttaagaaagcaatgctgacttttattctgacaagtggaaatcaatagtggttaatcaagtggattttgtaaatgctaagaagtgtttgtgaaaaccttccctttctgagttaggattgttttttcctgttcatttcaggtgttttattgagcatctgatttgtgtcagcaccatgtaaatatgatgaggagtatttggaatagactttacattcaccagaaaattgatagtatttgttaaaccaatgcatccattcaaaatagaggcagagtaaacagcctaagaaatgatttcctttctacagtctgctaggagaaagaggtgagaggggagtggttgatgattttaatcaagagtaaagggaacatttattacatgaaatctgacttcagttgtgcaaaggtatgttaagacattaagacaattgctggaaggtttcaaatatgtgtacacacacatagagctacttttgtgtgtttatttatatgtatatttcacaaaggctaatgcccacagaggaaaatgattattttaacttctgggttatcatctgctggcagggtctgatcaggtctagagtatttaaggaaaagtctcctgtcttctatctccactagaagtactgcagcttgagagctgaaaggaacttgaaaaatgttatccagtcttcacttagcccatttttatcggcattaggaaatagggttcagcaatggttattgatttagcagtctggtcttatatgatctgctttctaattatctatctagtattcctatattatactggaacttcaataaattataacctatgtgaatatcataaattcttgtgaatttttgtctatttccagtagagaagcatactcagccaatgttttcacttaataactatgacaaccttaaaggatgtcacttaagttagaaaataagcaggcttaagaagtgattctaattaggacccccactcagtttgctagtcatgcctgcctgacagaacataagcttttgtaaagtatttagactgataacacatgcagtatgaaaacattatagactgcagttagaagactaattttttaaaagcactcaaaacatagaactaagatttagaatatatgtccatttataatgaaataatttgtgttcataatgtgaacatgtaagataagtaaataaagcattacttgttttataatatcaggaagagagaaggaaacattagtttataacaatgtgctatttaatatctgtattttgaacatttaaaatactctgatggtaaggttgccaaagtaattttgaattcataaaaattgtttataccacaataatgtgggatatgtttacaggctcttttattttgtggtagttactttatagttcagatgaatttgcatttcagtcacttatagtaaataaagtatattaaatatttgttggaataaaaatctcaatgtaataggacatagataaattatgcaacagcctgctttgatgaaagctggtgcattatgtgagctgccacagttaatactttgtattaacattgcttacttcccccatttgcttcacctatctgactacaattgctggaatcattctttttgtggtgcttcctccaagtgaaataactatgttattaaaacctactggattaattttatcaaatatcagacttactgatctcttggcagagatttattggtgtctcagtgtgatcacaatacaagttgtagcaaccattttataaaactcttagagaattatgtagataaaatggaaattacataatcctaaaacatttttgagggctaattgataataatttcagcaattttattaagaacccagtaaattaatccctaatttgtatgttttttgttcaacttaccgtgtctgcaaccattatatagacttcattgatactcagcaattactacagtgtgtcttacaatgttataaaaaacaaacagcaatctctgtttctgccagaagttagatatttttttatagtcctgatgaatttgttgtgagtagacaccacatagttatttctgtttgcatataaatttgctgctatttatttgtatgtttttctactgtagtatgctattgatttctgaagttataatcataatttttattttagtaatccaagctaaatgggcaaccagaagtaatatctgctagggtgcaatccatcagcattggttcagtgcatatacataagtaaaccagtttaaaaaaattttactaagcaaaaggtagtagcaatattgctagttaaagattaccattttaggggaaagttcaaaggtttaacttcctgaaaccttttaaacttttcagtgcaagaatgaaaatgtttgaaagccttgttaagctcataaaagtttcatttaaacactgtagagtttcctacctttgttgtgtaaaggatatagaaaatatttttctatggacagaaggttgaaactgttaacttctttaatttcattgtttaaaggagataaaatgttatttgtgtgtctttcatgctgtaaagaaaatgaatgtatctttcaaatgtcattagaattatggcttgattctaaggatactctatttgttttaaagtctacacgggattgaaaagaaagggaagagtattacacttcattgtacaaaatgtaattttagaagaaaaacattttcattataaacaagagcaatcattgaagcattttcagatataatgtacattctttttcattttgctttgcctctagaatagaaacttttcagaaaatttgcacatactgtttgtaagtataaaataattgaattctagacttttggagtgtggaagggtgtttgtgtgtgaaggtaataaatgtgttgctgcatgtgtttaccatagagaacgttgccaggctttgtcaaatgaggacattgttgtgagggtgtgacttttgtgaagccagaaaactgtgcctaagattcattacagtgagtatgtgcagaggcccctgacccagtaaatgctttttgcctttttattcccaatgtcttggacagttgagacaacttggcccaactctgaattgtagcagtgatgtcttatatgcttacgagtttatattaattcagctgaacaagaactacatcttaaaccacctttgtaggtatgattaatacgtgcaacagctgctttaaaaggtggtatttattattcatcactcatgaaacttgactcagtgaggacttcattatttttatttctctttccacgtctccaactttttaaaaatcactaatttaactctttgttaagtactcaagtacaaagtgatctcttctttcatgaactttgctataactgttgaaaggattggtgtcaggctctctcaaccctgggagtttccaaaatttagcaaatattacttgtgataagcttaaatgccacatcgctaagtacaattattaccaggaatccgtcaagggggagatagccccgctcacacccttagacccaaacaggtgctggttcatgctttctccacaaattggcagttgggtacttccccactgtcatcacagttgagctcattttaacatatattcaaagaagctttttagtttctactcctgaattgtagtgttcaagttatttgccttcctgggtaagaaaattttaacccaagtctgggattctctggcacctgtcttttcccatcttttaatgagttggcaagattaggtcaaatttcaatgctaaatttgattttttgaattttaaatagttgcactttatttcatgctgaccaccaacttaatttatacattttaaaataaaattatcctagaagtgttgtaaacgtgggaaaattttaattagtgttggaggtcattagattggacccaggtttaaatataatgatctcttcacagcttatttgatgtttaagagcaacttgtgtgatcttagctttgcaggttttctgtaatttatgtagcacaataaaggataaccagttgactgtgttactgga

SEQ ID NO: 132479 - DNA, 2781 bp, Artificial Sequence
  derived and/or modified sequence
atgaccagccgattccgtttgcccgcaggcaggacctacaatgtgcgcgcttccgagctggccagggacaggcaacataccgaagttgtctgcaatatcctgctgctggacaacaccgttcaggcgtttaaggtgaataagcatgatcaagggcaggttctgctggacgtagtgttcaagcacttggacctgacggaacaggattattttgggctgcaactcgccgacgattccacggacaatcccaggtggcttgatccaaataagcccatcaggaagcaactcaagagggggagcccctactctttaaactttcgggtgaaattttttgtttccgacccaaataagctccaggaagagtacacaagatatcagtatttcctccagatcaagcaggatatactgaccggcaggttgccctgtcctagcaacaccgcagcgctgctcgccagttttgccgtccagtcagagcttggcgattacgaccagtctgagaatctatcaggctacttgagtgattattcatttatccctaatcagccacaggacttcgaaaaagaaattgcaaaactgcaccaacagcacataggcctcagccccgcagaagcagagttcaactatctcaatactgcgaggacgctggagctttacggggttgagtttcattacgctcgagaccagtcaaacaatgagatcatgataggagtcatgagtggcggaatattaatctacaagaatcgcgttcgtatgaataccttcccttggttgaaaatcgtcaaaatctcttttaagtgtaagcagtttttcattcagctacgaaaggagttgcacgagagccgagaaaccctcctgggctttaacatggtcaattatcgggcttgcaagaatctgtggaaggcctgcgtggaacatcacactttctttcgactggacaggcccttgccaccacagaagaactttttcgcgcactacttcacattgggatcgaagttccgttactgcggccgaaccgaggtccagagtgtccagtacggcaaggagaaggctaataaggatagggtgttcgcccgatctccctccaaacctctagcaagaaagcttatggactgggaagtggtctcccgaaactcaatcagtgatgaccgattagaaacccagtccctcccgtcccgcagccctcctggtaccccaaaccaccggaattctacattcacccaagagggcaccagactgagaccgtccagcgtagggcatctcgtagatcacatggtacacacgtctccatccgaggttttcgtcaatcaaaggtccccttcatcgacacaggcgaatagcatcgtgctcgagtcctccccttcccaggagacacctggcgacggcaaacccccagctctgccccctaaacagtcaaagaaaaactcatggaaccagattcactactcacacagccagcaggatctggaatcacatatcaacgagactttcgacatccccagtagtcccgagaaaccgacccctaatggaggcattccacacgacaatctggtgcttattcgcatgaagcccgacgagaacgggaggttcgggttcaacgtgaaaggcggttatgatcagaagatgcctgtgatcgtctcccgcgtcgcacctgggacgccggcagacctatgtgttcctcggctaaatgagggcgaccaggtggttctcatcaacgggagagacatcgctgagcacacgcacgatcaagtagttttattcatcaaagcaagctgcgaacggcattcgggcgaactgatgcttctggtgaggccgaacgcagtttatgacgtcgtcgaagagaaattagaaaacgagccagacttccagtatatcccagaaaaagcccctcttgacagcgtgcatcaggacgatcattccctgagagagtccatgattcagctcgcagaaggcctgatcaccggcacagtgctaacacagtttgatcagttgtaccggaagaagccgggaatgaccatgtcctgcgccaagctcccccagaatataagtaaaaaccgctaccgggacatctccccctatgacgcaactagagttatactgaaagggaacgaagattatattaacgctaactacattaatatggagattcccagcagtagcatcatcaatcaatatatcgcatgtcaggggcctcttccacacacctgtacagatttttggcaaatgacgtgggagcaaggaagctctatggtagttatgctcactacacaggtggaacggggacgagtcaaatgtcaccagtactggccggagcccacaggatcctcctcgtacggatgttaccaggttacttgccatagcgaagaagggaacacagcatatatttttcggaagatgactttattcaaccaagaaaaaaatgagtctcggccactgacccaaattcagtacattgcttggccggaccatggggtccctgatgacagcagtgacttcctggatttcgtgtgccacgtgaggaacaaacgtgccggaaaggaagaacccgttgtggttcattgtagcgcgggaatcgggaggaccggagtgttaattacaatggagacagctatgtgcttgatcgagtgcaatcagcctgtctatcccttggacatcgtgcgcacaatgagagaccagagagctatgatgatccaaacaccatcacaatatcgcttcgtttgcgaagcaattctcaaggtgtatgaagagggattcgtgaaaccattaaccacctcaacaaacaagtag

SEQ ID NO: 132480 - protein, 595 aa, Artificial Sequence
  derived and/or modified sequence
MVRWFHRDLSGLDAETLLKGRGVHGSFLARPSRKNQGDFSLSVRVGDQVTHIRIQNSGDFYDLYGGEKFATLTELVEYYTQQQGVLQDRDGTIIHLKYPLNCSDPTSERWYHGHMSGGQAETLLQAKGEPWTFLVRESLSQPGDFVLSVLSDQPKAGPGSPLRVTHIKVMCEGGRYTVGGLETFDSLTDLVEHFKKTGIEEASGAFVYLRQPYYATRVNAADIENRVLELNKKQESEDTAKAGFWEEFESLQKQEVKNLHQRLEGQRPENKGKNRYKNILPFDHSRVILQGRDSNIPGSDYINANYIKNQLLGPDENAKTYIASQGCLEATVNDFWQMAWQENSRVIVMTTREVEKGRNKCVPYWPEVGMQRAYGPYSVTNCGEHDTTEYKLRTLQVSPLDNGDLIREIWHYQYLSWPDHGVPSEPGGVLSFLDQINQRQESLPHAGPIIVHCSAGIGRTGTIIVIDMLMENISTKGLDCDIDIQKTIQMVRAQRSGMVQTEAQYKFIYVAIAQFIETTKKKLEVLQSQKGQESEYGNITYPPAMKNAHAKASRTSSKHKEDVYENLHTKNKREEKVKKQRSADKEKSKGSLKRK

SEQ ID NO: 132481 - protein, 556 aa, Artificial Sequence
  derived and/or modified sequence
MLSRGVGDQVTHIRIQNSGDFYDLYGGEKFATLTELVEYYTQQQGVLQDRDGTIIHLKYPLNCSDPTSERWYHGHMSGGQAETLLQAKGEPWTFLVRESLSQPGDFVLSVLSDQPKAGPGSPLRVTHIKVMCEGGRYTVGGLETFDSLTDLVEHFKKTGIEEASGAFVYLRQPYYATRVNAADIENRVLELNKKQESEDTAKAGFWEEFESLQKQEVKNLHQRLEGQRPENKGKNRYKNILPFDHSRVILQGRDSNIPGSDYINANYIKNQLLGPDENAKTYIASQGCLEATVNDFWQMAWQENSRVIVMTTREVEKGRNKCVPYWPEVGMQRAYGPYSVTNCGEHDTTEYKLRTLQVSPLDNGDLIREIWHYQYLSWPDHGVPSEPGGVLSFLDQINQRQESLPHAGPIIVHCSAGIGRTGTIIVIDMLMENISTKGLDCDIDIQKTIQMVRAQRSGMVQTEAQYKFIYVAIAQFIETTKKKLEVLQSQKGQESEYGNITYPPAMKNAHAKASRTSSKHKEDVYENLHTKNKREEKVKKQRSADKEKSKGSLKRK

SEQ ID NO: 132482 - DNA, 1788 bp, Artificial Sequence
  derived and/or modified sequence
atggtgcgctggttccaccgagatttgagcggcctggacgcggaaactcttctgaagggacgcggcgtgcacggctccttcttggctcgacccagcagaaagaaccagggcgacttctctctgagtgtcagagttggagaccaggtgacccacatccggatccaaaacagtggtgacttctacgacctctacgggggcgaaaagttcgcgaccttgacggaactggttgagtattatactcagcagcagggtgttttacaagacagggatggaaccatcattcacctaaagtatccattaaattgctcagaccccacttccgagcgctggtaccacggacacatgtctggcggacaggccgaaacgcttctccaagcaaagggcgagccctggacctttcttgtgagggaaagcctgagccagccgggtgatttcgtgctgtcagtgctttccgaccaaccgaaagctggacctgggagtcctttgcgcgtcacgcacatcaaggtcatgtgtgaaggcgggcggtatactgtgggcggtctcgaaacatttgattccttgacggacctcgtggagcacttcaagaagacggggattgaggaagcttccggtgcgtttgtgtacctgcggcagccctattacgctacaagagtgaatgcagccgacatcgaaaacagagtcttggagttgaacaagaaacaggaaagcgaggacacagccaaagcagggttttgggaggagtttgagtcactccaaaagcaggaagtgaaaaatttgcaccaacgactggagggccaaagacccgagaataagggcaagaaccggtataaaaatatcctcccattcgaccattcccgtgtgattctccaggggcgcgactccaacatcccgggtagtgactacatcaacgccaactacattaagaatcagctcctgggacccgacgaaaatgcaaagacctacatcgcatctcagggatgtcttgaggcaaccgtgaatgacttttggcaaatggcatggcaggagaattcacgggttattgtcatgacaacccgggaagtagagaagggccgcaacaaatgcgttccgtattggcccgaggtagggatgcagcgagcatatggcccttattcagtaacaaactgtggagaacatgacaccaccgagtataaacttcggaccctacaggtatccccccttgataatggagacctcattagggagatatggcactaccaatacctgagctggcccgaccatggggtgccgtcggagccggggggagtcctgtcatttttggaccagatcaatcagcgacaggagtccttgccgcatgcgggacccatcatagtgcattgttccgcaggtatcggcagaacagggaccattatcgtgatcgatatgctcatggagaacatcagcaccaaggggctggattgtgacattgacatccagaagacaatacagatggtgcgtgcacaaagatcaggtatggtccagactgaagctcagtacaaatttatctacgtggctattgcgcagttcatcgaaactaccaaaaagaagctggaagtcttgcagagccagaaaggccaggagtcagagtatggcaatatcacgtacccgcctgccatgaaaaatgcacatgccaaggcaagccgcacctcatcaaagcacaaggaagacgtctatgaaaatcttcacaccaagaacaaacgtgaggaaaaagttaaaaagcagaggtccgcggacaaagaaaagtcaaagggaagcctaaagcggaaatag

SEQ ID NO: 132483 - DNA, 1788 bp, Artificial Sequence
  derived and/or modified sequence
atggtgcgctggttccaccgggacctgagcggcctggatgctgagaccctgctgaagggccggggcgtgcacggcagcttcctggcccggcccagcaggaagaaccagggcgacttcagcctgtctgtgcgggtgggggaccaggtgacccacatccgcatccagaacagcggggacttctatgacctgtatggaggagagaagtttgccaccctgacagagctggtggagtactacacccagcagcagggcgtgctgcaggacagagatggcaccatcatccacctgaagtaccccctgaactgcagcgaccccaccagcgagcgctggtaccacggccacatgtctgggggccaggccgagaccctgctgcaggccaagggggagccctggaccttcctggtgcgggagagcctgagccagcccggggactttgtgctgtctgtgctgagtgaccagcccaaggccggccctggcagccccctgcgggtgacccacatcaaggtgatgtgtgagggcggccgctacacagtgggcggcctggagacctttgacagcctgacagacctggtggagcacttcaagaagacaggaattgaggaggccagcggggcctttgtgtacctgcggcagccctactatgccaccagggtgaatgctgctgacatcgagaacagagtgctggagctgaacaagaagcaggagagcgaggacacagccaaggccggcttctgggaggagtttgagagcctgcagaagcaggaggtgaagaacctgcaccagaggctggagggccagaggccagaaaataaaggcaagaaccgctacaagaacatcctgccctttgaccacagcagggtcatcctgcagggccgggacagcaacatccctggcagtgactacatcaatgccaactacatcaagaaccagctgctgggcccagatgaaaatgccaagacctacatcgccagccagggctgcctggaggccaccgtgaatgacttctggcagatggcctggcaggagaacagccgggtgattgtgatgaccacccgggaggtggagaagggcaggaacaagtgtgtgccctactggccagaggtgggcatgcagagggcctacggcccctacagcgtgaccaactgtggggagcatgacaccacagagtacaagctgcggaccctgcaggtgagccccctggacaacggggacctgatccgggagatctggcactaccagtacctgtcctggccagaccacggcgtgcccagcgagcccggcggcgtgctgtccttcctggaccagatcaaccagaggcaggagagcctgccccacgccggccccatcatcgtgcactgcagcgctggcattggaagaacaggcaccatcatcgtcatcgacatgctgatggagaacatcagcaccaagggcctggactgtgacatcgacatccagaagaccatccagatggtgcgggcccagaggagcggcatggtgcagacagaggcccagtacaagttcatctacgtggccatcgcccagttcatcgagaccaccaagaagaagctggaggtgctgcagagccagaagggccaggagagtgaatatggcaacatcacctaccccccagccatgaagaatgcccacgccaaggccagcaggaccagcagcaagcacaaggaggatgtgtatgagaacctgcacaccaagaacaagcgggaggagaaggtgaagaagcagaggtctgctgacaaggagaagagcaagggcagcctgaagaggaagtag

SEQ ID NO: 132484 - DNA, 1788 bp, Artificial Sequence
  derived and/or modified sequence
atggtgcggtggttccaccgggacctgagcggcctggacgccgagacacttcttaaggggcgaggcgtccacgggagctttctggcgagaccctcccgcaagaaccagggagattttagcctgagcgtccgggtcggcgaccaggtcacccatattaggatccagaactctggagatttttacgatctttatgggggggagaaatttgcaacacttacagagctcgtcgaatattatacccagcaacaaggggtcctgcaggaccgggacggcactattatccatctgaaatatcctttaaattgttccgatccaaccagtgagcgttggtatcatggtcatatgagcggtgggcaggcggaaaccctgttgcaagcaaagggagaaccgtggacctttctcgtgagggagtctctgagtcagcccggagatttcgtattgtcagtcctgagcgatcagcccaaagccggaccaggatcaccactgcgggtgactcacatcaaagtgatgtgcgaaggagggagatacacagttggaggcctcgagactttcgattcccttactgacctggtggagcatttcaagaagaccgggatcgaagaagcatccggcgctttcgtttatctgcgacagccatattatgccacccgcgtgaacgcagcagatattgagaatagggtgttggaactcaataaaaagcaagagtctgaggacaccgcgaaagccggtttttgggaagagtttgagtcactccaaaagcaggaagtaaagaatctgcatcagaggctggagggacaacgccccgaaaacaaggggaaaaacaggtataaaaatatcttacccttcgatcattctcgggtgatcctccagggcagagattctaacattccgggtagcgactacatcaacgctaattacatcaagaaccagctactggggcccgatgaaaacgctaagacttacattgctagtcaaggctgcctggaggccacggtgaacgacttctggcagatggcctggcaggagaattcacgggtgatcgtcatgacaacccgcgaggtggaaaaggggcggaataaatgtgtgccctactggccagaggtgggcatgcagagagcctatgggccatacagtgtgactaactgcggtgaacacgacaccacagagtataagctgcgtacactgcaggtgtctccgctagacaatggggacctgatccgggagatctggcactatcaatacctttcatggcccgatcacggggttccaagcgaaccgggaggtgtgctgtcttttctggaccagatcaatcagcggcaagagtccctgccccacgcaggaccaattattgtgcactgctccgccggtataggtcgcaccgggacgatcatcgtcatagacatgctgatggaaaacatctccactaagggattggactgcgatatcgatatacagaagaccatccagatggtcagggcacaacggtcaggaatggtccagaccgaggcccagtacaagtttatctatgtcgccatcgctcagttcatcgagaccacaaagaagaagctggaagtgctgcagtcccagaagggccaggaaagtgagtacggcaacattacctatcctccagcaatgaaaaatgctcatgcgaaagcaagtcggacatctagtaaacacaaggaggatgtgtatgagaatttgcatactaaaaacaagagagaggagaaggtcaaaaagcagcgatctgcagacaaagagaagtcaaaaggaagcctgaagcggaagtag

SEQ ID NO: 132485 - DNA, 1788 bp, Artificial Sequence
  derived and/or modified sequence
atggtacggtggtttcatcgtgacctgtcgggcttagatgccgagaccttactgaaaggcagaggtgttcacggtagctttctggctaggccaagccggaaaaatcaaggggacttttccctctcagttcgcgtgggagatcaggtgacccacatcagaatccagaattcaggggacttctacgatttatacgggggagaaaagttcgcgactttaaccgaactcgtggagtattacactcagcagcagggcgtcctgcaggaccgcgacggaactatcatccaccttaagtatccactgaactgttctgaccctactagtgaacgatggtaccacggacacatgtctggaggacaggcagaaacactcctgcaagctaaaggagaaccctggacattccttgtccgtgagagcctgtcccagcccggagattttgttctttctgtcctatcggaccaacctaaggcagggccaggctctccgctgcgggttacccacatcaaggttatgtgtgagggcggtagatataccgtgggcggtcttgaaactttcgacagcctcaccgacttggtggagcactttaagaaaaccggcatagaagaggcctcaggcgctttcgtctacctgcgacaaccatactacgcgacacgtgttaatgccgcagacattgaaaaccgggtactcgaattgaacaagaagcaggagagtgaggatacagccaaggctggcttctgggaggaatttgaatcactccagaagcaggaagtaaaaaacctgcatcaacgactagaaggccagcgccctgagaataagggaaagaaccgctacaagaatatcctgccctttgaccattctcgggttatcctacaggggagggattcaaatatcccgggatctgactacatcaacgccaactacattaagaaccagttgctagggccagacgaaaatgcaaaaacgtatatcgcttcacaggggtgtctggaagctaccgtcaacgatttctggcaaatggcctggcaggagaattctcgcgttattgtgatgaccacccgggaagttgagaagggcagaaacaaatgtgtgccatactggcccgaggtcggaatgcagagggcttatgggccatatagcgtgaccaactgcggagagcacgacactactgagtacaaacttcgtacactccaagtgagtcccctggacaatggtgacctgattagggagatttggcattaccagtatttgtcctggccagaccacggggtcccctcagagcccggtggtgtgctgagcttcctcgatcagatcaaccaacggcaggagagtctgcctcacgcaggtcccattatagtccattgctccgctgggattgggaggacaggaaccattattgtgattgatatgttgatggagaatattagtaccaaaggacttgactgcgacatagatattcagaagacaatccagatggtccgcgcacaaaggagtggcatggtgcagaccgaagcccaatacaaatttatttacgtagctatagcccagtttatagagacaacgaagaaaaagctcgaagtgctacagagccagaaaggccaagagtccgaatacggaaatataacttatccgccagcaatgaaaaacgcccatgccaaagcttccagaacctctagcaaacacaaggaggatgtttacgagaatctgcacaccaaaaataagagagaggagaaggtgaagaagcaacggtccgctgataaggagaaatctaaggggagcctaaaacgaaagtag

SEQ ID NO: 132486 - DNA, 2245 bp, Artificial Sequence
  derived and/or modified sequence
gtgctctaaaacgagaagtacaagtgagttcccccaaggggtcggccgcgcctcttcctgtccccgccctgccggctgccccaggccagtggagtggcagccccagaactgggaccaccgggggtggtgaggcggcccggcactgggagctgcatctgaggcttagtccctgagctctctgcctgcccagactagctgcacctcctcattccctgcgcccccttcctctccggaagcccccaggatggtgaggtggtttcaccgagacctcagtgggctggatgcagagaccctgctcaagggccgaggtgtccacggtagcttcctggctcggcccagtcgcaagaaccagggtgacttctcgctctccgtcagggtgggggatcaggtgacccatattcggatccagaactcaggggatttctatgacctgtatggaggggagaagtttgcgactctgacagagctggtggagtactacactcagcagcagggtgtcctgcaggaccgcgacggcaccatcatccacctcaagtacccgctgaactgctccgatcccactagtgagaggtggtaccatggccacatgtctggcgggcaggcagagacgctgctgcaggccaagggcgagccctggacgtttcttgtgcgtgagagcctcagccagcctggagacttcgtgctttctgtgctcagtgaccagcccaaggctggcccaggctccccgctcagggtcacccacatcaaggtcatgtgcgagggtggacgctacacagtgggtggtttggagaccttcgacagcctcacggacctggtggagcatttcaagaagacggggattgaggaggcctcaggcgcctttgtctacctgcggcagccgtactatgccacgagggtgaatgcggctgacattgagaaccgagtgttggaactgaacaagaagcaggagtccgaggatacagccaaggctggcttctgggaggagtttgagagtttgcagaagcaggaggtgaagaacttgcaccagcgtctggaagggcagcggccagagaacaagggcaagaaccgctacaagaacattctcccctttgaccacagccgagtgatcctgcagggacgggacagtaacatccccgggtccgactacatcaatgccaactacatcaagaaccagctgctaggccctgatgagaacgctaagacctacatcgccagccagggttgtctggaggccacggtcaatgacttctggcagatggcgtggcaggagaacagccgtgtcatcgtcatgaccacccgagaggtggagaaaggccggaacaaatgcgtcccatactggcccgaggtgggcatgcagcgtgcttatgggccctactctgtgaccaactgcggggagcatgacacaaccgaatacaaactccgtaccttacaggtctccccgctggacaatggagacctgattcgggagatctggcattaccagtacctgagctggcccgaccatggggtccccagtgagcctgggggtgtcctcagcttcctggaccagatcaaccagcggcaggaaagtctgcctcacgcagggcccatcatcgtgcactgcagcgccggcatcggccgcacaggcaccatcattgtcatcgacatgctcatggagaacatctccaccaagggcctggactgtgacattgacatccagaagaccatccagatggtgcgggcgcagcgctcgggcatggtgcagacggaggcgcagtacaagttcatctacgtggccatcgcccagttcattgaaaccactaagaagaagctggaggtcctgcagtcgcagaagggccaggagtcggagtacgggaacatcacctatcccccagccatgaagaatgcccatgccaaggcctcccgcacctcgtccaaacacaaggaggatgtgtatgagaacctgcacactaagaacaagagggaggagaaagtgaagaagcagcggtcagcagacaaggagaagagcaagggttccctcaagaggaagtgagcggtgctgtcctcaggtggccatgcctcagccctgaccctgtggaagcatttcgcgatggacagactcacaacctgaacctaggagtgccccattcttttgtaatttaaatggctgcatcccccccacctctccctgaccctgtatatagcccagccaggccccaggcagggccaacccttctcctcttgtaaataaagccctgggatcact

SEQ ID NO: 132487 - DNA, 1788 bp, Artificial Sequence
  derived and/or modified sequence
atggtgagatggttccacagagacctgagcggcctggacgccgagaccctgctgaagggcagaggcgtgcacggcagcttcctggccagacccagcagaaagaaccagggcgacttcagcctgagcgtgagagtgggcgaccaggtgacccacatcagaatccagaacagcggcgacttctacgacctgtacggcggcgagaagttcgccaccctgaccgagctggtggagtactacacccagcagcagggcgtgctgcaggacagagacggcaccatcatccacctgaagtaccccctgaactgcagcgaccccaccagcgagagatggtaccacggccacatgagcggcggccaggccgagaccctgctgcaggccaagggcgagccctggaccttcctggtgagagagagcctgagccagcccggcgacttcgtgctgagcgtgctgagcgaccagcccaaggccggccccggcagccccctgagagtgacccacatcaaggtgatgtgcgagggcggcagatacaccgtgggcggcctggagaccttcgacagcctgaccgacctggtggagcacttcaagaagaccggcatcgaggaggccagcggcgccttcgtgtacctgagacagccctactacgccaccagagtgaacgccgccgacatcgagaacagagtgctggagctgaacaagaagcaggagagcgaggacaccgccaaggccggcttctgggaggagttcgagagcctgcagaagcaggaggtgaagaacctgcaccagagactggagggccagagacccgagaacaagggcaagaacagatacaagaacatcctgcccttcgaccacagcagagtgatcctgcagggcagagacagcaacatccccggcagcgactacatcaacgccaactacatcaagaaccagctgctgggccccgacgagaacgccaagacctacatcgccagccagggctgcctggaggccaccgtgaacgacttctggcagatggcctggcaggagaacagcagagtgatcgtgatgaccaccagagaggtggagaagggcagaaacaagtgcgtgccctactggcccgaggtgggcatgcagagagcctacggcccctacagcgtgaccaactgcggcgagcacgacaccaccgagtacaagctgagaaccctgcaggtgagccccctggacaacggcgacctgatcagagagatctggcactaccagtacctgagctggcccgaccacggcgtgcccagcgagcccggcggcgtgctgagcttcctggaccagatcaaccagagacaggagagcctgccccacgccggccccatcatcgtgcactgcagcgccggcatcggcagaaccggcaccatcatcgtgatcgacatgctgatggagaacatcagcaccaagggcctggactgcgacatcgacatccagaagaccatccagatggtgagagcccagagaagcggcatggtgcagaccgaggcccagtacaagttcatctacgtggccatcgcccagttcatcgagaccaccaagaagaagctggaggtgctgcagagccagaagggccaggagagcgagtacggcaacatcacctacccccccgccatgaagaacgcccacgccaaggccagcagaaccagcagcaagcacaaggaggacgtgtacgagaacctgcacaccaagaacaagagagaggagaaggtgaagaagcagagaagcgccgacaaggagaagagcaagggcagcctgaagagaaagtag

SEQ ID NO: 132488 - protein, 465 aa, Artificial Sequence
  derived and/or modified sequence
MVGKAWPLTHSQGTGPWAPEGHRREAADPWWQRQQAQEGRMQLGCAWVAARRGGGRKLASWSLLSPQRQTDRQTDSWQEAAWGPQLLQQTSWLSEPPLGPAPHLSMVQAHGGRSRAQPLTLSLGAAMTQPPPEKTPAKKHVRLQERRGSNVALMLDVRSLGAVEPICSVNTPREVTLHFLRTAGHPLTRWALQRQPPSPKQLEEEFLKIPSNFVSPEDLDIPGHASKDRYKTILPNPQSRVCLGRAQSQEDGDYINANYIRGYDGKEKVYIATQGPMPNTVSDFWEMVWQEEVSLIVMLTQLREGKEKCVHYWPTEEETYGPFQIRIQDMKECPEYTVRQLTIQYQEERRSVKHILFSAWPDHQTPESAGPLLRLVAEVEESPETAAHPGPIVVHCSAGIGRTGCFIATRIGCQQLKARGEVDILGIVCQLRLDRGGMIQTAEQYQFLHHTLALYAGQLPEEPSP

SEQ ID NO: 132489 - protein, 136 aa, Artificial Sequence
  derived and/or modified sequence
MKECPEYTVRQLTIQYQEERRSVKHILFSAWPDHQTPESAGPLLRLVAEVEESPETAAHPGPIVVHCSAGIGRTGCFIATRIGCQQLKARGEVDILGIVCQLRLDRGGMIQTAEQYQFLHHTLALYAGQLPEEPSP

SEQ ID NO: 132490 - DNA, 1398 bp, Artificial Sequence
  derived and/or modified sequence
atggttgggaaggcttggcccttgacgcacagtcagggcaccggaccttgggcccccgaggggcacagacgcgaggctgcagacccatggtggcaaagacagcaagcccaggaggggcggatgcaactaggatgcgcctgggttgcagccagacgcggtggaggtagaaaactggcatcctggagcctgctgtcaccgcagcgtcagacagaccgccagaccgattcatggcaggaagccgcttggggacctcagctcctccagcagaccagctggctgagtgagcctcctctgggccctgcaccgcacctttctatggtgcaggcccacggaggacggtcaagggctcaacctctgacactgtccctcggtgccgccatgacacaaccacccccagaaaagaccccggcgaaaaaacacgtacgtctgcaggaacggagaggttcgaacgtggccctgatgctggatgtgaggtcactcggagcagtggagccgatctgttcagttaatacccccagagaagtgacccttcactttctgcgtaccgcaggccacccattaacccgttgggctctgcagcgccagcctccatctcctaaacagctcgaagaagagtttctgaaaattcctagcaattttgtgtcccctgaggatttggatatccccggccatgcttctaaggatcgctataaaacgatattacccaatccccagagcagggtgtgcctagggcgggcccagtcacaggaggacggggattacattaacgccaattatatccggggatatgacggcaaagagaaggtctacatcgctacccagggccctatgccgaatactgtgagtgacttttgggagatggtctggcaggaggaggtttctctgattgtaatgctgacccagctgagggaaggcaaggaaaaatgcgtccactattggcccactgaagaagaaacatatggaccttttcagatccgcattcaggatatgaaggagtgccccgagtacactgtcagacagttaacgatccagtatcaggaagaacgccggagtgtaaaacacattctattcagtgcttggccggatcatcagaccccagagtcggcagggcccctgctgaggttggtggccgaagtggaggaatcccctgaaactgccgcccaccccggaccgatcgtcgttcactgttccgcaggcattgggcggacgggctgtttcatcgccacccgcattgggtgccagcagctgaaggcccgcggcgaagtggacatccttggcattgtatgccagctgcgcctcgacagggggggcatgatccagactgcagagcagtatcagttcctgcaccatacattggccctttacgccggccagctgccggaggagccttccccctag

SEQ ID NO: 132491 - DNA, 1398 bp, Artificial Sequence
  derived and/or modified sequence
atggtgggcaaggcctggcccctgacccacagccagggcaccggcccctgggcccctgagggccacagaagagaggccgctgacccctggtggcagaggcagcaggcccaggagggccgcatgcagctgggctgtgcctgggtggccgccaggagaggaggcggcaggaagctggcctcctggagcctgctgagcccccagaggcagacagaccggcagacagacagctggcaggaggccgcctggggcccccagctgctgcagcagacctcctggctgtctgagccccccctgggccctgccccccacctgtccatggtgcaggcccacggcggccgcagccgggcccagcccctgaccctgagcctgggcgccgccatgacccagcccccacctgagaagaccccagccaagaagcacgtgcggctgcaggagcggcggggcagcaatgtggccctgatgctggatgtgcgcagcctgggcgctgtggagcccatctgcagcgtgaacaccccccgggaggtgaccctgcacttcctgaggacagctggccaccccctgacccgctgggccctgcagaggcagccccccagccccaagcagctggaggaggagttcctgaagatccccagcaactttgtgtccccagaggacctggacatccctggccacgccagcaaggaccgctacaagaccatcctgcccaacccccagagccgggtgtgcctgggccgggcccagagccaggaggatggagactacatcaatgccaactacatccggggctatgatggcaaggagaaggtgtacatcgccacccagggccccatgcccaacacagtgtctgacttctgggagatggtgtggcaggaggaggtgtccctcatcgtgatgctgacccagctgcgggagggcaaggagaagtgtgtgcactactggcccacagaggaggagacctacggccccttccagatccgcatccaggacatgaaggagtgcccagagtacacagtgcggcagctgaccatccagtaccaggaggagaggagatctgtgaagcacatcctcttcagcgcctggccagaccaccagaccccagagagcgctggccccctgctgcggctggtggccgaggtggaggagagccctgagacagctgcccaccctggccccatcgtggtgcactgcagcgctggcatcggccgcacaggctgcttcatcgccaccagaattggctgccagcagctgaaggcccggggggaggtggacatcctgggcatcgtgtgccagctgcggctggaccggggcggcatgatccagacagctgagcagtaccagttcctgcaccacaccctggccctgtatgccggccagctgcctgaggagcccagcccctag

SEQ ID NO: 132492 - DNA, 1398 bp, Artificial Sequence
  derived and/or modified sequence
atggtgggcaaggcctggcccctgacccacagccagggcaccggcccgtgggccccagaaggccatcggcgagaagccgcggatccatggtggcagaggcaacaggcacaagagggccgtatgcaattgggctgcgcctgggtggctgcaagacgggggggaggacggaaactggcatcctggtcactattatccccccagaggcagaccgaccgacagaccgatagttggcaggaggctgcttggggcccacagcttctccagcagacatcctggctcagtgagcccccattggggcccgcaccgcatctcagcatggtgcaggcccatggtgggcgtagcagagctcaaccgctcactctttccctcggagctgctatgacacaaccccctcccgagaagacaccggccaagaagcacgtaaggctgcaggagcggcggggctcaaatgtggcccttatgctggacgttagaagcttaggcgcagtagaaccaatatgctcagtgaatacacctagggaagtcaccttgcactttctgagaacagccggtcacccccttacgcgctgggcactacaacggcagcctcccagccctaagcagctggaggaggaattcctgaagattccttctaacttcgtgtctcctgaggacctcgatatccccggtcatgctagcaaggatagatataaaaccattctgcccaatccgcagtcacgtgtttgcctggggagagcccaatcccaggaagacggggattacattaatgcgaactatatccggggctatgatggcaaagaaaaggtctacatcgctactcaaggtccgatgccaaataccgtatcggacttctgggagatggtttggcaggaagaggtgagcctgatcgtgatgctgacacagctgagggagggaaaagagaagtgcgtgcattactggcccaccgaagaagaaacttacggaccattccagataagaattcaagacatgaaagagtgcccagagtacacagtccgtcaactgaccatccagtatcaggaagagagacggagcgtgaagcatatcttgttcagtgcatggccagaccaccagacaccagaaagtgcaggccctctgcttcgcctggtcgccgaggttgaggagtcacccgagaccgccgcccaccccggcccaattgtcgtccattgtagtgctggcatcggacgaactggatgctttatagccacaaggatcggatgccagcaactgaaggcccggggggaggtcgacatattaggaatcgtgtgccaactccgcctcgatcgtggcggcatgattcaaacagctgagcaatatcagttcctgcaccacaccctggctctgtacgccggccagctccccgaagagccctcaccctag

SEQ ID NO: 132493 - DNA, 1398 bp, Artificial Sequence
  derived and/or modified sequence
atggtcggaaaagcttggcctctgactcatagtcagggaacaggcccttgggccccagaaggtcatagaagggaagctgccgatccctggtggcagcggcagcaagcgcaggagggacggatgcaactgggctgtgcatgggtggcagcacggcgaggcggtgggcgaaagctggcttcttggtcccttctgagtccccagaggcagaccgatagacagactgatagttggcaagaggcagcatgggggcctcagctcctgcaacagacaagttggttatctgaaccaccacttgggccagctccgcatctgagtatggtgcaggcacatgggggaaggagtcgagcccagccactcacattgagcctcggggcagccatgacccagcctccccctgagaagacccctgcaaaaaagcacgtgcgactgcaggaacggaggggaagtaatgttgctctgatgttggacgtgaggagtttaggagccgtagagccaatttgctctgttaatacacctagagaggtcaccctccattttttgaggacagcaggccatcccttgacccggtgggccctccagaggcagcccccttcacccaaacagctggaagaagagttcctgaaaattccgagtaactttgtgagcccagaagatcttgatatacccggacacgccagcaaagacaggtacaagaccatcctgcccaacccacagtcgcgtgtttgccttggtagggctcaaagccaagaggatggggactacatcaatgcgaactacatacgcggatatgacggcaaggagaaagtatacatcgccacccagggtcctatgccgaacacagtgtctgatttttgggagatggtgtggcaagaggaggtctcattaatcgtgatgctgacccagctgcgcgaaggtaaggaaaagtgtgtgcactactggcctaccgaggaagagacctacggcccattccagataaggatccaggacatgaaagagtgcccagaatataccgtccgacagctgaccatccaataccaggaagagcgccgttccgttaaacatatactatttagcgcatggcccgatcaccagacacctgaatccgccggtccgttattgaggctggtggctgaggtagaggagtcccccgaaacagctgcgcacccgggaccaatcgtcgtgcactgcagcgccggaattggtcgcactggatgtttcattgctacaagaatcggttgccagcaactgaaggcccgtggcgaggtggacatcctgggcatcgtctgtcagctccggctcgaccgtggcggaatgatacagactgcagagcaatatcagtttctgcaccacacactagctctgtacgccggtcagttgcccgaggagcccagcccctag

SEQ ID NO: 132494 - DNA, 2805 bp, Artificial Sequence
  derived and/or modified sequence
gccttctcagccctcaaagacagaccgacagacagacagacagctggcaagaggcagcctgggggccacagctgcttcagcagacctcatggctgagtgagcctcccctgggcccagcaccccacctcagcatggtccaagcccatggggggcgctccagagcacagccgttgaccttgtctttgggggcagccatgacccagcctccgcctgaaaaaacgccagccaagaagcatgtgcgactgcaggagaggcggggctccaatgtggctctgatgctggacgttcggtccctgggggccgtagaacccatctgctctgtgaacacaccccgggaggtcaccctacactttctgcgcactgctggacacccccttacccgctgggcccttcagcgccagccacccagccccaagcaactggaagaagaattcttgaagatcccttcaaactttgtcagccccgaagacctggacatccctggccacgcctccaaggaccgatacaagaccatcttgccaaatccccagagccgtgtctgtctaggccgggcacagagccaggaggacggagattacatcaatgccaactacatccgaggctatgacgggaaggagaaggtctacattgccacccagggccccatgcccaacactgtgtcggacttctgggagatggtgtggcaagaggaagtgtccctcattgtcatgctcactcagctccgagagggcaaggagaaatgtgtccactactggcccacagaagaggaaacctatggacccttccagatccgcatccaggacatgaaagagtgcccagaatacactgtgcggcagctcaccatccagtaccaggaagagcgccggtcagtaaagcacatcctcttttcggcctggccagaccatcagacaccagaatcagctgggcccctgctgcgcctagtggcagaggtggaggagagcccggagacagccgcccaccccgggcctatcgtagtccactgcagtgcagggattggccggacgggctgcttcatcgccacgcgaattggctgtcaacagctgaaagcccgaggagaagtggacattctgggtattgtgtgccaactgcggctagacagaggggggatgatccagacggcagagcagtaccagttcctgcaccacactttggccctgtatgcaggccagctgcctgaggaacccagcccctgacccctgccaccctccggtggcccaggtgcctacctccctcaagcctgggaaggtgggtctggggaaagtgggccgagtgatctgggggtaccccttgggttggtgtggggaaggagtgcctccttagtggtgcttgcagtcacaggaagcagcagcagtaaggacaaggggccggattccaggtcttcaacactggccactcctctgcttcctctgttggccccagatggacagtaaggggaacctccaatgtctctctgaacttaaagacaggagctggcatttatgacagacaaagaaagaagcccaggtgtcctggtgttctctgagacactctttgtgagcttcagtttcctgttctataacatgaacataagtgcttagctgccatgagggaaaagtaatgagagaagtttctagaagccactccagccactccttcctggggctgacaaaagggtgattccaagatcatccttcacccgaggtcctgcccaagcacaggccagatgcaagaatggggaaaagtctggtcctgatctccaagtctcaacatcctatcagtgactctgctccctgaccacacatcggaagggctggatgaccccaatcaaaagaaagaacaaggactctggttacccttgcctccacccatgtgtcataagagtaggctacagaggtgaccaggcctggcagttgaaatctctggaagagggaacatgtggggactactcagaggcaaagaggagctgctcctgcctccatggttgctggccactcccaccaactactcttagggaggctaagcagtctctgttttgcttccatggctcaaataataccctgggtatgcaggacccactataccttgcatttgctgagtacacctagagagcttggctgtttccaaaaacaatcagggtcataaccatccatgcagacatggaggctcggctgaaccaggactcctcactgtctacctgagagaatgagcacccctcatccatctcagcatcaacacaatttccaggggacctcaggtctacctcaggactgaacgccacacctcaggattcctcctccttgaatctgagactggctgcccattctgagatggggatgaaggtaagatgccgcatcaccaggcacgccgcccctgacagctgccttgataccagctctctgtggaaacccccgaggagttggatctggagaacagctgggcctcctcactcaggacttctctcctgaagaacacgcagtgctaaaactgaggatgatttccctaatgcttctgcttggccttatggaggagctgctccttccttacagccttggggatggacttgcccacacctccacctcccctgagccctgtgagaggcacgactgtctatgccaatgaggctcggtggggggctctcaagtgcctgatcctgccctgggctcagagccagcccagagggaagcaactgcacagccccacaggccctccctggcactgtccccccaaccccatctcagagctcagagggtacaagctccagaacagtaaccaagtgggaaaataaagacttcttggatgactgac

SEQ ID NO: 132495 - DNA, 3765 bp, Artificial Sequence
  derived and/or modified sequence
aaaaggaggcgtgcagcgagcatgaaccggctgggctgctggcccgcaaggagcctgccaaggtcaggcaggggcagtgggcagaggagtcttggacttgggggccacccttcaggtcccaggcatccaggcaccccagcagcgaagaggacatgggagtcccctggtgtgagggccagagactgtccactgtctgtaagtcttctaagtagatgtcagggttctgggaggaggcctgcagggggctgagggcccaggggaagcccctcggactccctcccacaagtggactctgctatctgcttcctgctgggctggcctacactcaggccgtgggctgtggagagctgggccgtggcacaggcgtggagacgacctttttggcctggccccggccctttccttcacattgtgaggcatggattcttgcttcttctttttccccaccccgagtctgtgccacatctgctctgggaagatgtggtctgtgcttggccatgaattcccaaggcttgaagcagcaagggctttgagggagagggccttgagggagagggccttgagggagagggctgtggggcagaagcagagaaggagaaataagcctccggccaaggtcaggttgagcaggagagccttgggttctttgtgggacagcacagagctgggggtcaggcgagctgtgcccagcaagtaggcagcggctggatgtgacaaagacccagaggagaaacacagaagaggggagagggtctggaagctggggaaagcaggatggtcgggaaggcctggcccctcacccattcccagggaacggggccttgggccccagaagggcacaggcgggaggcagccgacccctggtggcagcggcagcaggcacaggagggcagaatgcagctggggtgtgcgtgggtggcagcaaggaggggcggagggaggaagctggcttcctggagccttctcagccctcaaagacagaccgacagacagacagacagctggcaagaggcagcctgggggccacagctgcttcagcagacctcatggctgagtgagcctcccctgggcccagcaccccacctcagcatggtccaagcccatggggggcgctccagagcacagccgttgaccttgtctttgggggcagccatgacccagcctccgcctgaaaaaacgccagccaagaagcatgtgcgactgcaggagaggcggggctccaatgtggctctgatgctggacgttcggtccctgggggccgtagaacccatctgctctgtgaacacaccccgggaggtcaccctacactttctgcgcactgctggacacccccttacccgctgggcccttcagcgccagccacccagccccaagcaactggaagaagaattcttgaagatcccttcaaactttgtcagccccgaagacctggacatccctggccacgcctccaaggaccgatacaagaccatcttgccaaatccccagagccgtgtctgtctaggccgggcacagagccaggaggacggagattacatcaatgccaactacatccgaggctatgacgggaaggagaaggtctacattgccacccagggccccatgcccaacactgtgtcggacttctgggagatggtgtggcaagaggaagtgtccctcattgtcatgctcactcagctccgagagggcaaggagaaatgtgtccactactggcccacagaagaggaaacctatggacccttccagatccgcatccaggacatgaaagagtgcccagaatacactgtgcggcagctcaccatccagtaccaggaagagcgccggtcagtaaagcacatcctcttttcggcctggccagaccatcagacaccagaatcagctgggcccctgctgcgcctagtggcagaggtggaggagagcccggagacagccgcccaccccgggcctatcgtagtccactgcagtgcagggattggccggacgggctgcttcatcgccacgcgaattggctgtcaacagctgaaagcccgaggagaagtggacattctgggtattgtgtgccaactgcggctagacagaggggggatgatccagacggcagagcagtaccagttcctgcaccacactttggccctgtatgcaggccagctgcctgaggaacccagcccctgacccctgccaccctccggtggcccaggtgcctacctccctcaagcctgggaaggtgggtctggggaaagtgggccgagtgatctgggggtaccccttgggttggtgtggggaaggagtgcctccttagtggtgcttgcagtcacaggaagcagcagcagtaaggacaaggggccggattccaggtcttcaacactggccactcctctgcttcctctgttggccccagatggacagtaaggggaacctccaatgtctctctgaacttaaagacaggagctggcatttatgacagacaaagaaagaagcccaggtgtcctggtgttctctgagacactctttgtgagcttcagtttcctgttctataacatgaacataagtgcttagctgccatgagggaaaagtaatgagagaagtttctagaagccactccagccactccttcctggggctgacaaaagggtgattccaagatcatccttcacccgaggtcctgcccaagcacaggccagatgcaagaatggggaaaagtctggtcctgatctccaagtctcaacatcctatcagtgactctgctccctgaccacacatcggaagggctggatgaccccaatcaaaagaaagaacaaggactctggttacccttgcctccacccatgtgtcataagagtaggctacagaggtgaccaggcctggcagttgaaatctctggaagagggaacatgtggggactactcagaggcaaagaggagctgctcctgcctccatggttgctggccactcccaccaactactcttagggaggctaagcagtctctgttttgcttccatggctcaaataataccctgggtatgcaggacccactataccttgcatttgctgagtacacctagagagcttggctgtttccaaaaacaatcagggtcataaccatccatgcagacatggaggctcggctgaaccaggactcctcactgtctacctgagagaatgagcacccctcatccatctcagcatcaacacaatttccaggggacctcaggtctacctcaggactgaacgccacacctcaggattcctcctccttgaatctgagactggctgcccattctgagatggggatgaaggtaagatgccgcatcaccaggcacgccgcccctgacagctgccttgataccagctctctgtggaaacccccgaggagttggatctggagaacagctgggcctcctcactcaggacttctctcctgaagaacacgcagtgctaaaactgaggatgatttccctaatgcttctgcttggccttatggaggagctgctccttccttacagccttggggatggacttgcccacacctccacctcccctgagccctgtgagaggcacgactgtctatgccaatgaggctcggtggggggctctcaagtgcctgatcctgccctgggctcagagccagcccagagggaagcaactgcacagccccacaggccctccctggcactgtccccccaaccccatctcagagctcagagggtacaagctccagaacagtaaccaagtgggaaaataaagacttcttggatgactgactc

SEQ ID NO: 132496 - DNA, 2689 bp, Artificial Sequence
  derived and/or modified sequence
agacagacagacagctggcaagaggcagcctgggggccacagctgcttcagcagacctcatggctgagtgagcctcccctgggcccagcaccccacctcagcatggtccaagcccatggggggcgctccagagcacagccgttgaccttgtctttgggggcagccatgacccagcctccgcctgaaaaaacgccagccaagaagcatgtgcgactgcaggagaggcggggctccaatgtggctctgatgctggacgttcggtccctgggggccgtagaacccatctgctctgtgaacacaccccgggaggtcaccctacactttctgcgcactgctggacacccccttacccgctgggcccttcagcgccagccacccagccccaagcaactggaagaagaattcttgaagatcccttcaaactttgtcagccccgaagacctggacatccctggccacgcctccaaggaccgatacaagaccatcttgccaaatccccagagccgtgtctgtctaggccgggcacagagccaggaggacggagattacatcaatgccaactacatccgaggctatgacgggaaggagaaggtctacattgccacccagggccccatgcccaacactgtgtcggacttctgggagatggtgtggcaagaggaagtgtccctcattgtcatgctcactcagctccgagagggcaaggagaaatgtgtccactactggcccacagaagaggaaacctatggacccttccagatccgcatccaggacatgaaagagtgcccagaatacactgtgcggcagctcaccatccagtaccaggaagagcgccggtcagtaaagcacatcctcttttcggcctggccagaccatcagacaccagaatcagctgggcccctgctgcgcctagtggcagaggtggaggagagcccggagacagccgcccaccccgggcctatcgtagtccactgcagtgcagggattggccggacgggctgcttcatcgccacgcgaattggctgtcaacagctgaaagcccgaggagaagtggacattctgggtattgtgtgccaactgcggctagacagaggggggatgatccagacggcagagcagtaccagttcctgcaccacactttggccctgtatgcaggccagctgcctgaggaacccagcccctgacccctgccaccctccggtggcccaggtgcctacctccctcaagcctgggaagtcacaggaagcagcagcagtaaggacaaggggccggattccaggtcttcaacactggccactcctctgcttcctctgttggccccagatggacagtaaggggaacctccaatgtctctctgaacttaaagacaggagctggcatttatgacagacaaagaaagaagcccaggtgtcctggtgttctctgagacactctttgtgagcttcagtttcctgttctataacatgaacataagtgcttagctgccatgagggaaaagtaatgagagaagtttctagaagccactccagccactccttcctggggctgacaaaagggtgattccaagatcatccttcacccgaggtcctgcccaagcacaggccagatgcaagaatggggaaaagtctggtcctgatctccaagtctcaacatcctatcagtgactctgctccctgaccacacatcggaagggctggatgaccccaatcaaaagaaagaacaaggactctggttacccttgcctccacccatgtgtcataagagtaggctacagaggtgaccaggcctggcagttgaaatctctggaagagggaacatgtggggactactcagaggcaaagaggagctgctcctgcctccatggttgctggccactcccaccaactactcttagggaggctaagcagtctctgttttgcttccatggctcaaataataccctgggtatgcaggacccactataccttgcatttgctgagtacacctagagagcttggctgtttccaaaaacaatcagggtcataaccatccatgcagacatggaggctcggctgaaccaggactcctcactgtctacctgagagaatgagcacccctcatccatctcagcatcaacacaatttccaggggacctcaggtctacctcaggactgaacgccacacctcaggattcctcctccttgaatctgagactggctgcccattctgagatggggatgaaggtaagatgccgcatcaccaggcacgccgcccctgacagctgccttgataccagctctctgtggaaacccccgaggagttggatctggagaacagctgggcctcctcactcaggacttctctcctgaagaacacgcagtgctaaaactgaggatgatttccctaatgcttctgcttggccttatggaggagctgctccttccttacagccttggggatggacttgcccacacctccacctcccctgagccctgtgagaggcacgactgtctatgccaatgaggctcggtggggggctctcaagtgcctgatcctgccctgggctcagagccagcccagagggaagcaactgcacagccccacaggccctccctggcactgtccccccaaccccatctcagagctcagagggtacaagctccagaacagtaaccaagtgggaaaataaagacttcttggatgactgac

SEQ ID NO: 132497 - DNA, 1398 bp, Artificial Sequence
  derived and/or modified sequence
atggtgggcaaggcctggcccctgacccacagccagggcaccggcccctgggcccccgagggccacagaagagaggccgccgacccctggtggcagagacagcaggcccaggagggcagaatgcagctgggctgcgcctgggtggccgccagaagaggcggcggcagaaagctggccagctggagcctgctgagcccccagagacagaccgacagacagaccgacagctggcaggaggccgcctggggcccccagctgctgcagcagaccagctggctgagcgagccccccctgggccccgccccccacctgagcatggtgcaggcccacggcggcagaagcagagcccagcccctgaccctgagcctgggcgccgccatgacccagcccccccccgagaagacccccgccaagaagcacgtgagactgcaggagagaagaggcagcaacgtggccctgatgctggacgtgagaagcctgggcgccgtggagcccatctgcagcgtgaacacccccagagaggtgaccctgcacttcctgagaaccgccggccaccccctgaccagatgggccctgcagagacagccccccagccccaagcagctggaggaggagttcctgaagatccccagcaacttcgtgagccccgaggacctggacatccccggccacgccagcaaggacagatacaagaccatcctgcccaacccccagagcagagtgtgcctgggcagagcccagagccaggaggacggcgactacatcaacgccaactacatcagaggctacgacggcaaggagaaggtgtacatcgccacccagggccccatgcccaacaccgtgagcgacttctgggagatggtgtggcaggaggaggtgagcctgatcgtgatgctgacccagctgagagagggcaaggagaagtgcgtgcactactggcccaccgaggaggagacctacggccccttccagatcagaatccaggacatgaaggagtgccccgagtacaccgtgagacagctgaccatccagtaccaggaggagagaagaagcgtgaagcacatcctgttcagcgcctggcccgaccaccagacccccgagagcgccggccccctgctgagactggtggccgaggtggaggagagccccgagaccgccgcccaccccggccccatcgtggtgcactgcagcgccggcatcggcagaaccggctgcttcatcgccaccagaatcggctgccagcagctgaaggccagaggcgaggtggacatcctgggcatcgtgtgccagctgagactggacagaggcggcatgatccagaccgccgagcagtaccagttcctgcaccacaccctggccctgtacgccggccagctgcccgaggagcccagcccctag

SEQ ID NO: 132498 - protein, 593 aa, Artificial Sequence
  derived and/or modified sequence
MEPATAPRPDMAPELTPEEEQATKQFLEEINKWTVQYNVSPLSWNVAVKFLMARKFDVLRAIELFHSYRETRRKEGIVKLKPHEEPLRSEILSGKFTILNVRDPTGASIALFTARLHHPHKSVQHVVLQALFYLLDRAVDSFETQRNGLVFIYDMCGSNYANFELDLGKKVLNLLKGAFPARLKKVLIVGAPIWFRVPYSIISLLLKDKVRERIQILKTSEVTQHLPRECLPENLGGYVKIDLATWNFQFLPQVNGHPDPFDEIILFSLPPALDWDSVHVPGPHAMTIQELVDYVNARQKQGIYEEYEDIRRENPVGTFHCSMSPGNLEKNRYGDVPCLDQTRVKLTKRSGHTQTDYINASFMDGYKQKNAYIGTQGPLENTYRDFWLMVWEQKVLVIVMTTRFEEGGRRKCGQYWPLEKDSRIRFGFLTVTNLGVENMNHYKKTTLEIHNTEERQKRQVTHFQFLSWPDYGVPSSAASLIDFLRVVRNQQSLAVSNMGARSKGQCPEPPIVVHCSAGIGRTGTFCSLDICLAQLEELGTLNVFQTVSRMRTQRAFSIQTPEQYYFCYKAILEFAEKEGMVSSGQNLLAVESQ

SEQ ID NO: 132499 - protein, 583 aa, Artificial Sequence
  derived and/or modified sequence
MAPELTPEEEQATKQFLEEINKWTVQYNVSPLSWNVAVKFLMARKFDVLRAIELFHSYRETRRKEGIVKLKPHEEPLRSEILSGKFTILNVRDPTGASIALFTARLHHPHKSVQHVVLQALFYLLDRAVDSFETQRNGLVFIYDMCGSNYANFELDLGKKVLNLLKGAFPARLKKVLIVGAPIWFRVPYSIISLLLKDKVRERIQILKTSEVTQHLPRECLPENLGGYVKIDLATWNFQFLPQVNGHPDPFDEIILFSLPPALDWDSVHVPGPHAMTIQELVDYVNARQKQGIYEEYEDIRRENPVGTFHCSMSPGNLEKNRYGDVPCLDQTRVKLTKRSGHTQTDYINASFMDGYKQKNAYIGTQGPLENTYRDFWLMVWEQKVLVIVMTTRFEEGGRRKCGQYWPLEKDSRIRFGFLTVTNLGVENMNHYKKTTLEIHNTEERQKRQVTHFQFLSWPDYGVPSSAASLIDFLRVVRNQQSLAVSNMGARSKGQCPEPPIVVHCSAGIGRTGTFCSLDICLAQLEELGTLNVFQTVSRMRTQRAFSIQTPEQYYFCYKAILEFAEKEGMVSSGQNLLAVESQ

SEQ ID NO: 132500 - DNA, 1752 bp, Artificial Sequence
  derived and/or modified sequence
atggcccccgagctgacccccgaggaggagcaggccaccaagcagttcctggaggagatcaacaagtggaccgtgcagtacaacgtgagccccctgagctggaacgtggccgtgaagttcctgatggccagaaagttcgacgtgctgagagccatcgagctgttccacagctacagagagaccagaagaaaggagggcatcgtgaagctgaagccccacgaggagcccctgagaagcgagatcctgagcggcaagttcaccatcctgaacgtgagagaccccaccggcgccagcatcgccctgttcaccgccagactgcaccacccccacaagagcgtgcagcacgtggtgctgcaggccctgttctacctgctggacagagccgtggacagcttcgagacccagagaaacggcctggtgttcatctacgacatgtgcggcagcaactacgccaacttcgagctggacctgggcaagaaggtgctgaacctgctgaagggcgccttccccgccagactgaagaaggtgctgatcgtgggcgcccccatctggttcagagtgccctacagcatcatcagcctgctgctgaaggacaaggtgagagagagaatccagatcctgaagaccagcgaggtgacccagcacctgcccagagagtgcctgcccgagaacctgggcggctacgtgaagatcgacctggccacctggaacttccagttcctgccccaggtgaacggccaccccgaccccttcgacgagatcatcctgttcagcctgccccccgccctggactgggacagcgtgcacgtgcccggcccccacgccatgaccatccaggagctggtggactacgtgaacgccagacagaagcagggcatctacgaggagtacgaggacatcagaagagagaaccccgtgggcaccttccactgcagcatgagccccggcaacctggagaagaacagatacggcgacgtgccctgcctggaccagaccagagtgaagctgaccaagagaagcggccacacccagaccgactacatcaacgccagcttcatggacggctacaagcagaagaacgcctacatcggcacccagggccccctggagaacacctacagagacttctggctgatggtgtgggagcagaaggtgctggtgatcgtgatgaccaccagattcgaggagggcggcagaagaaagtgcggccagtactggcccctggagaaggacagcagaatcagattcggcttcctgaccgtgaccaacctgggcgtggagaacatgaaccactacaagaagaccaccctggagatccacaacaccgaggagagacagaagagacaggtgacccacttccagttcctgagctggcccgactacggcgtgcccagcagcgccgccagcctgatcgacttcctgagagtggtgagaaaccagcagagcctggccgtgagcaacatgggcgccagaagcaagggccagtgccccgagccccccatcgtggtgcactgcagcgccggcatcggcagaaccggcaccttctgcagcctggacatctgcctggcccagctggaggagctgggcaccctgaacgtgttccagaccgtgagcagaatgagaacccagagagccttcagcatccagacccccgagcagtactacttctgctacaaggccatcctggagttcgccgagaaggagggcatggtgagcagcggccagaacctgctggccgtggagagccagtag

SEQ ID NO: 132501 - DNA, 1782 bp, Artificial Sequence
  derived and/or modified sequence
atggaacctgcgactgccccacgtccagacatggcacctgagctcacccctgaggaagagcaggctactaagcagttcttggaggaaattaacaagtggaccgtacaatataacgtgtcaccactctcttggaacgtcgccgtcaagtttctgatggcccgtaaattcgacgtgctgcgggcgattgagctcttccattcctacagggaaacccgacggaaagaggggatcgtcaaacttaaacctcatgaagaacccctcaggagcgagatcctgtctggaaaattcaccattttgaacgtgagagacccaactggagctagcatagctctgtttacagccaggctacaccatcctcataagagcgtgcaacacgtggtgctgcaggcgctgttctacctgctggatagggccgttgactctttcgagacccagcgcaatggccttgtgttcatttacgatatgtgcgggtcaaactatgccaattttgaactggacttgggaaaaaaagtcctcaatcttctcaaaggcgcttttccggcccgtctcaagaaagttctaatagtcggcgctcccatttggtttagggtgccgtactcgatcattagcctgctcctcaaagataaggtccgtgaacgtatacagatcctgaagacctccgaggtcacccagcacctgccccgagaatgcctccctgaaaacctgggaggatacgtgaaaatcgaccttgccacatggaatttccaatttctccctcaagtcaatgggcatcctgatccgtttgacgagatcatactcttttccttaccgcctgccctggactgggattcagttcatgtgcccggtcctcacgcgatgaccatccaggaactggtcgattacgtgaatgctcgccagaagcagggtatctatgaggagtacgaggatattaggagggagaatcccgtcggtacttttcactgctcgatgtcccccggcaatctcgagaaaaatcggtacggggacgtgccatgcttggaccagactcgggtgaaacttaccaaacgcagcggccacacccaaactgattatataaacgcttctttcatggatgggtataagcagaagaatgcgtatattggtactcaaggccctctcgagaacacatatagagacttctggctgatggtgtgggagcagaaggttctggttatagtcatgactactcgctttgaggaggggggcagacggaagtgcggccagtattggcctctcgaaaaggatagccgcattagatttggatttctgactgtcacgaacctgggcgtcgagaatatgaatcattacaaaaaaaccaccctagagatacacaataccgaagaaagacagaagcgtcaggtgacccacttccagttcctgtcgtggccagattatggcgttccgtcaagcgcggccagtctcatagactttttacgggtggtgaggaaccagcagtctttggccgtatccaacatgggcgctcgctctaaaggacagtgtcccgaaccccctatcgtggtgcattgttcagcgggaattggtcggacagggacattttgctccctggatatttgcctggcccagcttgaggaattggggactctcaatgtgttccagacagtttctagaatgcgaacccagcgggccttctcaattcaaacccccgagcaatattacttttgttacaaggcaattctggagttcgcggagaaggagggcatggtgagctcaggccaaaatctcctggcagtggagtctcaatag

SEQ ID NO: 132502 - DNA, 1752 bp, Artificial Sequence
  derived and/or modified sequence
atggcacccgaattgacccccgaagaagagcaggccaccaaacagtttctcgaggagattaacaagtggactgtacagtacaacgtctcccctctgagttggaacgtggccgtgaaattcttaatggctcgcaaatttgatgtgctgcgggctatagagctgttccacagctatcgggagactaggcgcaaggaggggatcgttaagctgaaacctcatgaagagcctctgcgcagcgaaatcctcagtggtaaatttacaattctgaacgtaagagatccaacaggggcgagcatcgcattgtttaccgcccggttgcaccaccctcacaagtcagttcagcatgtggtactccaggccctattttacctgctcgaccgcgccgtggactcattcgagacccagcgcaacggacttgtgtttatttatgacatgtgcggttcaaattacgcgaatttcgaactggacttaggaaaaaaagtactcaacctcctgaaaggggcttttcccgcgaggttgaaaaaggtactcatagtcggagcgcccatttggttccgagtgccctactccatcatctccctgctgctgaaggataaagtgagggaacgtatccagatacttaaaactagtgaagttactcagcacctgccacgggagtgcctgccggagaatttggggggctatgtgaagatcgacctggccacctggaactttcagttcctgccgcaggttaacggccatccagatccattcgacgaaattatcctgttttctcttcccccggccctggattgggactcggttcatgttcctggtccccatgctatgactattcaggagttagtggattacgtgaacgccaggcaaaagcagggcatctatgaagaatacgaagacatacgacgcgagaatcctgtgggcacctttcactgctcgatgagcccaggaaatctcgagaagaaccgctacggtgacgtgccatgtctcgaccagacccgggtaaaattaacaaaacggagtggccacactcaaacagactacattaacgcttcgttcatggatggatacaaacagaagaatgcatatataggcacacagggaccactcgagaacacttatcgcgacttttggctcatggtatgggagcagaaggtgctcgtgattgtcatgactacgcggttcgaggagggggggcgaagaaagtgtggacagtattggccgttggagaaagatagcagaattcgtttcggtttcctgacagtgacaaatcttggagtcgagaacatgaaccactacaaaaagacgaccctggagattcataacacggaagagaggcagaagcgacaggtgactcacttccaattcctgtcctggccagactacggtgtgccctcgtccgcagcatcactaatagatttcctgagagtcgttcggaaccagcagagcctggcagtgtctaatatgggggcgcgaagtaaaggtcagtgcccagagcctcccatagtggtccattgttctgcagggatcggacgcaccggcactttttgttcccttgacatctgcctggcccagttagaggagctgggcactcttaacgtgttccagacagtcagccgcatgaggacccagagggctttttcaatacagactcccgagcaatactatttctgttacaaagcgattctggaatttgctgaaaaagaagggatggtgtcttccgggcagaaccttttagccgtggaatctcagtag

SEQ ID NO: 132503 - DNA, 1782 bp, Artificial Sequence
  derived and/or modified sequence
atggagcccgccacagcccccaggccagacatggcccctgagctgaccccagaggaggagcaggccaccaagcagttcctggaggagatcaacaagtggacagtgcagtacaacgtgagccccctgtcctggaatgtggccgtgaagttcctgatggccaggaagtttgatgtgctgcgggccatcgagctgttccacagctaccgggagaccaggaggaaggagggcatcgtgaagctgaagccccatgaggagcccctgcggtctgagatcctgagcggcaagttcaccatcctgaatgtgcgggaccccactggagccagcatcgccctcttcaccgcccggctgcaccacccccacaagtctgtgcagcacgtggtgctgcaggccctcttctacctgctggacagagctgtggacagctttgagacccagagaaatggcctggtgttcatctatgacatgtgtggcagcaactatgccaactttgagctggacctgggcaagaaggtgctgaacctgctgaagggggccttccctgcccggctgaagaaggtgctgattgtgggcgcccccatctggttccgggtgccctacagcatcatcagcctgctgctgaaggacaaggtgcgggagcgcatccagatcctgaagaccagcgaggtgacccagcacctgcccagagaatgtctgcctgagaacctgggcggctacgtgaagattgacctggccacctggaacttccagttcctgccccaggtgaatggccacccagacccctttgatgagatcatcctcttcagcctgcccccagccctggactgggacagcgtgcacgtgcccggcccccacgccatgaccatccaggagctggtggactatgtgaatgcccggcagaagcagggcatctatgaggagtatgaggacatcagaagagaaaatcctgtgggcaccttccactgcagcatgagccctggcaacctggagaagaacagatatggagatgtgccctgcctggaccagaccagggtgaagctgaccaagaggagcggccacacccagacagactacatcaatgccagcttcatggatggctacaagcagaagaatgcctacatcggcacccagggccccctggagaacacctacagagacttctggctgatggtgtgggagcagaaggtgctggtgattgtgatgaccaccaggtttgaggagggcggcagaagaaaatgtggccagtactggcccctggagaaggacagccgcatccgcttcggcttcctgactgtgaccaacctgggcgtggagaacatgaaccactacaagaagaccaccctggagatccacaacacagaggagcggcagaagaggcaggtgacccacttccagttcctgtcctggccagactatggagtgcccagcagcgctgccagcctgattgacttcctgcgggtggtgaggaaccagcagagcctggccgtgagcaacatgggcgcccggagcaagggccagtgcccagagccccccatcgtggtgcactgcagcgctggcattggaagaacaggcaccttctgcagcctggacatctgcctggcccagctggaggagctgggcaccctgaatgtgttccagacagtgtccaggatgaggacccagagggccttcagcatccagaccccagagcagtactacttctgctacaaggccatcctggagtttgctgagaaggagggcatggtgagcagcggccagaacctgctggccgtggagagccagtag

SEQ ID NO: 132504 - DNA, 1752 bp, Artificial Sequence
  derived and/or modified sequence
atggcccctgagctgaccccagaggaggagcaggccaccaagcagttcctggaggagatcaacaagtggacagtgcagtacaacgtgagccccctgtcctggaatgtggccgtgaagttcctgatggccaggaagtttgatgtgctgcgggccatcgagctgttccacagctaccgggagaccaggaggaaggagggcatcgtgaagctgaagccccatgaggagcccctgcggtctgagatcctgagcggcaagttcaccatcctgaatgtgcgggaccccactggagccagcatcgccctcttcaccgcccggctgcaccacccccacaagtctgtgcagcacgtggtgctgcaggccctcttctacctgctggacagagctgtggacagctttgagacccagagaaatggcctggtgttcatctatgacatgtgtggcagcaactatgccaactttgagctggacctgggcaagaaggtgctgaacctgctgaagggggccttccctgcccggctgaagaaggtgctgattgtgggcgcccccatctggttccgggtgccctacagcatcatcagcctgctgctgaaggacaaggtgcgggagcgcatccagatcctgaagaccagcgaggtgacccagcacctgcccagagaatgtctgcctgagaacctgggcggctacgtgaagattgacctggccacctggaacttccagttcctgccccaggtgaatggccacccagacccctttgatgagatcatcctcttcagcctgcccccagccctggactgggacagcgtgcacgtgcccggcccccacgccatgaccatccaggagctggtggactatgtgaatgcccggcagaagcagggcatctatgaggagtatgaggacatcagaagagaaaatcctgtgggcaccttccactgcagcatgagccctggcaacctggagaagaacagatatggagatgtgccctgcctggaccagaccagggtgaagctgaccaagaggagcggccacacccagacagactacatcaatgccagcttcatggatggctacaagcagaagaatgcctacatcggcacccagggccccctggagaacacctacagagacttctggctgatggtgtgggagcagaaggtgctggtgattgtgatgaccaccaggtttgaggagggcggcagaagaaaatgtggccagtactggcccctggagaaggacagccgcatccgcttcggcttcctgactgtgaccaacctgggcgtggagaacatgaaccactacaagaagaccaccctggagatccacaacacagaggagcggcagaagaggcaggtgacccacttccagttcctgtcctggccagactatggagtgcccagcagcgctgccagcctgattgacttcctgcgggtggtgaggaaccagcagagcctggccgtgagcaacatgggcgcccggagcaagggccagtgcccagagccccccatcgtggtgcactgcagcgctggcattggaagaacaggcaccttctgcagcctggacatctgcctggcccagctggaggagctgggcaccctgaatgtgttccagacagtgtccaggatgaggacccagagggccttcagcatccagaccccagagcagtactacttctgctacaaggccatcctggagtttgctgagaaggagggcatggtgagcagcggccagaacctgctggccgtggagagccagtag

SEQ ID NO: 132505 - DNA, 1782 bp, Artificial Sequence
  derived and/or modified sequence
atggagcccgccaccgccccccggcccgacatggcccccgagctgacacccgaggaagaacaggctacgaagcagtttctcgaggagatcaataaatggacagtgcagtacaatgtcagtcctctatcgtggaacgtggcagtgaagtttctaatggcgcggaaatttgacgtgctgagggcaatcgaactgtttcatagctatcgggagactcggcgcaaagagggtatcgtcaagttgaagccccatgaagagcctctgaggtcagagatcctgtcaggaaagtttacaatcttgaatgtgagggaccccactggtgcttcaatagccctctttacagcccgattgcaccatccacacaagtccgtgcagcatgtggtacttcaggccttgttctacttgctggaccgagccgtagactccttcgagacgcaacgcaacgggttggtgttcatctatgacatgtgtggctctaattacgctaatttcgaactcgatctgggcaagaaggtgctgaacctgctgaagggagccttccccgctcggctcaagaaggtgctaatcgttggggcacccatctggtttcgcgtcccgtacagcatcataagcttacttctgaaggacaaagtgagagaacgaattcagattctgaaaaccagcgaagtcacccaacacctccccagagaatgtctgcccgaaaaccttggaggctacgtgaagatcgatctcgctacttggaattttcagttcctgccccaagttaacggacacccagaccccttcgacgagattatcctgttttccctgcctcccgcactggattgggactccgttcacgtccctggcccccacgccatgaccatccaggagttggtagactacgttaacgcaaggcaaaagcagggaatttacgaagaatacgaagatatacgacgcgaaaatccggttggcaccttccactgctctatgagtcccggcaacctagagaagaaccgctacggcgacgtcccttgtctcgaccagactagagtgaagcttaccaagaggagtggccacactcaaactgattatatcaatgcttctttcatggatggatacaagcagaagaacgcctacataggcacacaggggccactggagaacacttacagagacttctggctgatggtgtgggaacaaaaggtgctcgtgattgtgatgaccacgaggtttgaggaaggaggccggcggaagtgtggacagtattggcctctcgaaaaagactcgcgcatcagatttggcttcctgaccgtcaccaatctgggcgtcgaaaatatgaaccactacaaaaagacaaccctagaaatccataacacagaagaaagacagaaaagacaggtcacacactttcagtttttgagctggcccgattatggcgttccatcatccgctgcaagtctgatcgactttctcagggtcgtgagaaatcagcagagcctggcagtgagtaacatgggtgctagaagtaagggacagtgcccagaaccccccatagtcgtccattgctcagctggaattggtaggacgggtacattctgctcgttggacatatgcctggcccagttggaagagctcggcaccctgaatgtctttcaaacggttagtcggatgagaacacagcgggcatttagcatacagactcccgaacagtactacttttgctacaaagcaatcctcgagtttgccgagaaggaaggcatggtgtccagcgggcagaatctcctagcagtagaaagccagtag

SEQ ID NO: 132506 - DNA, 1752 bp, Artificial Sequence
  derived and/or modified sequence
atggcccccgagctgacccccgaggaggagcaggccaccaagcagttcctagaggagataaacaagtggacagtgcagtataacgtctcacctttgtcgtggaatgtcgccgtgaagttcctcatggcacgtaagtttgacgtactgagggctattgaactctttcacagttacagagaaacccgacggaaggagggcattgtgaagctgaaaccccacgaagagcccctccgcagtgagatattgtcaggcaagtttacaatcctgaatgtccgtgacccaacaggggccagcatagccctctttacagccagactgcatcatcctcataagtctgtgcaacatgttgttctccaagccctattttatctactagacagagccgttgacagcttcgagactcaaaggaacgggctggtattcatttacgacatgtgtggatccaactacgcaaactttgagctcgacctcggtaagaaggtactcaacctgctgaaaggggctttccccgcccgcctgaaaaaggtactgatcgttggcgcaccaatttggtttcgagtgccttactccattatatcattgctgttgaaggacaaagttagagaacggatccagattctgaagacttcagaggtcacacagcatctgccacgggagtgccttcccgagaacctcggaggatacgtcaagatcgaccttgccacctggaatttccagttcctaccccaggtgaacgggcatccagatccctttgatgaaatcatattgtttagcctgcctccagcactcgactgggactcagtgcacgtgccggggccccacgcgatgactattcaggagcttgtggattatgtgaatgcccgccagaagcagggaatatatgaagagtatgaagacatcagacgggagaaccctgtaggcaccttccactgttcaatgtccccaggcaacctggaaaaaaatagatatggggacgtgccttgtctggatcagacgagggtcaagttaaccaagaggagcgggcacacacagaccgattacattaatgcatcttttatggacggctacaaacagaaaaatgcttacatcggcacacagggccctcttgagaatacgtatagggatttttggctgatggtatgggaacaaaaggtgcttgtgatagtgatgaccaccagattcgaggaaggcgggcgccggaaatgcggacagtattggcctctcgagaaggactcacgaattcggttcggatttctgactgttacaaatctcggtgtggaaaatatgaaccattacaagaaaacaaccctcgagatccacaatacagaagagcggcagaagcgccaggtgacgcattttcagtttctaagttggcctgattacggggtccctagcagcgcagcctctcttatcgactttctccgtgtggttcggaatcagcagagcctcgcagtgtcaaacatgggtgcgcggtccaagggccaatgccctgagccaccaatcgtagtgcattgcagcgcaggaattggtcggaccggaacgttctgctctctagacatctgcctggcccaactggaagagctaggcacactgaatgtatttcagaccgtttcaaggatgcgcacgcagagggcttttagtattcagaccccagaacagtattatttctgttataaagccatattggagtttgccgagaaagaggggatggtgtcatctggacagaacctcctggctgttgaatctcagtag

SEQ ID NO: 132507 - DNA, 1782 bp, Artificial Sequence
  derived and/or modified sequence
atggagcccgctactgcgcctcggccagatatggctcctgaactgacaccagaagaagagcaggctactaagcagtttctcgaagaaataaacaaatggaccgtgcagtacaatgttagtcccctcagctggaatgttgcagtaaagtttctaatggcaaggaagttcgatgtgctaagggccatcgagctgttccactcctatagagaaaccaggcgcaaggagggtattgtgaaactcaagccccacgaagaaccgttacgcagcgagatcttgtcagggaagtttaccatcctaaacgtccgcgaccctaccggggctagtatagctctgtttactgccaggctccaccacccacacaagtccgtgcaacatgtagtcctacaggcactcttctacctgctggatcgtgcagtggattcgttcgaaacacaaagaaacggcctggtctttatctatgacatgtgtggcagcaattacgccaacttcgagcttgacctgggaaagaaagtgttaaacctactgaaaggcgcttttcccgctcgcctcaagaaagtgctgattgtcggcgctccgatctggttcagggtcccatattcaattatctctcttctcctcaaggataaagtgagggaaaggattcagatcctgaaaaccagcgaggtgacacagcacttgcccagagaatgccttccagaaaacctaggcggatatgtcaaaatcgacctggccacttggaatttccagttccttccacaggtgaacggacaccccgatccctttgacgagattatcctattcagccttcctcccgctctggactgggacagtgtgcatgtgcctggtccccatgctatgaccatccaggagctggtcgattatgtgaacgcacgccagaagcaaggcatctacgaggagtatgaggacatccggagggagaaccccgtggggaccttccactgttctatgtctcctggcaacctggagaaaaatcgctatggcgatgttccatgtctggaccagacaagagttaaactgactaagcgctctggacatacccagacagattacataaatgcttcatttatggacgggtataagcaaaaaaacgcttatatcgggacccagggccctctcgaaaacacctaccgcgatttttggttgatggtttgggagcagaaggtcctagtgatcgtgatgaccactagattcgaagaaggaggcagaagaaagtgcggacagtactggcccttggaaaaggattcacgcataaggtttgggtttctgactgtgactaatctcggggtagagaatatgaaccattataaaaaaaccacacttgaaatacacaacaccgaggagagacaaaagaggcaggtcacccattttcaatttctatcctggcctgattacggggtcccaagtagcgccgcatcactgattgattttctaagagtcgttcgaaaccagcagtccctcgcagtgtcgaacatgggtgcacgcagtaaagggcagtgccccgaaccccctatcgttgtgcattgtagcgcaggcatcggaaggacggggactttttgctcattggatatctgcctggcacaactcgaggaactgggaaccctgaatgtcttccaaacagttagccgaatgagaactcagagagctttttcaattcagacccctgaacagtattatttctgttacaaggctatcctggaatttgctgagaaagaaggaatggtttccagcggccagaatctcttggcagtcgaatcccagtag

SEQ ID NO: 132508 - DNA, 1752 bp, Artificial Sequence
  derived and/or modified sequence
atggcccctgaactgacacccgaggaagagcaagcaacaaagcaattcctggaggagattaataagtggacggttcagtacaacgtgagcccactcagctggaatgtcgcggttaaattcttgatggctaggaaattcgatgtgctgcgggcaattgaactgttccactcctaccgagagacgcggaggaaggagggcattgtaaaactgaaaccccacgaggagccactcaggagtgagattttgtcaggtaaatttacgatactgaatgtgagagacccaaccggagcctcgatcgccttgtttactgccagactccatcaccctcataagagtgtgcagcatgttgtcctccaggccctgttttacctgctcgaccgggcagttgactctttcgaaacacaaaggaatgggttggtgtttatttacgacatgtgtggatccaattacgctaatttcgagctggatttgggtaagaaagtgctcaacctccttaagggagccttccccgctcgactaaaaaaggtcctcatagtgggggctcctatctggtttcgggtgccctacagcattatatccctgctgttaaaagacaaggtgcgcgaacgaatccaaatcctcaaaacctcggaggtgacacagcatttaccaagagagtgcttaccagaaaatctgggcggatacgtaaaaatcgatctggccacatggaattttcaatttcttccccaagttaacggccatcccgatcccttcgacgagatcattcttttttctctgccccctgcccttgactgggattctgtccacgtcccgggacctcatgcgatgactatccaggagctcgttgactatgtcaacgcgaggcagaagcaagggatctatgaggagtatgaagatattcgcagagaaaaccctgtgggaacatttcactgctccatgtcccccggtaatcttgaaaaaaatcgctatggcgacgttccatgcttagaccaaacccgagtaaagctgactaagcgctctgggcacacacagacagattatataaacgcatcctttatggacggctacaaacagaagaatgcttacatcgggactcagggccctcttgagaacacatatagagacttctggcttatggtttgggagcaaaaggtgctggtcatcgtaatgactacacgctttgaggagggcggtcgcaggaagtgcgggcagtactggcctctcgagaaggattcccgcatccggttcggctttctgaccgttaccaatctgggtgtggaaaacatgaatcactataagaagaccactctcgagatccataatacagaggagcgtcaaaaacggcaagttacccatttccagttcctttcatggccagactacggtgtgccttcatcagcggcttccttaatagactttctcagggtcgtaaggaaccaacagtcattagcggtttcaaacatgggtgccaggagtaaggggcaatgccccgaacccccaatcgtggtccattgcagcgccggtataggcagaactgggacattttgttctcttgacatttgtttggcgcagttggaagagcttgggaccctcaatgtgtttcagaccgtgtcaagaatgcgaacacagcgtgctttctccattcaaacacccgaacaatattatttttgctacaaggcgattctggaattcgctgaaaaggaggggatggtctcttccggccagaatttactagccgtcgaatctcagtag

SEQ ID NO: 132509 - DNA, 3862 bp, Artificial Sequence
  derived and/or modified sequence
agcctggctgaggcagccgcgcaggtcgcagggccagcgtccgcgaggacggcccggctgggcggccccgagctctgtggcgctgtggaggagcgggagcgcggccgaggaagcggggcgccgagggggtcggcggccttcgggaaatttccgccgacccttcgctcccggctctaaaagttcctgatttcctatttccttttaaatcccgagtggctgttagctcttcgcctgcactttttcttccccaggagataagggggagtgtgaggaacggagcgaataatataaaaaaggatttcctcccggaagagagcggcagttcggagagatttttcttaaggaagcagaagcggcgtttgcggccgctgcaggcgccgggccctgccggccacactatgcgcgagccggccccgggctgctgaggcgcggggacgcggaagcggaggccgagcgcgccggcccgacatggcgccggagctgaccccggaggaggagcaggctaccaagcagtttctcgaagagattaacaagtggacagttcagtacaatgtttccccgctgtcttggaatgtggctgtcaagttcctcatggcaaggaagtttgatgtgctccgtgccatagaattgttccactcctacagagaaactcgaaggaaggaaggcattgtaaagctgaaacctcatgaggaacctcttcgttctgagatcctcagtggaaaattcaccatcttaaatgttcgggacccaacaggagcctccattgccctctttactgccaggttgcatcatccccacaagtcagtccaacatgtggtacttcaggctctgttttacttgctagacagagctgtggatagctttgaaactcagaggaatggactggtgtttatctatgacatgtgtggttctaattatgccaactttgagctggatcttggcaagaaagtcctaaacctgctgaagggagcatttccagctcgtttgaagaaggtgctgattgtgggggcacccatatggttccgagtgccctattccatcatcagtctcctcctgaaggacaaagtccgggagaggattcaaatattaaagacatctgaggtcacgcagcatctgcccagggagtgtcttccagaaaacctgggtgggtacgtcaaaattgatctcgccacttggaatttccagttcctaccccaggtgaacggccacccagatcccttcgatgagatcatcctgttctccctccctcctgccttagactgggactcagtacatgttccaggtccccatgctatgaccatccaagagttggtggactatgttaatgccaggcaaaagcaaggaatctatgaggaatatgaagacattcgtcgtgagaaccctgttggcactttccactgttccatgtctccaggaaacctagagaaaaaccgttatggggatgtaccctgcctggaccaaactagagtgaagctaacaaagcgaagtggccatactcagacagattacatcaatgccagtttcatggatggctacaagcagaagaatgcttacattggcacacaaggtcctttggagaatacctatcgtgatttctggctcatggtatgggagcaaaaagtcttggtgattgtcatgaccacccgctttgaggaaggcggcaggagaaagtgtggccagtactggcctttagaaaaagactctcggatccgatttggcttcctcacagtgaccaatctaggcgtggagaacatgaatcattataagaaaacaacgctagaaattcacaacacagaggaacggcagaaacgccaggtgacccacttccagttcttgagctggccagactatggtgtcccttcctcagcagcttccctcattgacttcttgagagtggtcagaaaccagcagagtctggctgtgagcaacatgggagcacgctccaaagggcagtgccctgagccacccattgtggtccattgcagtgcaggcattggcaggacaggtaccttctgctcactggacatctgcctggcacagctggaggagcttggcacccttaatgtgttccagacggtgtcacgcatgaggacccagagggccttcagcatccagacccctgagcagtactatttttgctacaaggccatcctggagttcgcagagaaggagggcatggtatcctctggccaaaacctgctggccgtggagagtcagtaactctcctacgaacctcctacctgttggccagccttccttaaactaccctggacaccgctgagcctataggttgccatcagttacgctgaagccatggatcaacttctttcttgtgtctcccagcacacgtgtgcacgcaaggcagcctttccctttggctagataaatgtggtgaaattgccactagaaagggccagtagcaatgtgttcttaattcctagcatctgctatcaaactgtgccttattaaaaccaaattgtggctattgatttttgctagggtccccgaggtaagtggggaaggaacctccctcctcctttctcccgccattctttttctgaggtctcctgtctcccactccttccctttcctaggattttatggggaggtttgatgagcatttgcctttctccccagagagcttgaccaagttacatattctagagatcgtcctgagtgccaagcacgtttataagtagggcgtgtattccagtcctttctgtcattctgtgtgtgtgtgtgtgtgcacttatgtgtatgggtccatatgtacgtgtgtatataatatatattgtatgtgataatatgatcgtattctataaatacatatacacacgatactcctttccagaagttcctggggctccgtgttgcagttcaggactccttgcttcttggaccctactatttatcctggactagcttgggttggtgatcatgtctcctcttgtcaggctacagagtggtggaagaggacacacacacatctcctccatgttcctgccacagggccccttccttaagtaatgacttatctccttccagttgccacctgttggagccaagaatgtattagtttgtggtgacactgggttagctcagcatggatttcccttatccgatgatttttctacatttacttggccaatttggggaacagacctccactgtgattccatactctctctttgctttcactatcccagggatgggaggcggagggtagagatgaactcactgagcagccagagccaaatgcaatcggtacgaatcttagaaggaaggagggggagcccaggtatgagaaagaaaaaaccactaagaaaatacctccctgggaggatgagctggggccctttttcttttgctggatggttcctttatgcagcttggccctgtctaccgagatgcccatctcttcctgcctgctagcctgctagaccctcaaactgggtgggttctgtgtcaataaaaagcttcaccccctggctgagtgaggtggtcccctgcaatcactgtttgtcccctacccacccaacctgtccctgcctgctcccagcccactcatccttatgtgctagggataaatcaagagtcctcagcactccacattcccaaaaaatcccaggaactcctaaaccttcccctgtgacagaagatgaggttggcagctgatcagacctcaataattttatactgtaataagctctttgaatgtgtatattattattttttacaatcatttcattttgtatttaatatcaatggactgagtctgattcagaaaataattgtaatgttcatattcaatatcttacagtgatacagttttgtatttacatataaatataccgacatgatc

SEQ ID NO: 132510 - DNA, 3943 bp, Artificial Sequence
  derived and/or modified sequence
agcctggctgaggcagccgcgcaggtcgcagggccagcgtccgcgaggacggcccggctgggcggccccgagctctgtggcgctgtggaggagcgggagcgcggccgaggaagcggggcgccgagggggtcggcggccttcgggaaatttccgccgacccttcgctcccggctctaaaagttcctgatttcctatttccttttaaatcccgagtggctgttagctcttcgcctgcactttttcttccccaggagataagggggagtgtgaggaacggagcgaataatataaaaaaggatttcctcccggaagagagcggcagttcggagagatttttcttaaggaagcagaagcggcgtttgcggccgctgcaggcgccgggccctgccggccacactatgcgcgagccggccccgggctgctgaggcgcggggacgcggaagcggaggccgagcgcgccgggctcccgcgctcgcgagcgagttttgtccgcccggcggcggtggcggggggatggagcccgcgaccgcgccccggcccgacatggcgccggagctgaccccggaggaggagcaggctaccaagcagtttctcgaagagattaacaagtggacagttcagtacaatgtttccccgctgtcttggaatgtggctgtcaagttcctcatggcaaggaagtttgatgtgctccgtgccatagaattgttccactcctacagagaaactcgaaggaaggaaggcattgtaaagctgaaacctcatgaggaacctcttcgttctgagatcctcagtggaaaattcaccatcttaaatgttcgggacccaacaggagcctccattgccctctttactgccaggttgcatcatccccacaagtcagtccaacatgtggtacttcaggctctgttttacttgctagacagagctgtggatagctttgaaactcagaggaatggactggtgtttatctatgacatgtgtggttctaattatgccaactttgagctggatcttggcaagaaagtcctaaacctgctgaagggagcatttccagctcgtttgaagaaggtgctgattgtgggggcacccatatggttccgagtgccctattccatcatcagtctcctcctgaaggacaaagtccgggagaggattcaaatattaaagacatctgaggtcacgcagcatctgcccagggagtgtcttccagaaaacctgggtgggtacgtcaaaattgatctcgccacttggaatttccagttcctaccccaggtgaacggccacccagatcccttcgatgagatcatcctgttctccctccctcctgccttagactgggactcagtacatgttccaggtccccatgctatgaccatccaagagttggtggactatgttaatgccaggcaaaagcaaggaatctatgaggaatatgaagacattcgtcgtgagaaccctgttggcactttccactgttccatgtctccaggaaacctagagaaaaaccgttatggggatgtaccctgcctggaccaaactagagtgaagctaacaaagcgaagtggccatactcagacagattacatcaatgccagtttcatggatggctacaagcagaagaatgcttacattggcacacaaggtcctttggagaatacctatcgtgatttctggctcatggtatgggagcaaaaagtcttggtgattgtcatgaccacccgctttgaggaaggcggcaggagaaagtgtggccagtactggcctttagaaaaagactctcggatccgatttggcttcctcacagtgaccaatctaggcgtggagaacatgaatcattataagaaaacaacgctagaaattcacaacacagaggaacggcagaaacgccaggtgacccacttccagttcttgagctggccagactatggtgtcccttcctcagcagcttccctcattgacttcttgagagtggtcagaaaccagcagagtctggctgtgagcaacatgggagcacgctccaaagggcagtgccctgagccacccattgtggtccattgcagtgcaggcattggcaggacaggtaccttctgctcactggacatctgcctggcacagctggaggagcttggcacccttaatgtgttccagacggtgtcacgcatgaggacccagagggccttcagcatccagacccctgagcagtactatttttgctacaaggccatcctggagttcgcagagaaggagggcatggtatcctctggccaaaacctgctggccgtggagagtcagtaactctcctacgaacctcctacctgttggccagccttccttaaactaccctggacaccgctgagcctataggttgccatcagttacgctgaagccatggatcaacttctttcttgtgtctcccagcacacgtgtgcacgcaaggcagcctttccctttggctagataaatgtggtgaaattgccactagaaagggccagtagcaatgtgttcttaattcctagcatctgctatcaaactgtgccttattaaaaccaaattgtggctattgatttttgctagggtccccgaggtaagtggggaaggaacctccctcctcctttctcccgccattctttttctgaggtctcctgtctcccactccttccctttcctaggattttatggggaggtttgatgagcatttgcctttctccccagagagcttgaccaagttacatattctagagatcgtcctgagtgccaagcacgtttataagtagggcgtgtattccagtcctttctgtcattctgtgtgtgtgtgtgtgtgcacttatgtgtatgggtccatatgtacgtgtgtatataatatatattgtatgtgataatatgatcgtattctataaatacatatacacacgatactcctttccagaagttcctggggctccgtgttgcagttcaggactccttgcttcttggaccctactatttatcctggactagcttgggttggtgatcatgtctcctcttgtcaggctacagagtggtggaagaggacacacacacatctcctccatgttcctgccacagggccccttccttaagtaatgacttatctccttccagttgccacctgttggagccaagaatgtattagtttgtggtgacactgggttagctcagcatggatttcccttatccgatgatttttctacatttacttggccaatttggggaacagacctccactgtgattccatactctctctttgctttcactatcccagggatgggaggcggagggtagagatgaactcactgagcagccagagccaaatgcaatcggtacgaatcttagaaggaaggagggggagcccaggtatgagaaagaaaaaaccactaagaaaatacctccctgggaggatgagctggggccctttttcttttgctggatggttcctttatgcagcttggccctgtctaccgagatgcccatctcttcctgcctgctagcctgctagaccctcaaactgggtgggttctgtgtcaataaaaagcttcaccccctggctgagtgaggtggtcccctgcaatcactgtttgtcccctacccacccaacctgtccctgcctgctcccagcccactcatccttatgtgctagggataaatcaagagtcctcagcactccacattcccaaaaaatcccaggaactcctaaaccttcccctgtgacagaagatgaggttggcagctgatcagacctcaataattttatactgtaataagctctttgaatgtgtatattattattttttacaatcatttcattttgtatttaatatcaatggactgagtctgattcagaaaataattgtaatgttcatattcaatatcttacagtgatacagttttgtatttacatataaatataccgacatgatcaaaacc

SEQ ID NO: 132511 - DNA, 1782 bp, Artificial Sequence
  derived and/or modified sequence
atggagcccgccaccgcccccagacccgacatggcccccgagctgacccccgaggaggagcaggccaccaagcagttcctggaggagatcaacaagtggaccgtgcagtacaacgtgagccccctgagctggaacgtggccgtgaagttcctgatggccagaaagttcgacgtgctgagagccatcgagctgttccacagctacagagagaccagaagaaaggagggcatcgtgaagctgaagccccacgaggagcccctgagaagcgagatcctgagcggcaagttcaccatcctgaacgtgagagaccccaccggcgccagcatcgccctgttcaccgccagactgcaccacccccacaagagcgtgcagcacgtggtgctgcaggccctgttctacctgctggacagagccgtggacagcttcgagacccagagaaacggcctggtgttcatctacgacatgtgcggcagcaactacgccaacttcgagctggacctgggcaagaaggtgctgaacctgctgaagggcgccttccccgccagactgaagaaggtgctgatcgtgggcgcccccatctggttcagagtgccctacagcatcatcagcctgctgctgaaggacaaggtgagagagagaatccagatcctgaagaccagcgaggtgacccagcacctgcccagagagtgcctgcccgagaacctgggcggctacgtgaagatcgacctggccacctggaacttccagttcctgccccaggtgaacggccaccccgaccccttcgacgagatcatcctgttcagcctgccccccgccctggactgggacagcgtgcacgtgcccggcccccacgccatgaccatccaggagctggtggactacgtgaacgccagacagaagcagggcatctacgaggagtacgaggacatcagaagagagaaccccgtgggcaccttccactgcagcatgagccccggcaacctggagaagaacagatacggcgacgtgccctgcctggaccagaccagagtgaagctgaccaagagaagcggccacacccagaccgactacatcaacgccagcttcatggacggctacaagcagaagaacgcctacatcggcacccagggccccctggagaacacctacagagacttctggctgatggtgtgggagcagaaggtgctggtgatcgtgatgaccaccagattcgaggagggcggcagaagaaagtgcggccagtactggcccctggagaaggacagcagaatcagattcggcttcctgaccgtgaccaacctgggcgtggagaacatgaaccactacaagaagaccaccctggagatccacaacaccgaggagagacagaagagacaggtgacccacttccagttcctgagctggcccgactacggcgtgcccagcagcgccgccagcctgatcgacttcctgagagtggtgagaaaccagcagagcctggccgtgagcaacatgggcgccagaagcaagggccagtgccccgagccccccatcgtggtgcactgcagcgccggcatcggcagaaccggcaccttctgcagcctggacatctgcctggcccagctggaggagctgggcaccctgaacgtgttccagaccgtgagcagaatgagaacccagagagccttcagcatccagacccccgagcagtactacttctgctacaaggccatcctggagttcgccgagaaggagggcatggtgagcagcggccagaacctgctggccgtggagagccagtag

SEQ ID NO: 132512 - protein, 593 aa, Artificial Sequence [sequence omitted]

SEQ ID NO: 132513 - protein, 460 aa, Artificial Sequence
  derived and/or modified sequence
MTSRRWFHPNITGVEAENLLLTRGVDGSFLARPSKSNPGDFTLSVRRNGAVTHIKIQNTGDYYDLYGGEKFATLAELVQYYMEHHGQLKEKNGDVIELKYPLNCADPTSERWFHGHLSGKEAEKLLTEKGKHGSFLVRESQSHPGDFVLSVRTGDDKGESNDGKSKVTHVMIRCQELKYDVGGGERFDSLTDLVEHYKKNPMVETLGTVLQLKQPLNTTRINAAEIESRVRELSKLAETTDKVKQGFWEEFETLQQQECKLLYSRKEGQRQENKNKNRYKNILPFDHTRVVLHDGDPNEPVSDYINANIIMPEFETKCNNSKPKKSYIATQGCLQNTVNDFWRMVFQENSRVIVMTTKEVERGKSKCVKYWPDEYALKEYGVMRVRNVKESAAHDYTLRELKLSKVGQGNTERTVWQYHFRTWPDHGVPSDPGGVLDFLEEVHHKQESIMDAGPVVVHCR

SEQ ID NO: 132514 - DNA, 1782 bp, Artificial Sequence
  derived and/or modified sequence
atgaccagcagaagatggttccaccccaacatcaccggcgtggaggccgagaacctgctgctgaccagaggcgtggacggcagcttcctggccagacccagcaagagcaaccccggcgacttcaccctgagcgtgagaagaaacggcgccgtgacccacatcaagatccagaacaccggcgactactacgacctgtacggcggcgagaagttcgccaccctggccgagctggtgcagtactacatggagcaccacggccagctgaaggagaagaacggcgacgtgatcgagctgaagtaccccctgaactgcgccgaccccaccagcgagagatggttccacggccacctgagcggcaaggaggccgagaagctgctgaccgagaagggcaagcacggcagcttcctggtgagagagagccagagccaccccggcgacttcgtgctgagcgtgagaaccggcgacgacaagggcgagagcaacgacggcaagagcaaggtgacccacgtgatgatcagatgccaggagctgaagtacgacgtgggcggcggcgagagattcgacagcctgaccgacctggtggagcactacaagaagaaccccatggtggagaccctgggcaccgtgctgcagctgaagcagcccctgaacaccaccagaatcaacgccgccgagatcgagagcagagtgagagagctgagcaagctggccgagaccaccgacaaggtgaagcagggcttctgggaggagttcgagaccctgcagcagcaggagtgcaagctgctgtacagcagaaaggagggccagagacaggagaacaagaacaagaacagatacaagaacatcctgcccttcgaccacaccagagtggtgctgcacgacggcgaccccaacgagcccgtgagcgactacatcaacgccaacatcatcatgcccgagttcgagaccaagtgcaacaacagcaagcccaagaagagctacatcgccacccagggctgcctgcagaacaccgtgaacgacttctggagaatggtgttccaggagaacagcagagtgatcgtgatgaccaccaaggaggtggagagaggcaagagcaagtgcgtgaagtactggcccgacgagtacgccctgaaggagtacggcgtgatgagagtgagaaacgtgaaggagagcgccgcccacgactacaccctgagagagctgaagctgagcaaggtgggccagggcaacaccgagagaaccgtgtggcagtaccacttcagaacctggcccgaccacggcgtgcccagcgaccccggcggcgtgctggacttcctggaggaggtgcaccacaagcaggagagcatcatggacgccggccccgtggtggtgcactgcagcgccggcatcggcagaaccggcaccttcatcgtgatcgacatcctgatcgacatcatcagagagaagggcgtggactgcgacatcgacgtgcccaagaccatccagatggtgagaagccagagaagcggcatggtgcagaccgaggcccagtacagattcatctacatggccgtgcagcactacatcgagaccctgcagagaagaatcgaggaggagcagaagagcaagagaaagggccacgagtacaccaacatcaagtacagcctggccgaccagaccagcggcgaccagagccccctgcccccctgcacccccacccccccctgcgccgagatgagagaggacagcgccagagtgtacgagaacgtgggcctgatgcagcagcagaagagcttcagatag

SEQ ID NO: 132515 - DNA, 1782 bp, Artificial Sequence
  derived and/or modified sequence
atgacctcacgacgatggtttcaccctaatatcacaggcgtggaggccgagaacttgttgctgaccagaggagtagatggttcctttctcgcccggccatccaagtctaaccctggggattttaccttatccgtgcgtcgcaatggtgctgtgacacacatcaaaatccagaatactggggattactatgacctgtacggcggcgaaaagtttgcgacattggctgagctggtacaatattacatggaacatcacggacagctgaaggaaaagaatggagatgtgattgagctcaagtatcccctaaattgcgcagatccgactagcgaaagatggttccacggccacctgtcaggtaaagaagctgaaaagcttttgaccgagaagggcaagcacggatcctttctggttcgggagagccagtcccatccaggcgacttcgtcctctccgtccgcactggcgacgacaaaggggagagcaacgatggcaagtctaaggttactcacgtgatgattagatgccaggagcttaagtacgatgtcggtggcggtgagcggttcgactctttaacagatcttgtggaacactacaaaaagaacccaatggtggaaacattaggcacagttctgcaattaaagcaacccctgaacacaacccggataaacgccgccgagatcgagagtcgggtccgggagctttctaaactcgcggagaccactgataaggtgaaacaggggttttgggaggaattcgagactctgcaacagcaggaatgtaaactcttatactcgcggaaggagggccagcgccaagagaataaaaataaaaatcggtataaaaacattctgccgtttgaccacacacgtgtcgtcctccatgacggagatcccaatgagcccgtgtcagattacattaacgccaacatcatcatgccagaattcgagactaagtgcaacaatagcaagcctaaaaaatcctatatcgccacccagggatgcctacagaacactgttaacgacttttggagaatggtgttccaggaaaactctagggtgattgtgatgaccactaaagaagtcgagagaggcaaaagcaaatgtgtgaaatattggcctgatgagtacgccctcaaagagtatggggtcatgcgggtacggaacgttaaggaatctgcagctcatgattatactctgcgggaattgaaattaagtaaggttggccagggtaataccgagcgtaccgtgtggcaataccattttcgaacatggcccgatcatggcgtgccgtcagatccgggaggggtcctggatttccttgaagaagtgcatcataagcaggagagcatcatggacgcaggtcccgtggtggtgcactgttcagcaggtatcggccgaacaggtacttttatagtgatcgatatcctgatagatatcatccgcgaaaagggagtagattgcgacatagatgtgcctaaaaccatccagatggtccgcagtcagcggtcaggaatggtacagaccgaagcacaatataggttcatctatatggctgtgcagcactacattgagacactgcagagaagaatcgaagaagaacaaaaaagcaaaaggaagggtcatgagtatacaaacatcaagtatagtctcgcggatcagactagtggtgatcaaagcccactccctccctgtacgccgaccccaccttgcgccgagatgcgcgaggatagcgcacgcgtctacgagaatgtaggcctcatgcagcaacagaaatcttttcgctag

SEQ ID NO: 132516 - DNA, 1782 bp, Artificial Sequence
  derived and/or modified sequence
atgaccagccgccgctggttccaccccaacatcaccggggtggaggccgagaacctgctgctgacccggggcgtggatggcagcttcctggcccggcccagcaagagcaaccctggggacttcaccctgtctgtgagaagaaatggagctgtgacccacatcaagatccagaacacaggagactactatgacctgtatggaggagagaagtttgccaccctggccgagctggtgcagtactacatggagcaccacggccagctgaaggagaagaatggagatgtgattgagctgaagtaccccctgaactgtgccgaccccaccagcgagcgctggttccacggccacctgagcggcaaggaggccgagaagctgctgacagagaagggcaagcacggcagcttcctggtgcgggagagccagagccaccctggggactttgtgctgtctgtgaggactggagatgacaagggggagagcaatgatggcaagagcaaggtgacccacgtgatgatccgctgccaggagctgaagtatgatgtgggcggcggggagagatttgacagcctgacagacctggtggagcactacaagaagaaccccatggtggagaccctgggcaccgtgctgcagctgaagcagcccctgaacaccacccgcatcaatgctgctgagattgagagccgggtgcgggagctgagcaagctggccgagaccacagacaaggtgaagcagggcttctgggaggagtttgagaccctgcagcagcaggagtgcaagctgctgtacagcaggaaggagggccagaggcaggagaacaagaacaagaaccgctacaagaacatcctgccctttgaccacaccagggtggtgctgcatgatggagaccccaatgaacctgtgtctgactacatcaatgccaacatcatcatgcctgagtttgagaccaagtgcaacaacagcaagcccaagaagagctacatcgccacccagggctgcctgcagaacacagtgaatgacttctggaggatggtgttccaggagaacagccgggtgattgtgatgaccaccaaggaggtggagcggggcaagagcaaatgtgtgaagtactggccagatgaatatgccctgaaggagtatggagtgatgagggtgagaaatgtgaaggagagcgctgcccatgactacaccctgcgggagctgaagctgagcaaggtgggccagggcaacacagagaggacagtgtggcagtaccacttccgcacctggccagaccacggcgtgcccagcgaccccggcggcgtgctggacttcctggaggaggtgcaccacaagcaggagagcatcatggatgctggccctgtggtggtgcactgcagcgctggcattggaagaacaggcaccttcatcgtcatcgacatcctgattgacatcatccgggagaagggcgtggactgtgacattgatgtgcccaagaccatccagatggtgcgcagccagaggagcggcatggtgcagacagaggcccagtaccgcttcatctacatggctgtgcagcactacatcgagaccctgcagaggagaattgaggaggagcagaagagcaagaggaagggccacgagtacaccaacatcaagtacagcctggccgaccagaccagcggggaccagagccccctgcccccctgcacccccaccccaccctgtgccgagatgagggaggacagcgcccgggtgtatgaaaatgtgggcctgatgcagcagcagaagagcttcagatag

SEQ ID NO: 132517 - DNA, 1782 bp, Artificial Sequence
  derived and/or modified sequence
atgaccagccggcggtggttccaccccaacatcaccggcgtggaggccgaaaatttgctgttaaccagaggagtggacggtagctttctggctagaccttcaaaatccaaccccggcgacttcacattgagcgtgagaaggaacggggccgtcacacatatcaaaatccagaacacaggagactattacgatctctatggtggagaaaaattcgccactctcgcagagcttgtgcaatattacatggagcaccacgggcagctcaaggagaaaaatggcgatgtaatagaactcaagtatccgctcaactgcgctgaccctacatctgagaggtggtttcacggccatctaagcggtaaagaggccgagaaacttctgactgaaaaaggcaaacacggctcttttttagttcgggaaagtcaatcacacccaggagacttcgtgctttctgtgaggactggggatgataagggagagtcaaacgatgggaaaagtaaggtaacacatgtgatgattaggtgccaggagctcaaatacgacgttggcggcggcgagaggttcgattccctcaccgacctcgtcgagcactataaaaagaaccccatggtggagactctgggaacggtcttacagttgaaacagccgttgaataccacccgcatcaacgccgctgagatagagtcccgggtgagagaactgtcgaagttggctgaaactactgacaaggtgaagcagggattttgggaggagtttgagaccctgcagcaacaggagtgtaaactgctttactctaggaaggagggccagcgccaggagaataaaaataaaaaccggtacaagaacatcttgccctttgatcacacacgagtagtactacacgatggggatcccaatgaacccgtaagcgattacattaacgccaacattatcatgccggagttcgagaccaaatgcaacaactcaaagccgaagaagtcgtatatcgccacccagggttgtttgcaaaatacagtgaatgatttttggcgtatggtgttccaggagaatagccgagtgatcgtaatgacaacaaaagaggtggaacgagggaagtctaaatgcgtcaaatactggcctgacgagtacgccctaaaggagtacggcgtcatgagggtgcggaatgtgaaggagagtgctgctcatgactataccctgcgggaattaaaactgtcgaaagtgggccaggggaatacagagcgaacagtgtggcaataccactttcgcacatggccagaccatggggtgccatccgacccaggtggcgtgttagacttcttggaggaggtgcatcacaagcaggaatctatcatggatgctggacctgttgtggtacattgtagcgccggaattggccgaaccggaactttcatcgtgattgacatactcattgacattatccgcgaaaagggcgtggactgtgacatagacgtgccaaaaaccattcagatggtacgaagtcagcgtagcgggatggtccagactgaggcccaatataggtttatttatatggctgtgcagcactacatcgaaacactgcagcgcagaatagaggaggagcagaaatcaaagagaaaaggacatgagtacaccaatatcaaatattcattggcagatcaaaccagcggcgaccagtcacccctcccaccatgcacccctacgcccccctgtgccgagatgcgtgaggattctgcaagagtgtacgagaatgtgggcctgatgcagcagcagaagagcttcagatag

SEQ ID NO: 132518 - DNA, 1782 bp, Artificial Sequence
  derived and/or modified sequence
atgacaagccgacgttggtttcaccctaacattaccggagtagaagcagagaacctcctcctaactcggggagtggacggctctttcttagccaggccttccaagagcaaccccggtgacttcacactgtccgtgagaaggaatggagccgtcacacacattaagatccagaatacaggagattactacgacctttatggcggagaaaagttcgcaacacttgcagagctggtgcaatattatatggaacatcacggacaactgaaagagaagaacggtgacgtaatcgagttaaagtaccctctcaattgtgcagatcccacatcagaacgatggtttcatgggcatttaagcggaaaggaggcggaaaagctcctgacagaaaaaggaaaacacggaagtttccttgtgcgggagtcacagtctcatcccggagacttcgtgttgtcagtgcgtactggcgacgataaaggagaaagtaatgacggcaaatctaaagtgacccatgttatgattcgttgtcaggagctgaaatacgacgtgggcggtggtgagcgtttcgatagtttgacagatcttgttgaacactataaaaagaatccgatggtggaaacactcggcacagtgcttcagctaaagcagccactgaatactaccagaatcaatgccgctgaaatcgaatctcgagtccgggagctgtccaaactggccgagaccaccgacaaggtgaagcagggcttctgggaagagtttgaaaccctacagcagcaggagtgcaaacttctatattctcgcaaggagggccagcgccaggagaacaaaaataagaatcggtataaaaacatattaccgtttgaccacaccagagtagttctgcatgatggagaccccaatgaacctgtttctgattatatcaatgccaacatcattatgcctgagtttgagaccaagtgtaacaacagtaaacccaaaaagtcatacattgccacgcaaggctgtttacagaacaccgtcaatgatttctggaggatggtgttccaggagaactctcgtgtgattgtcatgactactaaagaggtggagcgcggtaaatctaagtgtgtgaaatactggccagacgaatatgcgctgaaagaatacggagtgatgcgggtcaggaacgtgaaggagtctgctgcacacgactatacgctccgggagctgaagctgagcaaagtgggccaggggaatacagaacgcaccgtgtggcagtatcacttccggacctggcccgatcatggtgtgccttcagatcccggaggagtactggacttcctcgaggaagtgcaccacaagcaagaatctatcatggacgcaggcccagtggttgtgcactgtagtgccggaattggacgtaccggtactttcatcgtgatcgacattcttatcgatatcatcagggaaaaaggtgtcgattgcgacattgacgttccaaaaacgattcagatggtgcgtagtcagagaagcgggatggttcagactgaagcacagtacaggtttatttacatggcagttcagcactacatcgagaccctacagcggcgaatagaagaagaacagaaatccaaaaggaaggggcacgaatacaccaacattaagtattccctcgccgaccaaacctccggagatcagtcacctcttccgccatgcacaccaacacctccgtgcgcggaaatgcgcgaagactctgccagagtttacgagaacgtcggcctcatgcagcaacagaagtcttttaggtag

SEQ ID NO: 132519 - DNA, 6101 bp, Artificial Sequence
  derived and/or modified sequence
ggaggagcgagccgggccggggggcagctgcacagtctccgggatccccaggcctggaggggggtctgtgcgcggccggctggctctgccccgcgtccggtcccgagcgggcctccctcgggccagcccgatgtgaccgagcccagcggagcctgagcaaggagcgggtccgtcgcggagccggagggcgggaggaacatgacatcgcggagatggtttcacccaaatatcactggtgtggaggcagaaaacctactgttgacaagaggagttgatggcagttttttggcaaggcctagtaaaagtaaccctggagacttcacactttccgttagaagaaatggagctgtcacccacatcaagattcagaacactggtgattactatgacctgtatggaggggagaaatttgccactttggctgagttggtccagtattacatggaacatcacgggcaattaaaagagaagaatggagatgtcattgagcttaaatatcctctgaactgtgcagatcctacctctgaaaggtggtttcatggacatctctctgggaaagaagcagagaaattattaactgaaaaaggaaaacatggtagttttcttgtacgagagagccagagccaccctggagattttgttctttctgtgcgcactggtgatgacaaaggggagagcaatgacggcaagtctaaagtgacccatgttatgattcgctgtcaggaactgaaatacgacgttggtggaggagaacggtttgattctttgacagatcttgtggaacattataagaagaatcctatggtggaaacattgggtacagtactacaactcaagcagccccttaacacgactcgtataaatgctgctgaaatagaaagcagagttcgagaactaagcaaattagctgagaccacagataaagtcaaacaaggcttttgggaagaatttgagacactacaacaacaggagtgcaaacttctctacagccgaaaagagggtcaaaggcaagaaaacaaaaacaaaaatagatataaaaacatcctgccctttgatcataccagggttgtcctacacgatggtgatcccaatgagcctgtttcagattacatcaatgcaaatatcatcatgcctgaatttgaaaccaagtgcaacaattcaaagcccaaaaagagttacattgccacacaaggctgcctgcaaaacacggtgaatgacttttggcggatggtgttccaagaaaactcccgagtgattgtcatgacaacgaaagaagtggagagaggaaagagtaaatgtgtcaaatactggcctgatgagtatgctctaaaagaatatggcgtcatgcgtgttaggaacgtcaaagaaagcgccgctcatgactatacgctaagagaacttaaactttcaaaggttggacaagggaatacggagagaacggtctggcaataccactttcggacctggccggaccacggcgtgcccagcgaccctgggggcgtgctggacttcctggaggaggtgcaccataagcaggagagcatcatggatgcagggccggtcgtggtgcactgcagtgctggaattggccggacagggacgttcattgtgattgatattcttattgacatcatcagagagaaaggtgttgactgcgatattgacgttcccaaaaccatccagatggtgcggtctcagaggtcagggatggtccagacagaagcacagtaccgatttatctatatggcggtccagcattatattgaaacactacagcgcaggattgaagaagagcagaaaagcaagaggaaagggcacgaatatacaaatattaagtattctctagcggaccagacgagtggagatcagagccctctcccgccttgtactccaacgccaccctgtgcagaaatgagagaagacagtgctagagtctatgaaaacgtgggcctgatgcaacagcagaaaagtttcagatgagaaaacctgccaaaacttcagcacagaaatagatgtggactttcaccctctccctaaaaagatcaagaacagacgcaagaaagtttatgtgaagacagaatttggatttggaaggcttgcaatgtggttgactaccttttgataagcaaaatttgaaaccatttaaagaccactgtattttaactcaacaatacctgcttcccaattactcatttcctcagataagaagaaatcatctctacaatgtagacaacattatattttatagaatttgtttgaaattgaggaagcagttaaattgtgcgctgtattttgcagattatggggattcaaattctagtaataggcttttttatttttatttttatacccttaaccagtttaattttttttttcctcattgttggggatgatgagaagaaatgatttgggaaaattaagtaacaacgacctagaaaagtgagaacaatctcatttaccatcatgtatccagtagtggataattcattttgatggcttctatttttggccaaatgagaattaagccagtgcctgagactgtcagaagttgacctttgcactggcattaaagagtcatagaaaaagaatcatggatatttatgaattaaggtaagaggtgtggcttttttttttttcttttttccagccgttgaccaattatagttcggctgttgactgagaagtttgtggtgggaaaacgtttgccatattttctttgcatttgaataattgtcttgtacttagaaaaaaggcgtctatgaatgaccagtgtttttggtcgccaaatgttgctgacaaacttatcccaaaactttagtggcttaaaaaaacctgcccccaactgttagtcaatctgagctgggctcagctgggctgttcttctgccagcctgcaggtggccactcatgtggtcagcaggtcggcggagagactgggatggctgggcttctctctctgcctgcagtcctgagtctctccttcttcgtgtagtctctttcagtggcctggctggcagggtagctagacctctcacatgcagctcagagctcccaagagctcaaaagcagaaatggccaggccttctgaaaacttaagtccagaattgtcacagtgtcccttctacttccctctattgatgatgatgatgatgatgatgatgatgatgatgatgatgatgatggttttttctaatcagaagaaagctggggtatgccctctacttactaaacaagtcacaagcccagctcagattcaagaaaagggtgtgaagtagaggtgcagttaagtggggggccactagtctaacagacggtcacaaccagtgccatggaaaaccaaggatattagcaaaagcagaagttgctagtgaccttgggaagccgaagctgcttacagtagctgggacaagctgaaagtcagactaagaaataaagagagggccttcaagaagcttcctgaatgatttctgctagccctgagcctatttttggaaccagcacttggggaaactgatcttgtgaggatggatgtgtttagggacacagggcttttgagagcagcaccaccccactggggcatccccagacttgggaaacgtgactctttcttaatgccactgggttttagtcaggccacagtgagaaggaacagccctaacaggcctccagccaggttgaatgagctcatttttgttgtagccaaccagtaagatttgctaatgttctacattaagtgccttctccaaagacatccctctttgcctcatatgttgaatcatccagtgcggatatttcaatgaaaatatcattggttgacttttgtgatggtaataatgctatggcatctttgccatgaagttgtggcctccttggattcttctgactttggcttctgaaaggaaggcctagatccagccctggtggtagttcctttctgaggtctctcagtcccttgagactttggggtagtttggctgccattctcactgacaaaatgtatatcagcccccacctccaccccccaatattccttgaactttgaattgcttcagaacacaggtgtggcctgaaggtattcccttattagggaagtgtcactgctgtcttctagtcaaacttgtaaagaaaaagattccagttcagtatttgcagcaagaagcttgaatgctgttctttttatcgcattgttacatcgactcattctccattttgctttggttttgtcttgacttgacttgactttgggggtaaagtctttcaccagcacacaagagtttgattgtacaaatatatcttctgcattaacatctctgcctgttgcttaagatcagttgcttttatactcagaatggaaatacctgatcttggctagttttgttataagatattgatttcatttagatttccctccacgaggtcagcaaactatcatgttcttatgtaaacttaggccaaggccagagttatcatagtccctaggttgctacggcttatcatgtgcttggtaaaaggtgatcgcaggttctcagacgagtttactttacatgagatggaatcaggcagagaggctgggatgatggagaaagctcgaggtgaagttttaaaaaaaaagttgtggaaaggaaagttccaaagaggtggtttctgaggaagtcagagcgcccagggccagagcagtcagtaatgggtgaatgaggttgtttggaaagtcggtgtgacagacacatggatgccatctacttctaggttgctggtgggtattaaatatgcacaatattccatagctcactgaggattttaaaattataagcataggattttatattttggggtgaaagaattatctggcacattaggtattggagtttaaaaaaaaagccaaatttcacagtcttaataactttttttaaaaaaaactaaaaggcgcttcatgtccagtgtgtggcccttctgaaacttatggtcatctctcccactgaaaccaaggtcttttcaaatgtggctaaatggggatgaggagacacgggtaggactttcttggtgtgtgtgcattctttaaagagccaagttgcttcggggaaacagccaggaaaatggtcaagattatttttagaggttattttattggggattttaagaactaataacatcttgagttatttttaattcagggggatgtggaaaggtttgcaattgtcaagtgttttgttgtagcttagtatccataagggaaacttagactatagacataactacaaagccagtgcagcttttgttttctgtatgttgttgggggatcaactttcacacatagcaagcacatggcctccctgatgtcaggatgcctttgttaggatctgtatttgcccttaattttgttgaaatcttttttccttcttcctcttgaaaagttccaaaatatagtttattgtatctttcatcactaaaaatttgttcctttttcactatgggcagttcacacaaggcaaaaactattgaacagttggttttagtgtgttgtataactttgctgtatatcaaactaattttgacaagttttcatcctaagcctcaaatcatgtaattaataatttgcctgtttatttatgacctaattgtgattcttttattaataaaagctaatgggaaaaggatccctgattaagctgatgactagacctacaattaattttcctgcagtatatgaagtattgtaccagagtattaaaagatatgtaatattttattgataaatctatcctttaaaaggaatacgttttaggatgtcatcattttgatgtgaatcatgtaaatgttgataatatgctgtttattatacatttagtgtttcaagagattcacttaattgcctttttgcccacgtatattatgtagtctatttgcaactgttcttaaaaaaatgacattaaaagaatagtttatgtagagaaacattagtggatgttaattgtctccccacctatatttatgggtgttagcgcaactgctttgctagttgcaaagctgtattatcagagtaaaagtgtatttgtaaactgtatgggaactaaaaattaggaataaaaccattttcttatatga

SEQ ID NO: 132520 - protein, 780 aa, Artificial Sequence
  derived and/or modified sequence
MEQVEILRKFIQRVQAMKSPDHNGEDNFARDFMRLRRLSTKYRTEKIYPTATGEKEENVKKNRYKDILPFDHSRVKLTLKTPSQDSDYINANFIKGVYGPKAYVATQGPLANTVIDFWRMIWEYNVVIIVMACREFEMGRKKCERYWPLYGEDPITFAPFKISCEDEQARTDYFIRTLLLEFQNESRRLYQFHYVNWPDHDVPSSFDSILDMISLMRKYQEHEDVPICIHCSAGCGRTGAICAIDYTWNLLKAGKIPEEFNVFNLIQEMRTQRHSAVQTKEQYELVHRAIAQLFEKQLQLYEIHGAQKIADGVNEINTENMVSSIEPEKQDSPPPKPPRTRSCLVEGDAKEEILQPPEPHPVPPILTPSPPSAFPTVTTVWQDNDRYHPKPVLHMVSSEQHSADLNRNYSKSTELPGKNESTIEQIDKKLERNLSFEIKKVPLQEGPKSFDGNTLLNRGHAIKIKSASPCIADKISKPQELSSDLNVGDTSQNSCVDCSVTQSNKVSVTPPEESQNSDTPPRPDRLPLDEKGHVTWSFHGPENAIPIPDLSEGNSSDINYQTRKTVSLTPSPTTQVETPDLVDHDNTSPLFRTPLSFTNPLHSDDSDSDERNSDGAVTQNKTNISTASATVSAATSTESISTRKVLPMSIARHNIAGTTHSGAEKDVDVSEDSPPPLPERTPESFVLASEHNTPVRSEWSELQSQERSEQKKSEGLITSENEKCDHPAGGIHYEMCIECPPTFSDKREQISENPTEATDIGFGNRCGKPKGPRDPPSEWT

SEQ ID NO: 132521 - protein, 661 aa, Artificial Sequence
  derived and/or modified sequence
MIWEYNVVIIVMACREFEMGRKKCERYWPLYGEDPITFAPFKISCEDEQARTDYFIRTLLLEFQNESRRLYQFHYVNWPDHDVPSSFDSILDMISLMRKYQEHEDVPICIHCSAGCGRTGAICAIDYTWNLLKAGKIPEEFNVFNLIQEMRTQRHSAVQTKEQYELVHRAIAQLFEKQLQLYEIHGAQKIADGVNEINTENMVSSIEPEKQDSPPPKPPRTRSCLVEGDAKEEILQPPEPHPVPPILTPSPPSAFPTVTTVWQDNDRYHPKPVLHMVSSEQHSADLNRNYSKSTELPGKNESTIEQIDKKLERNLSFEIKKVPLQEGPKSFDGNTLLNRGHAIKIKSASPCIADKISKPQELSSDLNVGDTSQNSCVDCSVTQSNKVSVTPPEESQNSDTPPRPDRLPLDEKGHVTWSFHGPENAIPIPDLSEGNSSDINYQTRKTVSLTPSPTTQVETPDLVDHDNTSPLFRTPLSFTNPLHSDDSDSDERNSDGAVTQNKTNISTASATVSAATSTESISTRKVLPMSIARHNIAGTTHSGAEKDVDVSEDSPPPLPERTPESFVLASEHNTPVRSEWSELQSQERSEQKKSEGLITSENEKCDHPAGGIHYEMCIECPPTFSDKREQISENPTEATDIGFGNRCGKPKGPRDPPSEWT

SEQ ID NO: 132522 - protein, 543 aa, Artificial Sequence
  derived and/or modified sequence
MIWEYNVVIIVMACREFEMGRKKCERYWPLYGEDPITFAPFKISCEDEQARTDYFIRTLLLEFQNESRRLYQFHYVNWPDHDVPSSFDSILDMISLMRKYQEHEDVPICIHCSAGCGRTGAICAIDYTWNLLKAGKIPEEFNVFNLIQEMRTQRHSAVQTKEQYELVHRAIAQLFEKQLQLYEIHGAQKIADGVNEINTENMVSSIEPEKQDSPPPKPPRTRSCLVEGDAKEEILQPPEPHPVPPILTPSPPSAFPTVTTVWQDNDRYHPKPVLHMVSSEQHSADLNRNYSKSTELPGKNESTIEQIDKKLERNLSFEIKKVPLQEGPKSFDGNTLLNRGHAIKIKSASPCIADKISKPQELSSDLNVGDTSQNSCVDCSVTQSNKVSVTPPEESQNSDTPPRPDRLPLDEKGHVTWSFHGPENAIPIPDLSEGNSSDINYQTRKTVSLTPSPTTQVETPDLVDHDNTSPLFRTPLSFTNPLHSDDSDSDERNSDGAVTQNKTNISTASATVSAATSTESISTRKVLPMSIARHNSRNNTFRC

SEQ ID NO: 132523 - DNA, 2343 bp, Artificial Sequence
  derived and/or modified sequence
atggaacaggtggagatccttcgtaaattcattcagcgtgtgcaggcgatgaagtccccggatcataatggtgaggataactttgcacgggattttatgcgactgagacgactcagcacaaaatataggactgagaagatttacccaacggctacgggcgaaaaagaggagaacgtgaagaaaaaccgctataaagacatcttgccgtttgaccactccagggtcaaacttactctcaagacccccagtcaggactccgactatattaacgcaaatttcatcaaaggcgtctacggccctaaagcttacgtggcaacacaaggccctctcgctaatacagtgatcgacttctggcgtatgatttgggagtataacgtcgtgataatcgtgatggcatgtagggagttcgagatgggacgaaagaaatgtgagagatactggccgctttacggggaggacccgataacctttgccccattcaagatttcttgtgaagacgagcaggcccggaccgactattttatccgaactctgctgctcgagtttcaaaacgaaagccgaaggctgtatcagtttcattatgtgaactggccggatcacgacgtgccttcctcatttgactccattctggacatgatctctctgatgcgaaaatatcaggagcacgaggatgtgccgatctgcatacactgttcagccgggtgtggccggaccggtgccatatgcgctatagactacacatggaatctcctgaaagctgggaagattcctgaagagtttaacgtatttaatctgatccaggaaatgaggacccagcggcactctgcggtgcagaccaaggagcagtatgagctcgttcatagggcaatcgcccagttgtttgaaaaacagctccagttatacgaaatccacggagcacagaagatagccgacggagttaatgagatcaataccgagaatatggtctctagcattgagcctgagaaacaagactctcctccccccaaaccgcctaggacaagatcatgtctcgtcgagggcgatgcgaaggaagagatcctgcagccccctgagccacaccctgtccctcctatcctgacccctagcccaccaagtgcattccccaccgtgacaaccgtgtggcaagataacgatagatatcatcccaagcccgtgcttcatatggtgtcttcggagcagcactccgctgacctaaacaggaattacagcaagagtacagaactgccagggaaaaatgagtctacaattgagcagatagacaagaagctcgagaggaatctgagcttcgaaatcaagaaagtcccacttcaggagggcccgaagagcttcgatgggaacaccctattgaatagaggccatgcgattaagattaagtccgccagtccatgcatcgccgacaagatatcaaaaccccaggaactttcatcggatcttaatgttggtgatacaagtcaaaactcatgcgtcgactgctccgtgactcagtctaacaaggtatccgtgacacctcccgaggagagccagaacagcgatactccaccccgcccagacaggcttcccctcgatgagaaggggcatgttacttggagctttcacggccccgaaaatgccattccgattcccgacctgtccgagggaaacagcagcgatattaactaccagactcgcaaaaccgtatccctgacgccatccccaaccacccaggtggaaacgcccgatctagtggatcatgacaacacgagccccctgttccgtactcctctctcctttaccaatcccttgcattcagatgacagcgattcagacgaacgtaattccgacggcgccgtgactcagaacaagactaacatctccaccgcctccgccaccgtgtctgcagccacaagcaccgagtctatctctaccagaaaggtgctgccaatgtctatagcacgtcacaacatagccgggaccacacacagtggggccgagaaggacgtggacgttagtgaagactccccacctccactgccagagcgcaccccagagagcttcgtcttggcttccgaacataacacccccgtgcgcagcgagtggagcgagctgcaaagccaggagcggagcgagcagaaaaaatccgagggactgatcacgagcgagaacgaaaagtgtgaccaccctgcggggggtatccattacgagatgtgcattgagtgtccacctacgttttctgataaaagagaacaaattagtgaaaatcctacagaagcgacggatattggcttcgggaatcgctgcgggaagcctaagggaccaagggatccgcctagtgagtggacatag

SEQ ID NO: 132524 - DNA, 2343 bp, Artificial Sequence
  derived and/or modified sequence
atggagcaggtggagatcctgaggaagttcatccagagggtgcaggccatgaagagcccagaccacaatggagaggacaactttgcccgggacttcatgaggctgcggcggctgagcaccaagtacagaacagagaagatctaccccacagccaccggggagaaggaggagaatgtgaagaagaaccgctacaaggacatcctgccctttgaccacagccgggtgaagctgaccctgaagacccccagccaggacagcgactacatcaatgccaacttcatcaagggcgtgtatggccccaaggcctacgtggccacccagggccccctggccaacacagtgattgacttctggaggatgatctgggagtacaacgtggtgatcatcgtgatggcctgccgggagtttgagatgggcaggaagaagtgtgagcgctactggcccctgtatggagaggaccccatcacctttgcccccttcaagatcagctgtgaagatgagcaggccaggacagactacttcatccgcaccctgctgctggagttccagaatgaaagcagaagactctaccagttccactacgtgaactggccagaccatgatgtgcccagcagctttgacagcatcctggacatgatcagcctgatgaggaagtaccaggagcatgaagatgtgcccatctgcatccactgcagcgctggctgcggccgcactggagccatctgtgccatcgactacacctggaacctgctgaaggccggcaagatccctgaggagttcaacgtgttcaacctgatccaggagatgaggacccagaggcacagcgctgtgcagaccaaggagcagtatgagctggtgcaccgggccatcgcccagctgtttgagaagcagctgcagctgtatgagatccacggggcccagaagattgctgatggagtgaatgagatcaacacagagaacatggtgagcagcattgagcctgagaagcaggacagccccccacccaagccacccaggaccaggagctgcctggtggagggagatgccaaggaggagatcctgcagcccccagagccccaccctgtgccccccatcctgacccccagcccccccagcgccttccccaccgtgaccaccgtgtggcaggacaatgaccgctaccaccccaagcctgtgctgcacatggtgagcagcgagcagcacagcgctgacctgaacagaaactacagcaagagcacagagctgcccgggaagaatgaaagcaccatcgagcagattgacaagaagctggagaggaacctgagctttgagatcaagaaggtgcccctgcaggagggccccaagagctttgatggcaacaccctgctgaacagaggccacgccatcaagatcaagagcgccagcccctgcatcgctgacaagatcagcaagccccaggagctgagcagtgacctgaatgtgggggacaccagccagaacagctgtgtggactgcagcgtgacccagagcaacaaggtgtctgtgaccccacctgaggagagccagaacagcgacaccccacccaggccagaccggctgcccctggatgagaagggccacgtgacctggagcttccacggcccagaaaatgccatccccatcccagacctgtctgagggcaacagcagtgacatcaactaccagaccaggaagacagtgtccctgacccccagccccaccacccaggtggagaccccagacctggtggaccatgacaacaccagccccctcttccgcacccccctgtccttcaccaaccccctgcacagtgatgacagcgacagtgatgaaagaaacagtgatggagctgtgacccagaacaagaccaacatcagcacagccagcgccaccgtgtctgctgccaccagcacagagagcatcagcaccaggaaggtgctgcccatgagcatcgcccggcacaacattgctggcaccacccacagcggggctgagaaggatgtggatgtgtctgaggacagccccccacccctgcctgagaggaccccagagagctttgtgctggccagcgagcacaacacccctgtgcgctctgagtggagcgagctgcagagccaggagaggtctgagcagaagaagtctgagggcctcatcaccagtgaaaatgaaaaatgtgaccaccctgctgggggcatccactatgagatgtgcatcgagtgcccccccaccttcagtgacaagcgggagcagatcagcgagaaccccacagaggccacagacatcggcttcggcaacagatgtgggaagcccaagggcccccgggaccccccatctgagtggacctag

SEQ ID NO: 132525 - DNA, 2343 bp, Artificial Sequence
  derived and/or modified sequence
atggagcaggtggagatcctgcggaagttcatccagcgggtgcaggcaatgaaaagtcctgaccacaatggggaggataatttcgcaagagacttcatgcggctccgccggctgtccaccaaatataggaccgagaaaatctatcccactgcaaccggcgagaaggaggaaaacgttaaaaaaaaccgttataaggatatcctgcccttcgaccatagcagggtaaagttgacattgaagaccccttcgcaggactctgattacatcaacgcaaacttcatcaaaggcgtatacgggcctaaggcctacgtggcaacccagggcccgcttgctaacaccgtaattgacttttggaggatgatctgggaatacaatgtagtcatcattgtaatggcttgtcgtgagttcgagatgggacggaagaagtgtgaaagatactggcccctctatggggaggacccaattaccttcgctccgtttaaaatcagctgcgaggatgaacaggcacggacagactatttcatccgtaccctcctgctggaatttcagaatgaaagccgcaggctttatcagttccattatgtgaattggcctgaccacgatgtccccagctcttttgacagtatccttgacatgatctcactgatgcggaagtaccaggagcacgaagatgtaccaatttgcatccactgttcagcaggctgcggcaggaccggggcgatttgtgcaatagactatacttggaacctgctcaaggctggaaagattcccgaggaattcaacgttttcaacctgatccaagaaatgagaacacaacgccactcagccgtgcagacgaaggaacagtatgagctggtacacagggccatcgcccagctctttgaaaaacaactgcagctgtatgaaatccatggtgctcagaaaattgctgacggggtgaacgagattaacactgagaacatggtgtcctcaattgagccagagaaacaggatagtccaccaccgaagcctccccgcacgcgatcttgtttggtggagggagatgccaaggaagagatcctgcaaccgccagaacctcatcctgttccgccaatcctgacccctagcccaccgagtgcattcccgacggtgacaaccgtctggcaggacaacgatcggtaccatcctaagccggttctccacatggtttcatcggagcagcattccgccgatttgaaccgtaattattctaaatccaccgaattaccagggaaaaacgaatctactatcgaacagatcgacaaaaagctggagcgtaatctctcatttgaaatcaagaaagtccctcttcaagaggggccgaagagcttcgacggcaacaccctgctgaacaggggccatgccattaagatcaaaagcgcatcgccctgtatcgcagataaaatttctaaaccacaagaactcagttctgacttgaatgtcggtgatacatcccagaactcctgcgtagactgttctgtaacccaaagcaacaaggtgtcagtcaccccccccgaggaatctcagaactccgacacaccgccgagacccgacaggttgccactcgacgagaaaggccatgtgacatggagcttccatgggcctgagaatgccatacccattcccgacctctccgaaggcaattcttctgacataaactaccagacacgtaagactgtatctcttaccccatctccaactacacaggtggagacccctgacctggtggaccatgataatacaagccccctgtttagaacaccactgagtttcactaatcctctacactcagacgatagcgacagcgacgagcgcaatagcgacggagcggtaacccagaacaagaccaatatcagcactgcttcagccacggtgtcggcagcgactagcacggagagtatcagcacaaggaaggttctgcccatgtcgatcgcccgccacaatatagcaggcactactcacagcggcgccgagaaggacgtagatgtgtctgaggacagtcctcctccactccccgagaggacccccgaatcgtttgtgctagcttctgaacacaacacccccgtgagatctgaatggagtgaactccagtcacaggagcggtccgagcaaaaaaaaagtgaaggactgattacatccgagaacgagaaatgcgatcatcccgctggcggaattcactacgaaatgtgtatagaatgtcctccaaccttcagcgacaagagggagcaaatttctgagaatcctacggaggcgacggatattggatttggcaatagatgcggtaagccaaaaggaccccgagatccccctagtgagtggacgtag

SEQ ID NO: 132526 - DNA, 2343 bp, Artificial Sequence
  derived and/or modified sequence
atggagcaagtggagattctacggaagttcattcaacgcgttcaggccatgaagtccccggaccataacggtgaggataattttgcacgggatttcatgaggctgcgacggcttagcactaaataccgtactgaaaagatctaccctactgcaactggagaaaaagaggagaatgttaagaagaaccgttataaggacattctcccctttgaccattcacgcgtgaaattaaccttgaagacaccctcgcaagactctgactatattaatgctaattttatcaagggtgtgtatggcccaaaggcttacgtggctacacagggcccacttgccaacacggtgattgatttttggcggatgatctgggaatataatgtagtcatcatcgtcatggcatgcagggagttcgagatggggcgaaaaaagtgtgaaaggtactggccactgtatggtgaggaccccattaccttcgccccatttaaaattagctgcgaggacgagcaggctaggaccgattattttattagaacgctgctcttagagtttcaaaatgagtcccggaggttgtaccaattccactacgtgaactggccagaccacgacgtcccatcaagcttcgattctattctcgatatgatatcgttgatgaggaaataccaggaacacgaggatgtcccgatatgtatccattgttctgcaggctgcgggaggaccggggcaatttgcgcaatagattacacttggaaccttctgaaagccggaaagattccagaggagtttaacgtgtttaaccttattcaggagatgcgcactcagcgacactctgcagtgcaaaccaaggagcagtatgagctggttcatagagcaattgcacagctgttcgagaaacagctgcagctatatgagatacatggcgcacagaagattgctgacggggttaacgagatcaacacagaaaatatggtttcctccatagaaccagagaagcaggatagccctcctcctaagcctccacggactcgatcttgcctggtggagggtgacgcaaaagaagagattctgcaacccccagaacctcatccagtgccccctatcctcaccccttccccgccttccgcctttccaactgtgactaccgtctggcaagataatgaccgttaccatcccaagcctgtgctgcatatggtctcatcagagcagcactctgctgacctcaacaggaactactccaaaagtactgaattgccaggtaagaacgagtccactatagaacagattgacaaaaaacttgagcggaacttatcatttgagataaagaaagtgcccttacaggagggtcctaaaagcttcgatgggaacactcttctcaaccggggtcatgcaattaagatcaaaagtgcatctccatgcatcgccgacaagatctcaaagcctcaggagctgtcttccgatctaaatgtgggagacacttcccagaattcatgtgtggattgttccgtgacccagagtaacaaggtgagcgtgacacctccggaagaatcacagaatagcgataccccaccccgtcccgaccgcttgccactggatgaaaaaggccacgtgacttggagtttccatgggccagaaaacgctatacccatcccagacctctccgagggcaattcctcggatatcaactaccaaacaagaaaaaccgtctcgctcacaccaagtcccactacacaggtggagaccccagatctggtggaccatgataatacgagccctttgtttcggactccattgtctttcacaaatccgctgcacagtgatgattccgacagtgatgagcgtaacagcgatggcgctgtcacacagaataagacaaatatcagtaccgccagcgctactgtcagcgcagccacgtccaccgaatctatctcgacacgtaaagtgctgcctatgagcattgcaaggcataatatcgctgggacaacccactccggagccgaaaaggacgtcgacgtgtctgaggacagcccgcctccccttccagaacggactcctgaaagtttcgtgctagcatcagagcacaacacacctgtgcgcagcgaatggtccgagctgcagagccaggagcgaagcgaacagaagaagagcgagggtttgatcacaagtgaaaatgagaagtgcgaccatcccgctggcggaatacattatgagatgtgtattgagtgtcctccgaccttttctgacaagagagaacaaattagcgagaaccctaccgaggctacagatatcggctttggtaatagatgcgggaagccgaagggccctcgggaccccccatcagagtggacttag

SEQ ID NO: 132527 - DNA, 3406 bp, Artificial Sequence
  derived and/or modified sequence
agctgggggttggggttggcgctagcgcagcggctcgcctggtactgtgggagagcggcggctgctcctggaagttgtggtgtcgggagcccagccggtgccgccgcagccgccgcctagggcggtggggaggaggagggagccgcggggcttggcggggtcgggagggagggacgtgctgggggaacgagctggggaagacggagcgggctctgtgccgggcgggcgggcggcgggggggccagcgaccgcagccggggggacgcgggaggatggagcaagtggagatcctgaggaaattcatccagagggtccaggccatgaagagtcctgaccacaatggggaggacaacttcgcccgggacttcatgcggttaagaagattgtctaccaaatatagaacagaaaagatatatcccacagccactggagaaaaagaagaaaatgttaaaaagaacagatacaaggacatactgccatttgatcacagccgagttaaattgacattaaagactccttcacaagattcagactatatcaatgcaaattttataaagggcgtctatgggccaaaagcatatgtagcaactcaaggacctttagcaaatacagtaatagatttttggaggatgatatgggagtataatgttgtgatcattgtaatggcctgccgagaatttgagatgggaaggaaaaaatgtgagcgctattggcctttgtatggagaagaccccataacgtttgcaccatttaaaatttcttgtgaggatgaacaagcaagaacagactacttcatcaggacactcttacttgaatttcaaaatgaatctcgtaggctgtatcagtttcattatgtgaactggccagaccatgatgttccttcatcatttgattctattctggacatgataagcttaatgaggaaatatcaagaacatgaagatgttcctatttgtattcattgcagtgcaggctgtggaagaacaggtgccatttgtgccatagattatacgtggaatttactaaaagctgggaaaataccagaggaatttaatgtatttaatttaatacaagaaatgagaacacaaaggcattctgcagtacaaacaaaggagcaatatgaacttgttcatagagctattgcccaactgtttgaaaaacagctacaactatatgaaattcatggagctcagaaaattgctgatggagtgaatgaaattaacactgaaaacatggtcagctccatagagcctgaaaaacaagattctcctcctccaaaaccaccaaggacccgcagttgccttgttgaaggggatgctaaagaagaaatactgcagccaccggaacctcatccagtgccacccatcttgacaccttctcccccttcagcttttccaacagtcactactgtgtggcaggacaatgatagataccatccaaagccagtgttgcatatggtttcatcagaacaacattcagcagacctcaacagaaactatagtaaatcaacagaacttccagggaaaaatgaatcaacaattgaacagatagataaaaaattggaacgaaatttaagttttgagattaagaaggtccctctccaagagggaccaaaaagttttgatgggaacacacttttgaataggggacatgcaattaaaattaaatctgcttcaccttgtatagctgataaaatctctaagccacaggaattaagttcagatctaaatgtcggtgatacttcccagaattcttgtgtggactgcagtgtaacacaatcaaacaaagtttcagttactccaccagaagaatcccagaattcagacacacctccaaggccagaccgcttgcctcttgatgagaaaggacatgtaacgtggtcatttcatggacctgaaaatgccatacccatacctgatttatctgaaggcaattcctcagatatcaactatcaaactaggaaaactgtgagtttaacaccaagtcctacaacacaagttgaaacacctgatcttgtggatcatgataacacttcaccactcttcagaacacccctcagttttactaatccacttcactctgatgactcagactcagatgaaagaaactctgatggtgctgtgacccagaataaaactaatatttcaacagcaagtgccacagtttctgctgccactagtactgaaagcatttctactaggaaagtattgccaatgtccattgctagacataatatagcaggaacaacacattcaggtgctgaaaaagatgttgatgttagtgaagattcacctcctcccctacctgaaagaactcctgaatcgtttgtgttagcaagtgaacataatacacctgtaagatcggaatggagtgaacttcaaagtcaggaacgatctgaacaaaaaaagtctgaaggcttgataacctctgaaaatgagaaatgtgatcatccagcgggaggtattcactatgaaatgtgcatagaatgtccacctactttcagtgacaagagagaacaaatatcagaaaatccaacagaagccacagatattggttttggtaatcgatgtggaaaacccaaaggaccaagagatccaccttcagaatggacatgattcagggagctagaagacactttaagttatactggaaaattcaggtgccactgaaagccagatttatagtattccatctttaatatgtgggactaacagcagtgtagattgttaccttaatattttttgctgggaccatctacctgccttatactacacttaggaaaaagtattacatatggtttattttgaaacttcaagtattattgccttaatgtctcttaaccctgttacacgctgcttgtagacatgttaatatagtaatacctttatgatatattgagtttaaggactactctttttctgttttatcatgtatgcattattttgtatatgtacagggcaagtaggtatataatttgataaagttgcaattgaaatattattaacagaagatgtaagaaatttctgcatggtctaaatctttgtgtactttatttgtaaattatttgccctggagttttagaaaatagtttctgaattttaaacttgctggattcatgcagccagctttgcaggttatcagagatcaaagattgtaataataattttgtaaattgtaagcaaaaagttatttttatattatatacagtctaattgttcatcctaattgttcctgttttcatctagtcagagattcagtaagtgccttggaacaatattgaattctcttagcttgtgtgtgtttctttaatatttgaactcaagtgggattagaagactatcaaaatacatgtatgtttcaggatatttgacctgtcattaaaaaaaacaaacagttttacagtgcc

SEQ ID NO: 132528 - DNA, 2316 bp, Artificial Sequence
  derived and/or modified sequence
gtcgaggcaaggtatctggctgtgaccgggaggagtgcagatcgtggctgacagaggaacgggggtattgagcggttaagaagattgtctaccaaatatagaacagaaaagatatatcccacagccactggagaaaaagaagaaaatgttaaaaagaacagatacaaggacatactgccatttgatcacagccgagttaaattgacattaaagactccttcacaagattcagactatatcaatgcaaattttataaagggcgtctatgggccaaaagcatatgtagcaactcaaggacctttagcaaatacagtaatagatttttggaggatgatatgggagtataatgttgtgatcattgtaatggcctgccgagaatttgagatgggaaggaaaaaatgtgagcgctattggcctttgtatggagaagaccccataacgtttgcaccatttaaaatttcttgtgaggatgaacaagcaagaacagactacttcatcaggacactcttacttgaatttcaaaatgaatctcgtaggctgtatcagtttcattatgtgaactggccagaccatgatgttccttcatcatttgattctattctggacatgataagcttaatgaggaaatatcaagaacatgaagatgttcctatttgtattcattgcagtgcaggctgtggaagaacaggtgccatttgtgccatagattatacgtggaatttactaaaagctgggaaaataccagaggaatttaatgtatttaatttaatacaagaaatgagaacacaaaggcattctgcagtacaaacaaaggagcaatatgaacttgttcatagagctattgcccaactgtttgaaaaacagctacaactatatgaaattcatggagctcagaaaattgctgatggagtgaatgaaattaacactgaaaacatggtcagctccatagagcctgaaaaacaagattctcctcctccaaaaccaccaaggacccgcagttgccttgttgaaggggatgctaaagaagaaatactgcagccaccggaacctcatccagtgccacccatcttgacaccttctcccccttcagcttttccaacagtcactactgtgtggcaggacaatgatagataccatccaaagccagtgttgcatatggtttcatcagaacaacattcagcagacctcaacagaaactatagtaaatcaacagaacttccagggaaaaatgaatcaacaattgaacagatagataaaaaattggaacgaaatttaagttttgagattaagaaggtccctctccaagagggaccaaaaagttttgatgggaacacacttttgaataggggacatgcaattaaaattaaatctgcttcaccttgtatagctgataaaatctctaagccacaggaattaagttcagatctaaatgtcggtgatacttcccagaattcttgtgtggactgcagtgtaacacaatcaaacaaagtttcagttactccaccagaagaatcccagaattcagacacacctccaaggccagaccgcttgcctcttgatgagaaaggacatgtaacgtggtcatttcatggacctgaaaatgccatacccatacctgatttatctgaaggcaattcctcagatatcaactatcaaactaggaaaactgtgagtttaacaccaagtcctacaacacaagttgaaacacctgatcttgtggatcatgataacacttcaccactcttcagaacacccctcagttttactaatccacttcactctgatgactcagactcagatgaaagaaactctgatggtgctgtgacccagaataaaactaatatttcaacagcaagtgccacagtttctgctgccactagtactgaaagcatttctactaggaaagtattgccaatgtccattgctagacataatatagcaggaacaacacattcaggtgctgaaaaagatgttgatgttagtgaagattcacctcctcccctacctgaaagaactcctgaatcgtttgtgttagcaagtgaacataatacacctgtaagatcggaatggagtgaacttcaaagtcaggaacgatctgaacaaaaaaagtctgaaggcttgataacctctgaaaatgagaaatgtgatcatccagcgggaggtattcactatgaaatgtgcatagaatgtccacctactttcagtgacaagagagaacaaatatcagaaaatccaacagaagccacagatattggttttggtaatcgatgtggaaaacccaaaggaccaagagatccaccttcagaatggacatga

SEQ ID NO: 132529 - DNA, 2253 bp, Artificial Sequence
  derived and/or modified sequence
gtcgaggcaaggtatctggctgtgaccgggaggagtgcagatcgtggctgacagaggaacgggggtattgagcggttaagaagattgtctaccaaatatagaacagaaaagatatatcccacagccactggagaaaaagaagaaaatgttaaaaagaacagatacaaggacatactgccatttgatcacagccgagttaaattgacattaaagactccttcacaagattcagactatatcaatgcaaattttataaagggcgtctatgggccaaaagcatatgtagcaactcaaggacctttagcaaatacagtaatagatttttggaggatgatatgggagtataatgttgtgatcattgtaatggcctgccgagaatttgagatgggaaggaaaaaatgtgagcgctattggcctttgtatggagaagaccccataacgtttgcaccatttaaaatttcttgtgaggatgaacaagcaagaacagactacttcatcaggacactcttacttgaatttcaaaatgaatctcgtaggctgtatcagtttcattatgtgaactggccagaccatgatgttccttcatcatttgattctattctggacatgataagcttaatgaggaaatatcaagaacatgaagatgttcctatttgtattcattgcagtgcaggctgtggaagaacaggtgccatttgtgccatagattatacgtggaatttactaaaagctgggaaaataccagaggaatttaatgtatttaatttaatacaagaaatgagaacacaaaggcattctgcagtacaaacaaaggagcaatatgaacttgttcatagagctattgcccaactgtttgaaaaacagctacaactatatgaaattcatggagctcagaaaattgctgatggagtgaatgaaattaacactgaaaacatggtcagctccatagagcctgaaaaacaagattctcctcctccaaaaccaccaaggacccgcagttgccttgttgaaggggatgctaaagaagaaatactgcagccaccggaacctcatccagtgccacccatcttgacaccttctcccccttcagcttttccaacagtcactactgtgtggcaggacaatgatagataccatccaaagccagtgttgcatatggtttcatcagaacaacattcagcagacctcaacagaaactatagtaaatcaacagaacttccagggaaaaatgaatcaacaattgaacagatagataaaaaattggaacgaaatttaagttttgagattaagaaggtccctctccaagagggaccaaaaagttttgatgggaacacacttttgaataggggacatgcaattaaaattaaatctgcttcaccttgtatagctgataaaatctctaagccacaggaattaagttcagatctaaatgtcggtgatacttcccagaattcttgtgtggactgcagtgtaacacaatcaaacaaagtttcagttactccaccagaagaatcccagaattcagacacacctccaaggccagaccgcttgcctcttgatgagaaaggacatgtaacgtggtcatttcatggacctgaaaatgccatacccatacctgatttatctgaaggcaattcctcagatatcaactatcaaactaggaaaactgtgagtttaacaccaagtcctacaacacaagttgaaacacctgatcttgtggatcatgataacacttcaccactcttcagaacacccctcagttttactaatccacttcactctgatgactcagactcagatgaaagaaactctgatggtgctgtgacccagaataaaactaatatttcaacagcaagtgccacagtttctgctgccactagtactgaaagcatttctactaggaaagtattgccaatgtccattgctagacataatagcaggaacaacacattcaggtgctgaaaaagatgttgatgttagtgaagattcacctcctcccctacctgaaagaactcctgaatcgtttgtgttagcaagtgaacataatacacctgtaagatcggaatggagtgaacttcaaagtcaggaacgatctgaacaaaaaaagtctgaaggcttgataacctctgaaaatgagaaatgtgatcatccagcgggaggtattcactatgaaatgtgcatagaatgtccacctactttcagtgacaagagagaacaaatatcagaaaatccaacagaagccacagatattgg

SEQ ID NO: 132530 - DNA, 2343 bp, Artificial Sequence
  derived and/or modified sequence
atggagcaggtggagatcctgagaaagttcatccagagagtgcaggccatgaagagccccgaccacaacggcgaggacaacttcgccagagacttcatgagactgagaagactgagcaccaagtacagaaccgagaagatctaccccaccgccaccggcgagaaggaggagaacgtgaagaagaacagatacaaggacatcctgcccttcgaccacagcagagtgaagctgaccctgaagacccccagccaggacagcgactacatcaacgccaacttcatcaagggcgtgtacggccccaaggcctacgtggccacccagggccccctggccaacaccgtgatcgacttctggagaatgatctgggagtacaacgtggtgatcatcgtgatggcctgcagagagttcgagatgggcagaaagaagtgcgagagatactggcccctgtacggcgaggaccccatcaccttcgcccccttcaagatcagctgcgaggacgagcaggccagaaccgactacttcatcagaaccctgctgctggagttccagaacgagagcagaagactgtaccagttccactacgtgaactggcccgaccacgacgtgcccagcagcttcgacagcatcctggacatgatcagcctgatgagaaagtaccaggagcacgaggacgtgcccatctgcatccactgcagcgccggctgcggcagaaccggcgccatctgcgccatcgactacacctggaacctgctgaaggccggcaagatccccgaggagttcaacgtgttcaacctgatccaggagatgagaacccagagacacagcgccgtgcagaccaaggagcagtacgagctggtgcacagagccatcgcccagctgttcgagaagcagctgcagctgtacgagatccacggcgcccagaagatcgccgacggcgtgaacgagatcaacaccgagaacatggtgagcagcatcgagcccgagaagcaggacagccccccccccaagccccccagaaccagaagctgcctggtggagggcgacgccaaggaggagatcctgcagccccccgagccccaccccgtgccccccatcctgacccccagcccccccagcgccttccccaccgtgaccaccgtgtggcaggacaacgacagataccaccccaagcccgtgctgcacatggtgagcagcgagcagcacagcgccgacctgaacagaaactacagcaagagcaccgagctgcccggcaagaacgagagcaccatcgagcagatcgacaagaagctggagagaaacctgagcttcgagatcaagaaggtgcccctgcaggagggccccaagagcttcgacggcaacaccctgctgaacagaggccacgccatcaagatcaagagcgccagcccctgcatcgccgacaagatcagcaagccccaggagctgagcagcgacctgaacgtgggcgacaccagccagaacagctgcgtggactgcagcgtgacccagagcaacaaggtgagcgtgaccccccccgaggagagccagaacagcgacaccccccccagacccgacagactgcccctggacgagaagggccacgtgacctggagcttccacggccccgagaacgccatccccatccccgacctgagcgagggcaacagcagcgacatcaactaccagaccagaaagaccgtgagcctgacccccagccccaccacccaggtggagacccccgacctggtggaccacgacaacaccagccccctgttcagaacccccctgagcttcaccaaccccctgcacagcgacgacagcgacagcgacgagagaaacagcgacggcgccgtgacccagaacaagaccaacatcagcaccgccagcgccaccgtgagcgccgccaccagcaccgagagcatcagcaccagaaaggtgctgcccatgagcatcgccagacacaacatcgccggcaccacccacagcggcgccgagaaggacgtggacgtgagcgaggacagccccccccccctgcccgagagaacccccgagagcttcgtgctggccagcgagcacaacacccccgtgagaagcgagtggagcgagctgcagagccaggagagaagcgagcagaagaagagcgagggcctgatcaccagcgagaacgagaagtgcgaccaccccgccggcggcatccactacgagatgtgcatcgagtgcccccccaccttcagcgacaagagagagcagatcagcgagaaccccaccgaggccaccgacatcggcttcggcaacagatgcggcaagcccaagggccccagagacccccccagcgagtggacctag

SEQ ID NO: 132531 - protein, 658 aa, Artificial Sequence
  derived and/or modified sequence
MVALSSLLVIVFIIIVLYMLRRFRKAELMSRNTEKYKQAGSHSNSFRLSNGRTEDVEPQSVPLLARSPSTNRKYPPLPVDKLEEEINRRMADDNKLFREEFNALPACPIQATCEAASKEENKEKNRYVNILPYDHSRVHLTPVEGVPDSDYINASFINGYQEKNKFIAAQGPKEETVNDFWRMIWEQNTATIVMVTNLKERKECKCAQYWPDQGCWTYGNIRVSVEDVTVLVDYTVRKFCIQQVGDMTNRKPQRLITQFHFTSWPDFGVPFTPIGMLKFLKKVKACNPQYAGAIVVHCSAGVGRTGTFVVIDAMLDMMHTERKVDVYGFVSRIRAQRCQMVQTDMQYVFIYQALLEHYLYGDTELEVTSLETHLQKIYNKIPGTSNNGLEEEFKKLTSIKIQNDKMRTGNLPANMKKNRVLQIIPYEFNRVIIPVKRGEENTDYVNASFIDGYRQKDSYIASQGPLLHTIEDFWRMIWEWKSCSIVMLTELEERGQEKCAQYWPSDGLVSYGDITVELKKEEECESYTVRDLLVTNTRENKSRQIRQFHFHGWPEVGIPSDGKGMISIIAAVQKQQQQSGNHPITVHCSAGAGRTGTFCALSTVLERVKAEGILDVFQTVKSLRLQRPHMVQTLEQYEFCYKVVQEYIDAFSDYANFK

SEQ ID NO: 132532 - protein, 802 aa, Artificial Sequence
  derived and/or modified sequence
MDSWFILVLLGSGLICVSANNATTVAPSVGITRLINSSTAEPVKEEAKTSNPTSSLTSLSVAPTFSPNITLGPTYLTTVNSSDSDNGTTRTASTNSIGITISPNGTWLPDNQFTDARTEPWEGNSSTAATTPETFPPSGNSDSKDRRDETPIIAVMVALSSLLVIVFIIIVLYMLRFKKYKQAGSHSNSFRLSNGRTEDVEPQSVPLLARSPSTNRKYPPLPVDKLEEEINRRMADDNKLFREEFNALPACPIQATCEAASKEENKEKNRYVNILPYDHSRVHLTPVEGVPDSDYINASFINGYQEKNKFIAAQGPKEETVNDFWRMIWEQNTATIVMVTNLKERKECKCAQYWPDQGCWTYGNIRVSVEDVTVLVDYTVRKFCIQQVGDMTNRKPQRLITQFHFTSWPDFGVPFTPIGMLKFLKKVKACNPQYAGAIVVHCSAGVGRTGTFVVIDAMLDMMHTERKVDVYGFVSRIRAQRCQMVQTDMQYVFIYQALLEHYLYGDTELEVTSLETHLQKIYNKIPGTSNNGLEEEFKKLTSIKIQNDKMRTGNLPANMKKNRVLQIIPYEFNRVIIPVKRGEENTDYVNASFIDGYRQKDSYIASQGPLLHTIEDFWRMIWEWKSCSIVMLTELEERGQEKCAQYWPSDGLVSYGDITVELKKEEECESYTVRDLLVTNTRENKSRQIRQFHFHGWPEVGIPSDGKGMISIIAAVQKQQQQSGNHPITVHCSAGAGRTGTFCALSTVLERVKAEGILDVFQTVKSLRLQRPHMVQTLEQYEFCYKVVQEYIDAFSDYANFK

SEQ ID NO: 132533 - protein, 200 aa, Artificial Sequence
  derived and/or modified sequence
MDSWFILVLLGSGLICVSANNATTVAPSVGITRLINSSTAEPVKEEAKTSNPTSSLTSLSVAPTFSPNITLGPTYLTTVNSSDSDNGTTRTASTNSIGITISPNGTWLPDNQFTDARTEPWEGNSSTAATTPETFPPSGNSDSKDRRDETPIIAVMVALSSLLVIVFIIIVLYMLRFKKYKQAGSHSNSFRLSNGRTEDV

SEQ ID NO: 132534 - protein, 813 aa, Artificial Sequence
  derived and/or modified sequence
MDDAVQITKISMDSWFILVLLGSGLICVSANNATTVAPSVGITRLINSSTAEPVKEEAKTSNPTSSLTSLSVAPTFSPNITLGPTYLTTVNSSDSDNGTTRTASTNSIGITISPNGTWLPDNQFTDARTEPWEGNSSTAATTPETFPPSGNSDSKDRRDETPIIAVMVALSSLLVIVFIIIVLYMLRFKKYKQAGSHSNSFRLSNGRTEDVEPQSVPLLARSPSTNRKYPPLPVDKLEEEINRRMADDNKLFREEFNALPACPIQATCEAASKEENKEKNRYVNILPYDHSRVHLTPVEGVPDSDYINASFINGYQEKNKFIAAQGPKEETVNDFWRMIWEQNTATIVMVTNLKERKECKCAQYWPDQGCWTYGNIRVSVEDVTVLVDYTVRKFCIQQVGDMTNRKPQRLITQFHFTSWPDFGVPFTPIGMLKFLKKVKACNPQYAGAIVVHCSAGVGRTGTFVVIDAMLDMMHTERKVDVYGFVSRIRAQRCQMVQTDMQYVFIYQALLEHYLYGDTELEVTSLETHLQKIYNKIPGTSNNGLEEEFKKLTSIKIQNDKMRTGNLPANMKKNRVLQIIPYEFNRVIIPVKRGEENTDYVNASFIDGYRQKDSYIASQGPLLHTIEDFWRMIWEWKSCSIVMLTELEERGQEKCAQYWPSDGLVSYGDITVELKKEEECESYTVRDLLVTNTRENKSRQIRQFHFHGWPEVGIPSDGKGMISIIAAVQKQQQQSGNHPITVHCSAGAGRTGTFCALSTVLERVKAEGILDVFQTVKSLRLQRPHMVQTLEQYEFCYKVVQEYIDAFSDYANFK

SEQ ID NO: 132535 - protein, 175 aa, Artificial Sequence
  derived and/or modified sequence
MDSWFILVLLGSGLICVSANNATTVAPSVGITRLINSSTAEPVKEEAKTSNPTSSLTSLSVAPTFSPNITLGPTYLTTVNSSDSDNGTTRTASTNSIGITISPNGTWLPDNQFTDARTEPWEGNSSTAATTPETFPPSGNSDSKDRRDETPIIAVMVALSSLLVIVFIIIVLYML

SEQ ID NO: 132536 - protein, 138 aa, Artificial Sequence
  derived and/or modified sequence
MDSWFILVLLGSGLICVSANNATTVAPSVGITRLINSSTAEPVKEEAKTSNPTSSLTSLSVAPTFSPNITLGPTYLTTVNSSDSDNGTTRTASTNSIGITISPNGTWLPDNQFTDARTEPWEGNSSTAATTPETFPPS

SEQ ID NO: 132537 - protein, 412 aa, Artificial Sequence
  derived and/or modified sequence
MTNRKPQRLITQFHFTSWPDFGVPFTPIGMLKFLKKVKACNPQYAGAIVVHCSAGVGRTGTFVVIDAMLDMMHTERKVDVYGFVSRIRAQRCQMVQTDMQYVFIYQALLEHYLYGDTELEVTSLETHLQKIYNKIPGTSNNGLEEEFKKLTSIKIQNDKMRTGNLPANMKKNRVLQIIPYEFNRVIIPVKRGEENTDYVNASFIDGYRQKDSYIASQGPLLHTIEDFWRMIWEWKSCSIVMLTELEERGQEKCAQYWPSDGLVSYGDITVELKKEEECESYTVRDLLVTNTRENKSRQIRQFHFHGWPEVGIPSDGKGMISIIAAVQKQQQQSGNHPITVHCSAGAGRTGTFCALSTVLERVKAEGILDVFQTVKSLRLQRPHMVQTLEQYEFCYKVVQEYIDAFSDYANFK

SEQ ID NO: 132538 - DNA, 2409 bp, Artificial Sequence
  derived and/or modified sequence
atggactcgtggtttatactcgtcctccttgggtccggactcatatgcgtttcagccaataacgcaacgaccgtagctccatccgtagggatcacacgcctgattaatagcagcaccgccgagccggtaaaggaagaggccaagacgtccaacccaacttcgtcccttacatcactttccgtggcacccacatttagccctaacattacactgggacctacataccttacaactgtaaactcctccgattctgataacgggaccactcgcacagcatcgacaaattccatcggaattaccatttcacccaacggaacctggctccctgacaatcaattcactgatgcacgtaccgaaccttgggagggaaactctagtactgccgctactacccccgagactttcccaccgtcaggtaactctgacagcaaagatcggcgcgatgaaaccccaattatcgccgttatggtggcattatcgtcactcctggtgatagtgttcatcatcatcgtgctgtatatgcttaggtttaagaaatacaaacaggctgggtcccacagtaactcttttcggcttagcaatggcagaaccgaagacgtggaaccccagtccgtgccgttgttggctaggtcaccaagcaccaatcggaagtatccgcctctccctgtggacaagctggaagaggaaatcaatcgccgaatggccgacgacaacaaactcttccgggaggagtttaacgctctgcctgcgtgtccaatccaggcaacctgcgaggcagcttcaaaagaagaaaataaagaaaagaataggtatgtgaatatactcccatatgaccactctagggtacacctgacccccgttgaaggagtgcccgactccgactatattaacgctagctttatcaacggttatcaggaaaaaaacaagttcatcgcagcccaaggacctaaggaagagacagtgaacgacttctggaggatgatttgggaacagaatactgcaaccatagtcatggtaactaacctgaaagagaggaaggaatgtaaatgtgctcaatattggcctgatcagggatgctggacttatggaaatattagggtttctgtagaggacgtgacagtactggtcgactacacagtgcggaagttctgtatccagcaggttggagatatgaccaaccggaaaccccagaggctcatcacacaattccacttcacaagttggccggacttcggggtaccattcacccccatagggatgttgaagttcctgaagaaggtgaaggcctgtaaccctcagtacgccggcgccattgtagttcactgttctgcgggagttggaaggaccgggacgttcgtcgtgattgatgccatgctggacatgatgcacacagaacgtaaggtcgacgtgtacggcttcgtatctcgaatccgagcccagagatgtcagatggtccaaaccgatatgcagtatgtgttcatttatcaggctctgctcgaacattatctgtatggggatactgaactcgaagtgacctcccttgagacccacctacagaagatctataataaaatcccagggacgagcaataacggcttagaagaagagtttaaaaaactgactagtatcaaaatccaaaatgataaaatgcgcacaggcaacctgccggcaaacatgaaaaagaacagagtcttgcaaattatcccctacgaattcaatcgggtgattatccccgtgaagcgtggggaagagaacacggattacgttaacgcaagcttcattgacgggtaccgtcagaaagatagctacatcgcatctcaggggcctttactgcacactatagaagacttttggagaatgatctgggaatggaagtcatgttccatcgtgatgttaacggagctggaagaaaggggtcaagaaaagtgtgctcagtactggccttcagacgggcttgtgtcatacggagatatcactgtcgagctgaagaaggaagaggagtgtgagtcctacacagtccgcgacttgctggttaccaacacacgggaaaacaaatctcgacagattcgacagttccatttccatggttggcctgaagtgggaatccccagcgatggaaagggaatgatcagtataattgctgccgtgcaaaagcaacagcagcagagcggcaatcaccctataaccgtgcactgttccgccggagcaggaagaacagggaccttctgtgctctgtcaacggtactcgagcgcgtgaaggcagagggcatcctcgatgtgttccagaccgtgaagtctttgaggttacagcggccacacatggttcagacacttgaacaatatgagttttgctataaagtggtccaggaatacatcgacgctttctccgactacgctaattttaaatag

SEQ ID NO: 132539 - DNA, 2409 bp, Artificial Sequence
  derived and/or modified sequence
atggactcctggtttatccttgtcctcctggggtctggcctgatttgcgtgtcagcgaataacgctaccactgtggcccctagtgttggcattactcggctcatcaactccagcacagcagagcccgtgaaggaggaagcaaagacttccaatcccactagttccctgacaagcctgtctgtggccccaactttcagtcccaatataactctaggccccacctacctgactaccgtgaactcctctgattcggacaacggcacaacacgaaccgcctctacgaactcaatcggcatcacaatttccccaaacgggacatggctccccgataaccagttcaccgacgctcgcactgagccctgggagggcaattcctctacagcggccacaacccccgagactttcccgccgagtggcaactcggacagcaaagatcggcgagatgaaacacccataatcgcagtaatggtggccctatcatccctgctggtgatagtgtttataattattgtgctctacatgctgagatttaaaaaatacaagcaggccggctcacatagtaacagctttcgattgtcaaatggccgcacagaagatgtagaaccccagtccgtgccactcctggctcggagtccaagcacaaatcggaagtatcctcccctgccggtggacaagcttgaagaggaaatcaacaggcggatggcagacgataacaagctgttcagggaggaattcaatgcgctgccagcctgtcccatacaggccacgtgcgaggcagcctctaaagaagagaacaaagagaagaatagatacgtgaatatccttccgtacgatcattccagggtccacctgacacctgttgagggggtgccagattcggactatataaacgccagctttataaacggatatcaggagaagaacaaatttatcgcggctcaggggcctaaggaagagaccgtgaacgatttctggaggatgatttgggagcagaacacggccacgattgtaatggtaacaaacctaaaagaacgcaaagaatgcaaatgtgcccagtactggccagaccaggggtgttggacctatggcaatattagagtgtcagtggaggatgtgacggtgctcgtggattacaccgtccgaaaattttgtattcaacaagtcggagacatgaccaaccggaagcctcagcgactgatcacacagtttcatttcactagttggccggacttcggtgtcccatttaccccaattggaatgctcaagtttcttaagaaagtcaaggcctgcaacccccagtatgcaggggctatcgtcgtgcattgctcagccggcgtcgggaggacaggcacctttgtggtgatcgatgcaatgctcgacatgatgcacactgagcgcaaggttgacgtctatggtttcgtgtcgcgcatccgggctcaacggtgtcagatggtgcagaccgatatgcagtacgtgtttatctaccaggctctcctcgagcactatctctatggcgatactgaactggaagtcacttctctggaaacccacctacaaaagatttacaacaagatccccgggactagtaacaatggcctggaagaagagttcaaaaagctcacctctataaagatccagaacgataaaatgcgcactggcaatctgcccgctaacatgaaaaaaaaccgcgtgttgcaaatcatcccatacgagtttaacagggtgatcattccagtgaaacggggcgaggagaacactgactacgtgaacgccagttttatcgacggataccggcagaaggactcctatatcgcctcacagggtccactccttcatactattgaggatttttggagaatgatttgggagtggaagtcatgttccattgttatgttaacagaacttgaagagcggggacaagaaaagtgtgcccagtactggccctcagacggattagtaagctatggggacatcacagtcgagcttaagaaggaggaagagtgcgagtcatatactgttagagatctgttggtgactaacaccagagaaaacaagtctagacaaataaggcaatttcacttccacggatggcccgaagtaggcattccaagtgatgggaaaggaatgatcagcatcattgccgcagtgcaaaagcagcaacagcaatccgggaaccatccaataaccgtgcactgtagcgccggcgccgggcgcaccgggactttctgcgccttatctacagtgctggagcgggtgaaagcggaggggattctcgacgtattccagaccgtgaagtctctgcgattgcagcgcccacatatggtgcagactctggaacagtacgaattctgctacaaggtcgtccaggagtatatcgacgctttcagcgactacgcgaatttcaagtag

SEQ ID NO: 132540 - DNA, 603 bp, Artificial Sequence
  derived and/or modified sequence
atggattcctggttcatcctggtcctgctgggatcaggcctgatttgtgtgtcagccaacaacgcaacgacagttgcccctagcgtgggtattacgagactgatcaattcgtccaccgccgagcctgtcaaagaagaagcaaagacttccaatccaacctcttccctcaccagtctgtccgttgcaccaacgttcagccccaatatcactctcggtccaacctatttaacaacggtgaattcctctgacagcgataacgggaccacccgaacagcctcgacaaattcaattggcatcaccatctccccgaacggaacctggctccctgacaaccagtttaccgacgcaaggacggaaccatgggaagggaacagctccactgctgccaccacaccggagactttccctccgagcggcaatagcgattctaaggatcgccgcgatgaaactcccattattgctgtaatggttgctctttcatcattgctcgtgattgtattcatcatcatcgtgctgtacatgttgaggttcaagaagtataaacaagcaggtagccactcgaattccttcagactgtccaacggccgcacagaggacgtctag

SEQ ID NO: 132541 - DNA, 2442 bp, Artificial Sequence
  derived and/or modified sequence
atggatgatgccgttcagattactaagatctccatggattcctggtttatactggtcttgctcggcagcggccttatttgcgtctccgccaataatgctaccacggtggccccgtcagtggggataacgaggctgattaactcttctactgccgagcctgtgaaagaggaggctaaaacttcaaatcctacttccagcctcacttcactgtccgtggcccccaccttcagccccaacattacccttggcccaacttacttaacaactgtgaactccagcgacagcgacaacgggacaactcggacggcctcaaccaacagcatcggcatcacaatctctcctaacggtacatggcttcccgacaaccagtttaccgacgcaaggacagaaccctgggagggcaattcttccacagctgcaacaacccccgaaacctttcccccctcagggaacagtgattcaaaggataggcgggacgaaacaccgatcatagctgtcatggttgccctgagttcacttctcgtcattgtcttcattataatagtgttatatatgctgcgctttaaaaaatacaaacaagccggctctcacagcaatagtttcaggctgtcaaatggacgcaccgaagatgtcgagccacaaagcgtgcctctgttggcccgctccccctccactaatcgcaaatatccgcctctgcctgtggataagctggaggaggagatcaacagacggatggcggacgacaataaactatttcgcgaggagttcaatgccctgcccgcatgtcccattcaagcgacctgtgaggcggcgtccaaggaagagaacaaagagaagaatcggtacgtgaatattttaccctatgaccacagtagggtacacttgacacccgttgagggcgtaccagactccgattacatcaacgctagctttattaacggttaccaggagaaaaacaagttcatcgcagcacagggccccaaagaggagaccgtgaacgacttctggaggatgatatgggagcaaaataccgctacaattgtgatggtgaccaatctgaaggaacgcaaagagtgtaagtgtgcccaatattggcccgaccaggggtgctggacctacggcaatatccgagtgagcgtcgaggatgtcaccgtgttagtggattatacagtaaggaaattctgtatccagcaagttggcgacatgactaatcggaaaccccagaggctgatcactcagttccactttaccagttggcccgacttcggtgtgccattcacacctatcggaatgctcaagtttttaaaaaaagttaaggcctgtaacccacagtacgctggcgccatagtcgtacattgttccgcaggcgttggccgcaccggcacatttgtcgtgatcgatgccatgctggacatgatgcatacagaacgtaaggtggacgtatatggatttgtgagtagaattcgcgctcagcgctgtcaaatggtgcagactgatatgcagtacgtcttcatttaccaagcactcctcgaacactacctctacggggacacagaacttgaagtaacaagtcttgagacccaccttcagaagatctacaataagattcctggtacctctaataatggcctagaagaagagttcaaaaaacttacatccatcaaaatccaaaacgacaaaatgcggaccgggaatcttcccgcgaatatgaaaaagaatcgtgtcctgcagatcatcccatacgagtttaacagagtcatcatccccgtaaaaaggggggaagagaatactgactatgtgaatgcaagctttattgacggatatcgacagaaggattcttacatcgccagccaaggaccactgctgcacacaatcgaggacttctggaggatgatctgggaatggaagtcctgtagtatcgttatgctcactgagctggaggagcgtggtcaagagaagtgcgctcaatactggcccagcgatggtttggtgtcatacggagatataaccgtagaacttaaaaaggaagaggagtgcgagtcctacactgtgcgcgatctactggtgaccaacacgagagagaacaagagtcgccaaattcggcagttccacttccacggctggccggaggtaggtatcccctccgatggaaagggtatgatttctatcatagcagccgtgcagaaacagcagcaacagagtggaaatcaccctattacagtgcactgtagtgccggcgccggcaggaccggtaccttttgtgccctgagcaccgtcctggagagagtgaaggcagaggggatacttgacgttttccagaccgtcaagtccctacgacttcagcgcccccacatggtgcaaaccttagagcagtatgaattttgttacaaagtggtgcaggaatatatcgacgcattttccgattacgccaacttcaagtag

SEQ ID NO: 132542 - DNA, 528 bp, Artificial Sequence
  derived and/or modified sequence
atggattcttggtttatcctcgtactgctcgggagcgggttgatctgcgtctctgctaacaacgccacaactgtggctccatcagtcgggatcactcggctgattaatagctctacagccgaacccgtgaaagaagaggctaagactagtaatcccacctcctctttgacctctttgtcagtggccccgactttttcacctaacattacattgggtcccacttacctgacaaccgtgaattcctccgacagtgataatggcactacacgtacagcgtcgacaaactctatcgggatcacaatttctcctaacgggacttggctgcccgataatcagttcaccgacgcaagaaccgaaccatgggagggcaattctagcactgccgccactacgcctgagacatttcccccgtccggcaactcagacagtaaggacagaagggatgaaacacctattatcgccgtcatggttgccctgagttctttgctcgtcatcgtgtttatcatcatcgtgctgtacatgctgtag

SEQ ID NO: 132543 - DNA, 2409 bp, Artificial Sequence
  derived and/or modified sequence
atggacagctggttcatcctggtgctgctgggcagcggcctcatctgtgtgtctgccaacaatgccaccaccgtggcccccagcgtgggcatcaccaggctcatcaacagcagcacagctgagcctgtgaaggaggaggccaagaccagcaaccccaccagcagcctgaccagcctgtctgtggcccccaccttcagccccaacatcaccctgggccccacctacctgaccaccgtgaacagcagtgacagcgacaatggcaccaccaggacagccagcaccaacagcatcggcatcaccatcagccccaacggcacctggctgcctgacaaccagttcacagatgccaggacagagccctgggagggcaacagcagcacagctgccaccaccccagagaccttcccccccagcggcaacagcgacagcaaggacagaagagatgagacccccatcatcgctgtgatggtggccctgagcagcctgctggtgattgtgttcatcatcatcgtgctgtacatgctgcgcttcaagaagtacaagcaggccggcagccacagcaacagcttccggctgagcaatggccgcacagaagatgtggagccccagagcgtgcccctgctggcccggagccccagcaccaacaggaagtacccacccctgcctgtggacaagctggaggaggagatcaacagaaggatggctgatgacaacaagctgttccgggaggagttcaatgccctgcctgcctgccccatccaggccacctgtgaggccgccagcaaggaggagaacaaggagaagaacagatatgtgaacatcctgccctatgaccacagccgggtgcacctgacccctgtggagggcgtgcctgacagcgactacatcaatgccagcttcatcaatggctaccaggagaagaacaagttcatcgccgcccagggccccaaggaggagaccgtgaatgacttctggaggatgatctgggagcagaacacagccaccatcgtgatggtgaccaacctgaaggagaggaaagaatgtaaatgtgcccagtactggccagaccagggctgctggacctacggcaacatccgggtgtctgtggaggatgtgacagtgctggtggactacacagtgaggaagttctgcatccagcaggtgggggacatgaccaacaggaagccccagaggctcatcacccagttccacttcacctcctggccagactttggagtgcccttcacccccatcggcatgctgaagttcctgaagaaggtgaaggcctgcaacccccagtatgctggggccatcgtggtgcactgcagcgctggggtgggccgcacaggcacctttgtggtgattgatgccatgctggacatgatgcacacagagaggaaggtggatgtgtatggctttgtgagccgcatccgggcccagcgctgccagatggtgcagacagacatgcagtatgtgttcatctaccaggccctgctggagcactacctgtatggagacacagagctggaggtgaccagcctggagacccacctgcagaagatctacaacaagatccctggcaccagcaacaacggcctggaggaggagttcaagaagctgaccagcatcaagatccagaatgacaagatgaggacaggcaacctgcctgccaacatgaagaagaacagagtgctgcagatcatcccctatgagttcaacagagtcatcatccctgtgaagagaggagaggagaacacagattatgtgaatgccagcttcattgatggctaccggcagaaggacagctacatcgccagccagggccccctgctgcacaccatcgaggacttctggaggatgatctgggagtggaagagctgcagcatcgtgatgctgacagagctggaggagcggggccaggagaagtgtgcccagtactggcccagtgatggcctggtgtcctatggagacatcaccgtggagctgaagaaggaggaggagtgtgagagctacacagtgcgggacctgctggtgaccaacacccgggagaacaagagccggcagatccggcagttccacttccacggctggccagaggtgggcatccccagtgatggcaagggcatgatcagcatcatcgctgctgtgcagaagcagcagcagcagagcggcaaccaccccatcaccgtgcactgcagcgctggggccggccgcacaggcaccttctgtgccctgagcacagtgctggagcgggtgaaggccgagggcatcctggatgtgttccagacagtgaagagcctgcggctgcagaggccccacatggtgcagaccctggagcagtatgagttctgctacaaggtggtgcaggagtacattgatgccttcagtgactatgccaacttcaagtag

SEQ ID NO: 132544 - DNA, 603 bp, Artificial Sequence
  derived and/or modified sequence
atggacagctggttcatcctggtgctgctgggcagcggcctcatctgtgtgtctgccaacaatgccaccaccgtggcccccagcgtgggcatcaccaggctcatcaacagcagcacagctgagcctgtgaaggaggaggccaagaccagcaaccccaccagcagcctgaccagcctgtctgtggcccccaccttcagccccaacatcaccctgggccccacctacctgaccaccgtgaacagcagtgacagcgacaatggcaccaccaggacagccagcaccaacagcatcggcatcaccatcagccccaacggcacctggctgcctgacaaccagttcacagatgccaggacagagccctgggagggcaacagcagcacagctgccaccaccccagagaccttcccccccagcggcaacagcgacagcaaggacagaagagatgagacccccatcatcgctgtgatggtggccctgagcagcctgctggtgattgtgttcatcatcatcgtgctgtacatgctgcgcttcaagaagtacaagcaggccggcagccacagcaacagcttccggctgagcaatggccgcacagaagatgtgtag

SEQ ID NO: 132545 - DNA, 2442 bp, Artificial Sequence
  derived and/or modified sequence
atggatgatgctgtgcagatcaccaagatctccatggacagctggttcatcctggtgctgctgggcagcggcctcatctgtgtgtctgccaacaatgccaccaccgtggcccccagcgtgggcatcaccaggctcatcaacagcagcacagctgagcctgtgaaggaggaggccaagaccagcaaccccaccagcagcctgaccagcctgtctgtggcccccaccttcagccccaacatcaccctgggccccacctacctgaccaccgtgaacagcagtgacagcgacaatggcaccaccaggacagccagcaccaacagcatcggcatcaccatcagccccaacggcacctggctgcctgacaaccagttcacagatgccaggacagagccctgggagggcaacagcagcacagctgccaccaccccagagaccttccccccatctggcaacagcgacagcaaggacagaagagatgagacccccatcatcgctgtgatggtggccctgagcagcctgctggtgattgtgttcatcatcatcgtgctgtacatgctgcgcttcaagaagtacaagcaggccggcagccacagcaacagcttccggctgagcaatggaagaacagaagatgtggagccccagagcgtgcccctgctggcccggagccccagcaccaacaggaagtacccacccctgcctgtggacaagctggaggaggagatcaacagaaggatggctgatgacaacaagctgttccgggaggagttcaatgccctgcctgcctgccccatccaggccacctgtgaggccgccagcaaggaggagaacaaggagaagaaccgctacgtgaacatcctgccctatgaccacagccgggtgcacctgacccctgtggagggcgtgcctgacagcgactacatcaatgccagcttcatcaatggctaccaggagaagaacaagttcatcgccgcccagggccccaaggaggagaccgtgaatgacttctggaggatgatctgggagcagaacacagccaccatcgtgatggtgaccaacctgaaggagaggaaggagtgcaagtgtgcccagtactggccagaccagggctgctggacctacggcaacatccgggtgtctgtggaggatgtgacagtgctggtggactacacagtgaggaagttctgcatccagcaggtgggggacatgaccaacaggaagccccagaggctcatcacccagttccacttcacctcctggccagactttggagtgcccttcacccccatcggcatgctgaagttcctgaagaaggtgaaggcctgcaacccccagtatgctggggccatcgtggtgcactgcagcgctggggtgggccgcacaggcacctttgtggtgattgatgccatgctggacatgatgcacacagagaggaaggtggatgtgtatggctttgtgagccgcatccgggcccagcgctgccagatggtgcagacagacatgcagtatgtgttcatctaccaggccctgctggagcactacctgtatggagacacagagctggaggtgaccagcctggagacccacctgcagaagatctacaacaagatccctggcaccagcaacaacggcctggaggaggagttcaagaagctgaccagcatcaagatccagaatgacaagatgaggactggaaacctgcctgccaacatgaagaagaacagagtgctgcagatcatcccctatgagttcaacagagtcatcatccctgtgaagagaggagaagaaaatacagattatgtgaatgccagcttcattgatggctaccggcagaaggacagctacatcgccagccagggccccctgctgcacaccatcgaggacttctggaggatgatctgggagtggaagagctgcagcatcgtgatgctgacagagctggaggagcggggccaggagaagtgtgcccagtactggcccagtgatggcctggtgtcctatggagacatcaccgtggagctgaagaaggaggaggagtgtgagagctacacagtgcgggacctgctggtgaccaacacccgggagaacaagagccggcagatccggcagttccacttccacggctggccagaggtgggcatccccagtgatggcaagggcatgatcagcatcatcgctgctgtgcagaagcagcagcagcagagcggcaaccaccccatcaccgtgcactgcagcgctggagctggccgcacaggcaccttctgtgccctgagcacagtgctggagcgggtgaaggccgagggcatcctggatgtgttccagacagtgaagagcctgcggctgcagaggccccacatggtgcagaccctggagcagtatgagttctgctacaaggtggtgcaggagtacattgatgccttcagtgactatgccaacttcaagtag

SEQ ID NO: 132546 - DNA, 528 bp, Artificial Sequence
  derived and/or modified sequence
atggacagctggttcatcctggtgctgctgggcagcggcctcatctgtgtgtctgccaacaatgccaccaccgtggcccccagcgtgggcatcaccaggctcatcaacagcagcacagctgagcctgtgaaggaggaggccaagaccagcaaccccaccagcagcctgaccagcctgtctgtggcccccaccttcagccccaacatcaccctgggccccacctacctgaccaccgtgaacagcagtgacagcgacaatggcaccaccaggacagccagcaccaacagcatcggcatcaccatcagccccaacggcacctggctgcctgacaaccagttcacagatgccaggacagagccctgggagggcaacagcagcacagctgccaccaccccagagaccttcccccccagcggcaacagcgacagcaaggacagaagagatgagacccccatcatcgctgtgatggtggccctgagcagcctgctggtgattgtgttcatcatcatcgtgctgtacatgctgtag

SEQ ID NO: 132547 - DNA, 2409 bp, Artificial Sequence
  derived and/or modified sequence
atggacagctggttcatcctggtgctgctgggcagcggcctgatctgcgtgtccgccaataatgctactacagttgccccaagtgtgggcattactagattgatcaattcaagtaccgccgagccagtcaaggaagaagcaaagacctctaacccaactagctcgctgaccagcctgtccgtggcacccacattcagccctaatattacactgggccccacctatctgactacggtgaactcatctgatagtgataatgggacgacgcgaaccgcctccaccaactccatcggaatcaccatctctcccaatggaacttggttgcctgacaatcaatttaccgacgcgcgcactgaaccttgggaggggaactcctctaccgcagctaccacccccgaaaccttcccgccaagtggcaatagcgactcgaaggatcgtagggatgagactcctattatcgccgtgatggtggctctatcaagcctgctagtgatcgtattcataattatcgtgttgtacatgctgcggttcaaaaagtacaaacaagctggatctcacagcaattccttccgtctcagtaatggtaggaccgaggatgtagaaccacagagcgtccctctcttggcccggtcacctagcaccaatcgaaaatacccccccctgccggtcgataaactcgaggaggagattaaccgcagaatggccgatgataacaaactttttcgagaagagttcaatgctctgccagcatgtccaatccaggccacttgcgaggctgctagtaaagaggagaataaggaaaaaaatagatacgtgaatattctaccatatgaccattctagagtacacctgacacctgtcgagggagtccctgattctgattacatcaatgcgtcattcatcaatggctatcaggagaaaaataagttcatcgccgcacagggacctaaagaagagacagttaacgacttctggaggatgatttgggagcagaataccgcgacaatcgtgatggtaaccaatttaaaagagaggaaggagtgtaagtgtgcacagtactggcctgaccaaggttgctggacatacgggaatatccgcgtcagcgtggaggacgtcacagtcctggtggattataccgtaagaaaattctgcatccagcaggtcggcgatatgactaatcgcaagccgcagcggcttataacacaatttcacttcacctcttggccagatttcggcgtcccgtttactcctataggaatgctaaagttcctgaagaaagttaaggcttgtaatcctcagtacgccggagctattgtggtgcattgtagtgccggggtgggtcgcacggggaccttcgttgttatcgacgccatgctggacatgatgcacaccgagcgcaaggtcgacgtctatggcttcgtctcccgaatccgtgcccaaagatgccagatggtgcagacagacatgcaatatgtttttatttatcaggctctgctggagcactacctgtacggagacacagagctggaggttactagcctggagacccacctacagaagatctacaacaaaatcccaggaacaagtaacaatggcctagaggaagaattcaaaaaactcacttcgattaaaatccagaatgacaaaatgcggacgggaaatttacccgctaacatgaagaagaatagggtcctgcagatcatcccctatgaattcaaccgcgtgatcatccctgttaaaaggggcgaggaaaatacggactatgtgaatgcatccttcatagacgggtatcgccagaaggattcttacatcgcctcccagggacctctccttcacaccattgaagacttctggcggatgatctgggaatggaaatcttgcagcattgttatgctgactgaactggaggagcgcgggcaagagaaatgtgcacagtactggcccagtgacggccttgtgagctacggtgatatcacagtggaattgaaaaaagaagaggaatgcgagagttataccgtgagagacctcctggttactaatacacgggaaaataagagccggcaaatccggcagttccatttccacggttggcctgaagttggcatcccttctgacggtaagggcatgatttcaataattgccgccgttcagaagcagcagcaacaatcaggcaaccatccaatcaccgtgcattgtagcgcaggagctggtcggacaggaacgttctgtgcgctgagtactgtcctcgagcgggtcaaagcggaaggaatactcgatgtcttccagaccgtcaagtctttgagactgcaacgaccccacatggtccaaacccttgagcagtatgagttctgctacaaggtggtacaggagtatatcgatgctttctctgattacgcaaatttcaagtag

SEQ ID NO: 132548 - DNA, 2409 bp, Artificial Sequence
  derived and/or modified sequence
atggacagctggttcatcctggtgctgctgggcagcggcctgatctgtgtgtccgctaacaacgctacaactgtcgccccgagtgttgggattacccgcttgatcaatagtagcaccgctgagcccgtcaaagaggaagccaaaacatctaatccgaccagtagcctcactagcctaagtgtcgcgccgaccttctcccctaatatcacccttggacctacctacctgaccacagtcaattcgagcgatagtgacaatggaaccaccagaacagccagcacaaactccattgggattaccatctcaccaaacggcacctggctgcccgacaatcagtttaccgacgcccgcaccgaaccttgggagggcaactcatccaccgctgctaccacccctgagacattccccccatcgggcaatagcgactccaaggaccggagagacgagacaccaatcattgcggtgatggtagctttgtcttccttactggttattgtgtttatcatcatcgttctctacatgttgagatttaagaagtataaacaggcgggaagtcactcaaacagctttcgcctgtctaacggacgcactgaggatgtagagccgcagtccgtgcctctgctggctcgctcaccgtcaactaacagaaaatacccgccactcccagttgataaacttgaagaggaaatcaacagaaggatggctgacgacaacaaactctttagagaagagtttaacgccttacccgcctgtcctatccaagccacctgcgaggcagccagcaaggaagaaaacaaggaaaaaaacaggtacgtgaatatacttccttatgaccattctagagttcatttgacgccggtcgaaggtgtgcctgactccgattacattaatgccagtttcataaatggctaccaggagaagaataagtttatcgcagcccagggtccaaaggaagagacagttaacgacttttggcgaatgatctgggaacagaatactgccacaatagttatggttactaatttgaaagagcgcaaggagtgtaaatgcgctcagtattggcccgatcagggctgctggacatatggcaatatccgagtaagcgttgaggatgtgaccgtccttgtggactatactgtgagaaaattttgcatccaacaggtgggagatatgaccaatcggaagccccagcgcctgatcacacagttccacttcactagctggccagattttggcgtgcctttcaccccaattggaatgttgaaattcttaaagaaagtgaaggcatgtaacccacagtacgccggggcaattgtagtccattgctccgcaggcgtgggccgcacaggcactttcgtcgtgatcgacgccatgctggatatgatgcatactgagaggaaagtcgacgtctatgggttcgtgtcacgtattcgtgcccaaaggtgccagatggtacagactgatatgcagtacgtgtttatctaccaggctctgctcgaacactacttgtacggcgacacagaacttgaggttacatctctggagacccatctacagaaaatctataataagattcccgggacatccaacaatgggctggaggaggagttcaagaaactgacatcaatcaagatccagaatgacaaaatgagaacgggaaacctacctgccaatatgaaaaaaaatcgggtgttgcagatcatcccatacgaattcaatcgagtgatcattccagtcaagcggggggaagaaaacaccgattatgtgaacgcctccttcatcgacggctacaggcagaaggacagctacatcgcatcccaggggccactgctgcacaccatagaggatttttggaggatgatttgggagtggaagtcttgttccatcgtaatgctaacagagctcgaagagaggggtcaggaaaagtgcgctcagtattggccctccgacggtcttgtgtcttacggcgacattactgtggaacttaagaaggaggaggaatgtgagtcgtacacagtaagagacctgttggtgactaatacgagagagaataaatcacgccagatccgacaatttcatttccatgggtggcccgaggtgggcattccctccgacggcaagggaatgatctctataatcgcggcagtgcagaaacagcagcagcagtctgggaaccacccaatcactgtgcattgtagcgccggtgccggaagaacagggacattctgcgccctgtctaccgtgttagagcgcgttaaggcagaggggatcctggatgtgttccaaacagtgaagtcccttagactccagcggccacatatggtacagactctcgaacagtatgagttttgctacaaggtagtgcaggagtatatcgacgcctttagcgattatgcaaactttaaatag

SEQ ID NO: 132549 - DNA, 603 bp, Artificial Sequence
  derived and/or modified sequence
atggacagctggttcatcctggtgctgctgggcagcggcctgatctgcgtgagcgccaacaatgcaaccactgtcgccccctctgtgggcataacaagactgattaactcttccaccgcggaacctgtgaaagaggaagccaagacatcaaatccaacttcatcattaacttcattatctgtcgcaccgaccttcagccccaacatcacactgggccccacatatctgaccaccgtgaattcatcagattctgataatggcaccacccgtacagccagcaccaacagcatcggtattactatttctcccaatggtacttggctgcccgataatcagttcaccgacgcaaggacggaaccatgggaaggcaatagctctactgccgctacaaccccagaaacgtttccacccagtgggaattccgacagcaaggaccggagagacgagacccctattatcgctgtgatggttgctctgtcgtctcttcttgtgatcgtgttcataattatagtgttgtatatgctgcgtttcaaaaagtataagcaggccgggtctcattcaaacagtttcagacttagcaacggccgaaccgaggatgtctag

SEQ ID NO: 132550 - DNA, 2442 bp, Artificial Sequence
  derived and/or modified sequence
atggacgacgccgtgcagatcaccaagatcagcatggacagctggttcattctggtattattggggtccggcttgatttgcgtgagcgccaacaatgccacaaccgtagctcccagcgtaggcatcacaaggctgatcaatagcagcactgccgaacctgtcaaggaagaggctaagacatccaacccgacctcatctctgacatctcttagcgtagctcctactttttcccccaatatcacactcggacccacatatttaacaactgttaacagctctgactccgacaacggcactacacgcactgcttccaccaattcgattggtatcacaataagcccaaatggaacctggctcccagataaccagttcaccgacgcacggaccgagccctgggaggggaactccagtacagccgcgaccacgcctgagacattccctcctagcggtaatagcgattctaaagaccgcagggacgaaactccgattatcgccgtaatggtggccttatcgtctctgctggtgattgtgtttattattatcgtgctctatatgctccggttcaagaaatataagcaggccggatctcattcaaacagcttccgcctatctaatggccggacggaggatgtcgagcctcagagcgtgccactgttggctaggagtccatccacaaataggaaatacccgccacttccagtggacaaactggaggaggagattaatcgccggatggccgacgataataaattattcagagaggagttcaacgctctgccagcatgcccgattcaggctacatgcgaggcagcctcgaaggaagagaacaaggagaaaaacaggtacgttaacatactgccttatgaccattccagggtacatctcaccccagtggaaggtgttccagattctgattatattaacgctagcttcataaacggatatcaagaaaaaaataaattcatcgccgcccagggaccgaaggaggaaaccgttaatgacttctggagaatgatttgggagcaaaataccgcaacaatcgttatggttaccaacctgaaggaacgcaaagaatgcaaatgtgctcagtactggccggaccagggatgttggacttacggcaacatacgcgtttcggtcgaggacgtgactgttctggtcgactacaccgtgcgcaaattctgcattcagcaggtgggggatatgacaaaccgaaaaccccaacggctgatcacccaattccacttcacgtcctggccggattttggtgtgcccttcacccctatcgggatgcttaagttcctgaagaaagtgaaggcctgtaatccacagtatgcgggggccatcgtagtccactgcagtgccggggtggggagaaccggcaccttcgtggtcatcgatgcaatgctggatatgatgcacaccgagcgcaaggtggacgtatatggattcgtttctcgaatccgtgctcaaagatgtcagatggtgcagactgatatgcagtatgtttttatatatcaagctttactggaacactatctgtatggagacacagagttggaagtgacttccctggagacccatcttcagaaaatctataacaaaattccagggaccagcaacaatggtttggaggaggagttcaagaaactgacctccatcaaaatccagaatgacaagatgcggacagggaatttgcccgcaaatatgaagaaaaaccgcgtgctccagattataccatatgagtttaacagggtcatcatcccagtgaagaggggtgaggaaaatactgattatgtgaatgcatcattcatagatggctaccgacagaaagattcttacattgcctctcaagggccgctcctgcacacgatcgaggatttctggagaatgatttgggagtggaagtcatgctccatcgtcatgcttactgaattggaagagagaggccaggaaaaatgcgcccagtattggccgtctgacggcttggtctcctatggagatatcaccgtagaattgaaaaaagaagaggagtgtgagtcgtatacagtgcgtgatttgctcgtgactaataccagagaaaacaagtcccgccagattcggcagtttcatttccatggatggcccgaagtgggcatcccttcagatgggaagggcatgatcagtatcatcgcggccgtgcagaagcagcagcagcaaagcgggaaccatcccatcacagtgcactgttccgcaggcgcagggagaacggggacattctgcgccttatccaccgtactcgagcgggtaaaagcagagggaattctggatgtctttcagaccgtaaagtctctccgcctgcagcgacctcacatggtgcagaccctcgagcagtatgaattttgctacaaagtagtgcaggaatatatcgatgccttcagcgactacgccaactttaagtag

SEQ ID NO: 132551 - DNA, 528 bp, Artificial Sequence
  derived and/or modified sequence
atggacagctggttcatcctggtgctgctgggcagcggcctgatctgcgtctcagccaataatgccaccacggtggccccatccgtcgggataacgcgcctgataaacagctccactgccgagccggtgaaggaagaggcaaagacttctaatcctacaagttcactgacatctctctctgtggcacccacattcagtcctaacattacactaggtccaacttacctgacgacagtcaactcaagcgactctgacaatgggacgactagaacagccagcacgaacagcatcgggattaccatttcccctaatggaacctggctgcccgataatcaatttacggatgcccgaaccgagccctgggaaggtaactcgtccactgccgcgactaccccagaaaccttccccccatctggcaattctgacagtaaggatcgtagagatgagactcctatcattgcagtcatggttgctctgagcagcctgttggtgatcgtgtttattattatcgtgttgtacatgctctag

SEQ ID NO: 132552 - DNA, 2409 bp, Artificial Sequence
  derived and/or modified sequence
atggactcttggtttatccttgtgctcctggggagcggcctgatttgcgtgtctgcaaataacgccactacagttgccccaagtgtcggaatcactaggttgataaatagctccacagcagagcctgtaaaagaagaggctaagacctcaaatcctacgagctccctaacatcgctgtctgtagcaccaactttctctcctaacattacgctgggcccaacctatcttaccacggtcaacagctcggattccgataacggcacaacacggacggcctcgaccaactccatcgggatcactataagccccaatggtacctggctaccagataatcagttcaccgacgccaggacagagccttgggaggggaatagcagtacagcagcgacaactccagaaactttccctccttctggcaatagtgactccaaggaccgcagagatgaaacgccaataatcgcggtgatggtggccctgtcatcacttctggtaatagtctttatcattatcgtactctatatgcttcggtttaaaaaatataagcaggctgggtcccacagtaatagttttagactcagcaatggcagaacagaggatgtcgaaccccaatccgtgccactcctcgctaggagcccaagcaccaatcgaaagtatccacccctcccagtagataagcttgaagaagagattaatcgcagaatggccgatgataataagctctttagggaagagttcaacgcactgcctgcctgcccaattcaggcgacatgtgaagcagcatcaaaggaggagaataaagaaaaaaacaggtacgtgaatattctgccttacgatcactctcgggtacatctaaccccggtggagggtgtgccggacagcgattatatcaacgcaagcttcatcaacggctaccaggaaaaaaacaagtttattgctgcccaggggccaaaggaagaaaccgttaacgatttttggcgtatgatatgggaacagaatacagcaactattgtgatggtgacaaacctcaaagaaagaaaagaatgcaaatgcgcacagtactggcctgatcagggatgctggacgtacggtaacattcgggtaagtgtcgaggacgtgacggtattggtggactacaccgtgcgtaagttctgcattcagcaggtcggcgatatgaccaacaggaagcctcagaggttgataacacagttccacttcaccagttggcccgacttcggcgtgccctttacaccgatcggcatgcttaagtttctcaagaaggttaaggcctgcaatccccagtacgctggagctatcgtggtgcactgcagtgccggtgtcggccgtacaggtaccttcgtggtgattgatgccatgctagatatgatgcatacagaaaggaaggtggatgtctacgggtttgtgtcacgcataagagcacagaggtgccagatggtgcaaactgatatgcagtatgtcttcatttatcaggcgctgctggaacattatctctatggtgacaccgaactcgaagtcactagcctggagacccatttgcagaagatatataacaagatcccaggtaccagcaataacggccttgaagaagagtttaagaaattgacgtccattaaaatccagaacgataaaatgcgaacaggtaatctgcccgctaatatgaaaaaaaatagggtgctacagataatcccttatgaattcaaccgagtgatcatacccgttaagcgaggcgaagagaacaccgactatgttaacgcaagcttcatcgatggataccggcaaaaagatagttatatcgcgtcacaggggcctctcttgcatactattgaggacttctggcgcatgatatgggaatggaagtcatgctctatcgtgatgctaacagagttagaggaacgaggccaggagaaatgcgcccaatattggccctccgacggtttggtctcatacggagacatcactgtggaactaaagaaggaggaggagtgtgagtcctacacagttcgcgatttgctcgtgaccaatacccgtgagaacaaatctcgccaaatccgccaatttcacttccacggttggccggaggttggcatcccctctgacgggaagggcatgatctccataatcgccgcagtccagaagcaacagcagcagagtggaaatcaccctatcaccgtacactgtagtgctggggcaggtcgcacaggaaccttttgtgccctctctactgtgctcgaacgggtcaaggcagaggggattttggacgtctttcagactgtgaagagcctgagactccaaagacctcacatggtgcagacccttgagcaatacgagttctgctacaaggtggtccaggagtacatcgacgcattttcagactatgctaattttaaatag

SEQ ID NO: 132553 - DNA, 2409 bp, Artificial Sequence
  derived and/or modified sequence
atggactcctggtttattcttgtgctgctgggaagcgggctgatttgcgtgtctgctaacaacgcaaccaccgtggcgccttctgtggggatcacacgtctgattaattcctccaccgccgaacctgtgaaagaggaagctaagacctcaaaccccacctcttccctgacctccctgagcgtggccccaacttttagtcccaacatcactctgggaccaacttatctcaccaccgtgaactcttccgactccgacaatggcaccacgagaactgcttccaccaatagtataggaataaccatatcccccaacggcacttggcttcctgacaaccaattcactgacgctagaacagagccttgggaaggaaactctagcacagccgcaactacacctgagacattcccgccttcaggaaattcagattccaaagatcgcagggatgagacaccaattatcgctgttatggtggctcttagcagcctcctcgtgattgtgtttatcatcatcgtgctgtacatgctgcgatttaagaagtataaacaggccggtagccactccaatagctttcgcctgtccaacggcagaaccgaagacgttgagccccagtccgttcctttgttagcacgatcaccctctacgaaccggaagtatccacccctgcctgtggacaagctagaggaggaaatcaatagaagaatggcagatgataacaagctgttccgggaggagtttaacgccctccctgcttgtccaattcaggcaacctgcgaggcggcttccaaagaggaaaacaaagagaagaacagatatgtcaacatccttccttacgatcatagtcgcgtgcaccttactccggtggaaggcgtgcccgattccgactatatcaatgccagctttattaacggctatcaggagaaaaataaatttatcgccgctcaaggccctaaagaggagaccgtgaatgatttctggaggatgatatgggagcaaaacaccgcgactatagtgatggtcaccaatctcaaggagagaaaagagtgcaagtgtgctcagtactggcccgatcagggatgctggacatacgggaacattcgagttagcgtggaggacgtgaccgtgctcgttgactacactgtgcggaagttctgtatccagcaggtgggcgacatgaccaatcgtaagccccagcgcttaataacgcagtttcactttaccagctggcccgactttggagtacccttcacccccattggcatgcttaaatttctgaaaaaggtgaaggcgtgtaatcctcagtatgcaggtgcgatcgtcgttcattgctccgccggagtcggcaggaccggaacattcgtagtgatcgatgcaatgctggacatgatgcacaccgaacggaaggttgacgtttatggatttgtgtcccgcattcgggcacagcgatgccagatggtacagactgatatgcagtatgtctttatctaccaagctttgctggaacactacctgtacggcgacacggaactcgaggtcacctccctggagacacacctccagaagatatataacaagatcccagggacctcgaataacggtcttgaggaggagtttaaaaaattaactagcattaagattcaaaatgacaaaatgcgtaccgggaatcttcccgcaaatatgaagaagaaccgtgtgctccagatcatcccatatgaattcaatagagtgatcatcccagtgaaaaggggcgaggagaatactgattatgtcaatgccagctttattgacggttatagacagaaagattcctatatcgcctcacaaggacccctattgcacacgatagaggacttctggcgcatgatttgggagtggaagtcttgctctattgtgatgctcaccgagttggaagagaggggccaagaaaaatgcgctcagtattggccctctgatggcttggtctcctacggggatataacagtagagctgaaaaaagaggaggaatgcgaaagctacacagtgcgcgatctcttggtcactaatactcgcgagaacaaaagcagacagattaggcagtttcatttccatggctggcccgaggttgggattcctagcgatggcaaggggatgatctccatcatcgccgcagtgcagaaacaacagcagcagagcggtaaccatcccattacagttcactgctcggcaggagctgggcgaacaggaacattctgtgccctgagcaccgtgctggagcgggtcaaagccgagggaatactggacgtcttccaaactgtgaagagcctgaggctgcaacgaccacacatggtccagacgctggagcagtacgagttctgctacaaggtggtccaagaatacattgacgctttcagcgattatgctaacttcaagtag

SEQ ID NO: 132554 - DNA, 603 bp, Artificial Sequence
  derived and/or modified sequence
atggatagctggtttatcctagtgctactggggagtggattgatatgtgtgtccgccaataacgccacaaccgtagctccgtcagttgggattacccggctgataaattcctcgacggctgagcccgtgaaagaagaagcgaagactagcaaccctactagcagcctaacgtcactcagcgtggcccctactttcagtccgaacataacacttggaccaacatacttgactactgtgaattccagcgactcagataatggcacaaccagaactgcctcgaccaactccatcgggattacaatcagccccaatggcacctggcttcctgataaccagtttacagatgccagaactgaaccctgggaggggaattcttcaactgctgccaccacccctgaaactttccccccaagcggcaattcggactccaaggatagacgggatgagaccccaatcattgctgtgatggtcgcactgagtagtcttttggttattgtgtttattattatcgtcctgtacatgttgaggttcaaaaagtataagcaagcaggatctcactccaactcatttaggctgtctaacggcaggacggaagacgtttag

SEQ ID NO: 132555 - DNA, 2442 bp, Artificial Sequence
  derived and/or modified sequence
atggatgatgcagtgcaaataactaagatttcaatggattcgtggttcattctggtgctgcttggcagtgggcttatttgcgtttcagccaacaacgccaccaccgtggccccatctgtgggaatcactcggctaattaatagctccacagcagaacccgtgaaagaggaggccaagacctccaatcctacatcttcactcacctctctgtcagtggcaccgaccttttcacccaacattaccctgggtcctacgtacttaaccactgttaatagtagcgacagtgacaatggcaccacccgaacagctagcaccaactccatcggtattacaatctcacctaatggaacctggttaccagataatcagtttaccgacgcaaggacggagccctgggaaggaaacagctcaacggccgctactacccccgagacttttcctccttctgggaactcagactctaaagatcgtcgggacgagacccctattattgccgtcatggtggcactcagctcattgctggtaatagtgttcatcattatagtgttatacatgctgagattcaaaaagtacaagcaggccggaagccactcaaactcattccggcttagtaatggccgaactgaagacgtggaaccacaatcagtgcctctgctcgcccgaagtcctagcaccaaccggaaatacccgcctttgccagttgacaagttggaagaggaaatcaatcgcagaatggctgatgacaacaagctgttcagagaagagttcaacgcactgcccgcttgtccaatccaggccacctgtgaagcggctagtaaggaggaaaacaaggagaaaaataggtacgtcaacatcctgccatacgaccattccagagttcacctgactcccgtggagggggtgcctgacagcgactatatcaatgcctcctttattaacgggtatcaggagaagaataaatttatcgcggcacagggacccaaagaggaaactgtaaatgatttttggcgcatgatctgggagcagaatacagccaccattgtaatggtaaccaaccttaaggagcggaaggagtgcaagtgtgctcaatactggcctgaccagggttgttggacttacggtaatattagggtgtccgtcgaggacgtgactgtcctggtcgactacaccgtgagaaagttttgcatccagcaggtaggcgacatgacaaacaggaaaccacagcgtctgatcactcagtttcacttcacatcatggcctgatttcggcgtaccctttacccctatcggcatgctgaaattcctgaaaaaagtaaaggcatgtaatccccagtatgcgggtgcaatcgtggtgcattgtagcgctggagtgggtagaacgggcactttcgtggtcatagacgcaatgttggacatgatgcacactgaacgcaaggttgacgtgtacggcttcgtgtctagaattagggcccagaggtgccagatggttcagacggatatgcagtacgtctttatttatcaagccctcttagagcattacctttatggggatacggagctggaagtgaccagcctggagactcacctccagaaaatctataataagattcccggaacatcaaacaacggcctggaggaggagttcaagaagctaacttctattaaaatccagaacgataaaatgaggacggggaatcttccagcaaatatgaaaaaaaaccgcgtcctccagattataccctatgagtttaatagagttatcatacccgtaaagcggggtgaggagaacacagattatgtgaacgccagtttcatcgatggttaccgccagaaggactcctacatcgcttcccaaggacctctcttgcataccatcgaggacttctggcgcatgatctgggagtggaaaagctgttcgatcgttatgcttacggaacttgaggaacggggacaagaaaagtgtgctcaatactggcccagcgatggattagtgagctatggagacattaccgtggaactaaaaaaagaggaagagtgtgagagttacaccgtgagggatctcctggtgaccaacaccagggagaataaatctaggcagatccgtcagttccactttcatggatggcctgaggtgggcatcccatctgatggcaaggggatgataagcattatagcagctgtgcaaaaacagcagcaacagtccggcaatcaccccattacggtgcactgctccgcaggcgctggcagaactggcaccttctgcgctctaagcactgtgttagaacgggttaaggccgaggggattctggacgtttttcagaccgttaaaagcttgcgactccagagacctcatatggtccaaacactggagcagtacgagttctgttacaaggtggtacaggagtatatcgacgccttctcagattacgctaacttcaaatag

SEQ ID NO: 132556 - DNA, 528 bp, Artificial Sequence
  derived and/or modified sequence
atggacagttggttcatcttggtgcttctcggctccgggctcatctgcgtgtcggctaacaatgccacaaccgtcgccccatccgttgggatcacccgcctcattaactcatcaacggccgaacccgtgaaagaagaagccaaaactagcaaccccacaagttctttaacctctctttctgtggccccaactttttctcctaacattactctcggccctacttacctaacgactgtgaattccagcgacagtgataacggcactacacgtacagcctctactaactccatcgggatcaccatctcaccaaacgggacgtggctcccggataaccaatttactgacgcaagaaccgaaccctgggaaggcaactcttccaccgctgcgaccactcccgaaactttccccccatccggaaatagcgactccaaagaccgtagagacgagacaccaattatcgccgtcatggtggcactttcctccctcttagtgatagtttttattattatcgtcctttatatgctttag

SEQ ID NO: 132557 - DNA, 3636 bp, Artificial Sequence
  derived and/or modified sequence
ggagtatgagccacgctcaggggagcaggtaccccttctcctaaagatgaagaggagcaaactggcactaagcaaggccatcgagagcggggacactgacctggtgttcacggtgttgctgcacctgaagaacgagctgaaccgaggagattttttcatgacccttcggaatcagcccatggccctcagtttgtaccgacagttctgtaagcatcaggagctagagacgctgaaggacctttacaatcaggatgacaatcaccaggaattgggcagcttccacatccgagccagctatgctgcagaagagcgtattgaggggcgagtagcagctctgcagacagccgccgatgccttctacaaggccaagaatgagtttgcagccaaggctacagaggatcaaatgcggctcctacggctgcagcggcgcctagaagacgagctggggggccagttcctagacctgtctctacatgacacagttaccaccctcattcttggcggtcacaacaagcgtgcagagcagctggcacgtgacttccgcatccctgacaagaggtgacacaactaaaaaaaaacaaaggtatttatggaattccactgagtggtaatggatgatgcagttcaaataactaaggacacatgttcaaagagcataattaactttttaaaagaagctaataagcatggattcctggttcattcttgttctgctcggcagtggtctgatatgtgtcagtgccaacaatgctaccacagttgcaccttctgtaggaattacaagattaattaactcatcaacggcagaaccagttaaagaagaggccaaaacttcaaatccaacttcttcactaacttctctttctgtggcaccaacattcagcccaaatataactctgggacccacctatttaaccactgtcaattcttcagactctgacaatgggaccacaagaacagcaagcaccaattctataggcattacaatttcaccaaatggaacgtggcttccagataaccagttcacggatgccagaacagaaccctgggaggggaattccagcaccgcagcaaccactccagaaactttccctccttcaggtaattctgactcgaaggacagaagagatgagacaccaattattgcggtgatggtggccctgtcctctctgctagtgatcgtgtttattatcatagttttgtacatgttaaggtttaagaaatacaagcaagctgggagccattccaattctttccgcttatccaacggccgcactgaggatgtggagccccagagtgtgccacttctggccagatccccaagcaccaacaggaaatacccacccctgcccgtggacaagctggaagaggaaattaaccggagaatggcagacgacaataagctcttcagggaggaattcaacgctctccctgcatgtcctatccaggccacctgtgaggctgcttccaaggaggaaaacaaggaaaaaaatcgatatgtaaacatcttgccttatgaccactctagagtccacctgacaccggttgaaggggttccagattctgattacatcaatgcttcattcatcaacggctaccaagaaaagaacaaattcattgctgcacaaggaccaaaagaagaaacggtgaatgatttctggcggatgatctgggaacaaaacacagccaccatcgtcatggttaccaacctgaaggagagaaaggagtgcaagtgcgcccagtactggccagaccaaggctgctggacctatgggaatattcgggtgtctgtagaggatgtgactgtcctggtggactacacagtacggaagttctgcatccagcaggtgggcgacatgaccaacagaaagccacagcgcctcatcactcagttccactttaccagctggccagactttggggtgccttttaccccgatcggcatgctcaagttcctcaagaaggtgaaggcctgtaaccctcagtatgcaggggccatcgtggtccactgcagtgcaggtgtagggcgtacaggtacctttgtcgtcattgatgccatgctggacatgatgcatacagaacggaaggtggacgtgtatggctttgtgagccggatccgggcacagcgctgccagatggtgcaaaccgatatgcagtatgtcttcatataccaagcccttctggagcattatctctatggagatacagaactggaagtgacctctctagaaacccacctgcagaaaatttacaacaaaatcccagggaccagcaacaatggattagaggaggagtttaagaagttaacatcaatcaaaatccagaatgacaagatgcggactggaaaccttccagccaacatgaagaagaaccgtgttttacagatcattccatatgaattcaacagagtgatcattccagttaagcggggcgaagagaatacagactatgtgaacgcatcctttattgatggctaccggcagaaggactcctatatcgccagccagggccctcttctccacacaattgaggacttctggcgaatgatctgggagtggaaatcctgctctatcgtgatgctaacagaactggaggagagaggccaggagaagtgtgcccagtactggccatctgatggactggtgtcctatggagatattacagtggaactgaagaaggaggaggaatgtgagagctacaccgtccgagacctcctggtcaccaacaccagggagaataagagccggcagatccggcagttccacttccatggctggcctgaagtgggcatccccagtgacggaaagggcatgatcagcatcatcgccgccgtgcagaagcagcagcagcagtcagggaaccaccccatcaccgtgcactgcagcgccggggcaggaaggacggggaccttctgtgccctgagcaccgtcctggagcgtgtgaaagcagaggggattttggatgtcttccagactgtcaagagcctgcggctacagaggccacacatggtccagacactggaacagtatgagttctgctacaaggtggtgcaggagtatattgatgcattctcagattatgccaacttcaagtaagcggcaacaagggtccgtggaccaggaggattgcctttaatattttgtaatattctgttttgttaatataccccaaattgtgtatatatcttataactgttttagaaattggtacataggcttctattacctattaggtggaaattttatatgtaaatgtgttagcactgatagtcctttttccaatgttttattggggaattaaatagtgtgatgtttggattgatatcgtgaaatcctcagccgagaaattgggctggattgtgctttggttaatacatctttccctaaagaagataaacacaaaatccattccaggtagctcggcaccaactaagaaaaaaagcacaaagttctcagagctctcgaggaaagtggttgtccccgtaccaccatgcactgtaaatatccctcccctctctccctggtcccctcccccatccccaccactgatatcatggggagtaataggaccagagcggtatctctggcaccacactagggactatcaggtaataaaagctttgactccctgaggaaa

SEQ ID NO: 132558 - DNA, 3337 bp, Artificial Sequence
  derived and/or modified sequence
ctgcggcgagtgcggcgctgacagagacgcgcgcgcgcgcgatcgcgctcggaccccggccgctgccgccatcactgtcgcccgcccagtcgcccctcagccgcttcccctcgccatggaggcgaggccgccgccgccgccgcggggctcggagccgcgggccgggcggcggccctgagggctagtggcggcccgaaacgccgccgcggagccgaggcggagccgctgtcctcgtccccagcggtcccgcccaacgcccgactctgtgacacaactaaaaaaaaacaaaggtatttatggaattccactgagtggtaatggatgatgcagttcaaataactaaggacacatgttcaaagagcataattaactttttaaaagaagctaataagcatggattcctggttcattcttgttctgctcggcagtggtctgatatgtgtcagtgccaacaatgctaccacagttgcaccttctgtaggaattacaagattaattaactcatcaacggcagaaccagttaaagaagaggccaaaacttcaaatccaacttcttcactaacttctctttctgtggcaccaacattcagcccaaatataactctgggacccacctatttaaccactgtcaattcttcagactctgacaatgggaccacaagaacagcaagcaccaattctataggcattacaatttcaccaaatggaacgtggcttccagataaccagttcacggatgccagaacagaaccctgggaggggaattccagcaccgcagcaaccactccagaaactttccctccttcaggtaattctgactcgaaggacagaagagatgagacaccaattattgcggtgatggtggccctgtcctctctgctagtgatcgtgtttattatcatagttttgtacatgttaaggtttaagaaatacaagcaagctgggagccattccaattctttccgcttatccaacggccgcactgaggatgtggagccccagagtgtgccacttctggccagatccccaagcaccaacaggaaatacccacccctgcccgtggacaagctggaagaggaaattaaccggagaatggcagacgacaataagctcttcagggaggaattcaacgctctccctgcatgtcctatccaggccacctgtgaggctgcttccaaggaggaaaacaaggaaaaaaatcgatatgtaaacatcttgccttatgaccactctagagtccacctgacaccggttgaaggggttccagattctgattacatcaatgcttcattcatcaacggctaccaagaaaagaacaaattcattgctgcacaaggaccaaaagaagaaacggtgaatgatttctggcggatgatctgggaacaaaacacagccaccatcgtcatggttaccaacctgaaggagagaaaggagtgcaagtgcgcccagtactggccagaccaaggctgctggacctatgggaatattcgggtgtctgtagaggatgtgactgtcctggtggactacacagtacggaagttctgcatccagcaggtgggcgacatgaccaacagaaagccacagcgcctcatcactcagttccactttaccagctggccagactttggggtgccttttaccccgatcggcatgctcaagttcctcaagaaggtgaaggcctgtaaccctcagtatgcaggggccatcgtggtccactgcagtgcaggtgtagggcgtacaggtacctttgtcgtcattgatgccatgctggacatgatgcatacagaacggaaggtggacgtgtatggctttgtgagccggatccgggcacagcgctgccagatggtgcaaaccgatatgcagtatgtcttcatataccaagcccttctggagcattatctctatggagatacagaactggaagtgacctctctagaaacccacctgcagaaaatttacaacaaaatcccagggaccagcaacaatggattagaggaggagtttaagaagttaacatcaatcaaaatccagaatgacaagatgcggactggaaaccttccagccaacatgaagaagaaccgtgttttacagatcattccatatgaattcaacagagtgatcattccagttaagcggggcgaagagaatacagactatgtgaacgcatcctttattgatggctaccggcagaaggactcctatatcgccagccagggccctcttctccacacaattgaggacttctggcgaatgatctgggagtggaaatcctgctctatcgtgatgctaacagaactggaggagagaggccaggagaagtgtgcccagtactggccatctgatggactggtgtcctatggagatattacagtggaactgaagaaggaggaggaatgtgagagctacaccgtccgagacctcctggtcaccaacaccagggagaataagagccggcagatccggcagttccacttccatggctggcctgaagtgggcatccccagtgacggaaagggcatgatcagcatcatcgccgccgtgcagaagcagcagcagcagtcagggaaccaccccatcaccgtgcactgcagcgccggggcaggaaggacggggaccttctgtgccctgagcaccgtcctggagcgtgtgaaagcagaggggattttggatgtcttccagactgtcaagagcctgcggctacagaggccacacatggtccagacactggaacagtatgagttctgctacaaggtggtgcaggagtatattgatgcattctcagattatgccaacttcaagtaagcggcaacaagggtccgtggaccaggaggattgcctttaatattttgtaatattctgttttgttaatataccccaaattgtgtatatatcttataactgttttagaaattggtacataggcttctattacctattaggtggaaattttatatgtaaatgtgttagcactgatagtcctttttccaatgttttattggggaattaaatagtgtgatgtttggattgatatcgtgaaatcctcagccgagaaattgggctggattgtgctttggttaatacatctttccctaaagaagataaacacaaaatccattccaggtagctcggcaccaactaagaaaaaaagcacaaagttctcagagctctcgaggaaagtggttgtccccgtaccaccatgcactgtaaatatccctcccctctctccctggtcccctcccccatccccaccactgatatcatggggagtaataggaccagagcggtatctctggcaccacactagggactatcaggtaataaaagctttgactccctg

SEQ ID NO: 132559 - DNA, 749 bp, Artificial Sequence
  derived and/or modified sequence
gacgcgcgcgcgcgcgatcgcgctcggaccccggccgctgccgccatcactgtcgcccgcccagtgacacaactaaaaaaaaacaaaggtatttatggaattccactgagtggtaatggatgatgcagttcaaataactaagataagcatggattcctggttcattcttgttctgctcggcagtggtctgatatgtgtcagtgccaacaatgctaccacagttgcaccttctgtaggaattacaagattaattaactcatcaacggcagaaccagttaaagaagaggccaaaacttcaaatccaacttcttcactaacttctctttctgtggcaccaacattcagcccaaatataactctgggacccacctatttaaccactgtcaattcttcagactctgacaatgggaccacaagaacagcaagcaccaattctataggcattacaatttcaccaaatggaacgtggcttccagataaccagttcacggatgccagaacagaaccctgggaggggaattccagcaccgcagcaaccactccagaaactttccctccttcaggtaattctgactcgaaggacagaagagatgagacaccaattattgcggtgatggtggccctgtcctctctgctagtgatcgtgtttattatcatagttttgtacatgttaaggtttaagaaatacaagcaagctgggagccattccaattctttccgcttatccaacggccgcactgaggatgtgg

SEQ ID NO: 132560 - DNA, 2932 bp, Artificial Sequence
  derived and/or modified sequence
actgtcgcccgcccagtcgcccctcagccgcttcccctcgccatggaggcgaggccgccgccgccgccgcggggctcggagccgcgggccgggcggcggccctgagggctagtggcggcccgaaacgccgccgcggagccgaggcggagccgctgtcctcgtccccagcggtcccgcccaacgcccgactctgtgacacaactaaaaaaaaacaaaggtatttatggaattccactgagtggtaatggatgatgcagttcaaataactaagataagcatggattcctggttcattcttgttctgctcggcagtggtctgatatgtgtcagtgccaacaatgctaccacagttgcaccttctgtaggaattacaagattaattaactcatcaacggcagaaccagttaaagaagaggccaaaacttcaaatccaacttcttcactaacttctctttctgtggcaccaacattcagcccaaatataactctgggacccacctatttaaccactgtcaattcttcagactctgacaatgggaccacaagaacagcaagcaccaattctataggcattacaatttcaccaaatggaacgtggcttccagataaccagttcacggatgccagaacagaaccctgggaggggaattccagcaccgcagcaaccactccagaaactttccctccttcaggtaattctgactcgaaggacagaagagatgagacaccaattattgcggtgatggtggccctgtcctctctgctagtgatcgtgtttattatcatagttttgtacatgttaaggtttaagaaatacaagcaagctgggagccattccaattctttccgcttatccaacggccgcactgaggatgtggagccccagagtgtgccacttctggccagatccccaagcaccaacaggaaatacccacccctgcccgtggacaagctggaagaggaaattaaccggagaatggcagacgacaataagctcttcagggaggaattcaacgctctccctgcatgtcctatccaggccacctgtgaggctgcttccaaggaggaaaacaaggaaaaaaatcgatatgtaaacatcttgccttatgaccactctagagtccacctgacaccggttgaaggggttccagattctgattacatcaatgcttcattcatcaacggctaccaagaaaagaacaaattcattgctgcacaaggaccaaaagaagaaacggtgaatgatttctggcggatgatctgggaacaaaacacagccaccatcgtcatggttaccaacctgaaggagagaaaggagtgcaagtgcgcccagtactggccagaccaaggctgctggacctatgggaatattcgggtgtctgtagaggatgtgactgtcctggtggactacacagtacggaagttctgcatccagcaggtgggcgacatgaccaacagaaagccacagcgcctcatcactcagttccactttaccagctggccagactttggggtgccttttaccccgatcggcatgctcaagttcctcaagaaggtgaaggcctgtaaccctcagtatgcaggggccatcgtggtccactgcagtgcaggtgtagggcgtacaggtacctttgtcgtcattgatgccatgctggacatgatgcatacagaacggaaggtggacgtgtatggctttgtgagccggatccgggcacagcgctgccagatggtgcaaaccgatatgcagtatgtcttcatataccaagcccttctggagcattatctctatggagatacagaactggaagtgacctctctagaaacccacctgcagaaaatttacaacaaaatcccagggaccagcaacaatggattagaggaggagtttaagaagttaacatcaatcaaaatccagaatgacaagatgcggactggaaaccttccagccaacatgaagaagaaccgtgttttacagatcattccatatgaattcaacagagtgatcattccagttaagcggggcgaagagaatacagactatgtgaacgcatcctttattgatggctaccggcagaaggactcctatatcgccagccagggccctcttctccacacaattgaggacttctggcgaatgatctgggagtggaaatcctgctctatcgtgatgctaacagaactggaggagagaggccaggagaagtgtgcccagtactggccatctgatggactggtgtcctatggagatattacagtggaactgaagaaggaggaggaatgtgagagctacaccgtccgagacctcctggtcaccaacaccagggagaataagagccggcagatccggcagttccacttccatggctggcctgaagtgggcatccccagtgacggaaagggcatgatcagcatcatcgccgccgtgcagaagcagcagcagcagtcagggaaccaccccatcaccgtgcactgcagcgccggggcaggaaggacggggaccttctgtgccctgagcaccgtcctggagcgtgtgaaagcagaggggattttggatgtcttccagactgtcaagagcctgcggctacagaggccacacatggtccagacactggaacagtatgagttctgctacaaggtggtgcaggagtatattgatgcattctcagattatgccaacttcaagtaagcggcaacaagggtccgtggaccaggaggattgcctttaatattttgtaatattctgttttgttaatataccccaaattgtgtatatatcttataactgttttagaaattggtacataggcttctattacctattaggtggaaattttatatgtaaatgtgttagcactgatagtcctttttccaatgttttattggggaattaaatagtgtgatgtttggattgatatcgtgaaatcctcagccg

SEQ ID NO: 132561 - DNA, 733 bp, Artificial Sequence
  derived and/or modified sequence
gcggcccgaaacgccgccgcggagccgaggcggagccgctgtcctcgtccccagcggtcccgcccaacgcccgactctgtgacacaactaaaaaaaaacaaaggtatttatggaattccactgagtggtaatggatgatgcagttcaaataactaaggacacatgttcaaagagcataattaactttttaaaagaagctaataagcatggattcctggttcattcttgttctgctcggcagtggtctgatatgtgtcagtgccaacaatgctaccacagttgcaccttctgtaggaattacaagattaattaactcatcaacggcagaaccagttaaagaagaggccaaaacttcaaatccaacttcttcactaacttctctttctgtggcaccaacattcagcccaaatataactctgggacccacctatttaaccactgtcaattcttcagactctgacaatgggaccacaagaacagcaagcaccaattctataggcattacaatttcaccaaatggaacgtggcttccagataaccagttcacggatgccagaacagaaccctgggaggggaattccagcaccgcagcaaccactccagaaactttccctccttcaggtaattctgactcgaaggacagaagagatgagacaccaattattgcggtgatggtggccctgtcctctctgctagtgatcgtgtttattatcatagttttgtacatgttaag

SEQ ID NO: 132562 - DNA, 2409 bp, Artificial Sequence
  derived and/or modified sequence
atggacagctggttcatcctggtgctgctgggcagcggcctgatctgcgtgagcgccaacaacgccaccaccgtggcccccagcgtgggcatcaccagactgatcaacagcagcaccgccgagcccgtgaaggaggaggccaagaccagcaaccccaccagcagcctgaccagcctgagcgtggcccccaccttcagccccaacatcaccctgggccccacctacctgaccaccgtgaacagcagcgacagcgacaacggcaccaccagaaccgccagcaccaacagcatcggcatcaccatcagccccaacggcacctggctgcccgacaaccagttcaccgacgccagaaccgagccctgggagggcaacagcagcaccgccgccaccacccccgagaccttcccccccagcggcaacagcgacagcaaggacagaagagacgagacccccatcatcgccgtgatggtggccctgagcagcctgctggtgatcgtgttcatcatcatcgtgctgtacatgctgagattcaagaagtacaagcaggccggcagccacagcaacagcttcagactgagcaacggcagaaccgaggacgtggagccccagagcgtgcccctgctggccagaagccccagcaccaacagaaagtacccccccctgcccgtggacaagctggaggaggagatcaacagaagaatggccgacgacaacaagctgttcagagaggagttcaacgccctgcccgcctgccccatccaggccacctgcgaggccgccagcaaggaggagaacaaggagaagaacagatacgtgaacatcctgccctacgaccacagcagagtgcacctgacccccgtggagggcgtgcccgacagcgactacatcaacgccagcttcatcaacggctaccaggagaagaacaagttcatcgccgcccagggccccaaggaggagaccgtgaacgacttctggagaatgatctgggagcagaacaccgccaccatcgtgatggtgaccaacctgaaggagagaaaggagtgcaagtgcgcccagtactggcccgaccagggctgctggacctacggcaacatcagagtgagcgtggaggacgtgaccgtgctggtggactacaccgtgagaaagttctgcatccagcaggtgggcgacatgaccaacagaaagccccagagactgatcacccagttccacttcaccagctggcccgacttcggcgtgcccttcacccccatcggcatgctgaagttcctgaagaaggtgaaggcctgcaacccccagtacgccggcgccatcgtggtgcactgcagcgccggcgtgggcagaaccggcaccttcgtggtgatcgacgccatgctggacatgatgcacaccgagagaaaggtggacgtgtacggcttcgtgagcagaatcagagcccagagatgccagatggtgcagaccgacatgcagtacgtgttcatctaccaggccctgctggagcactacctgtacggcgacaccgagctggaggtgaccagcctggagacccacctgcagaagatctacaacaagatccccggcaccagcaacaacggcctggaggaggagttcaagaagctgaccagcatcaagatccagaacgacaagatgagaaccggcaacctgcccgccaacatgaagaagaacagagtgctgcagatcatcccctacgagttcaacagagtgatcatccccgtgaagagaggcgaggagaacaccgactacgtgaacgccagcttcatcgacggctacagacagaaggacagctacatcgccagccagggccccctgctgcacaccatcgaggacttctggagaatgatctgggagtggaagagctgcagcatcgtgatgctgaccgagctggaggagagaggccaggagaagtgcgcccagtactggcccagcgacggcctggtgagctacggcgacatcaccgtggagctgaagaaggaggaggagtgcgagagctacaccgtgagagacctgctggtgaccaacaccagagagaacaagagcagacagatcagacagttccacttccacggctggcccgaggtgggcatccccagcgacggcaagggcatgatcagcatcatcgccgccgtgcagaagcagcagcagcagagcggcaaccaccccatcaccgtgcactgcagcgccggcgccggcagaaccggcaccttctgcgccctgagcaccgtgctggagagagtgaaggccgagggcatcctggacgtgttccagaccgtgaagagcctgagactgcagagaccccacatggtgcagaccctggagcagtacgagttctgctacaaggtggtgcaggagtacatcgacgccttcagcgactacgccaacttcaagtag

SEQ ID NO: 132563 - DNA, 603 bp, Artificial Sequence
  derived and/or modified sequence
atggacagctggttcatcctggtgctgctgggcagcggcctgatctgcgtgagcgccaacaacgccaccaccgtggcccccagcgtgggcatcaccagactgatcaacagcagcaccgccgagcccgtgaaggaggaggccaagaccagcaaccccaccagcagcctgaccagcctgagcgtggcccccaccttcagccccaacatcaccctgggccccacctacctgaccaccgtgaacagcagcgacagcgacaacggcaccaccagaaccgccagcaccaacagcatcggcatcaccatcagccccaacggcacctggctgcccgacaaccagttcaccgacgccagaaccgagccctgggagggcaacagcagcaccgccgccaccacccccgagaccttcccccccagcggcaacagcgacagcaaggacagaagagacgagacccccatcatcgccgtgatggtggccctgagcagcctgctggtgatcgtgttcatcatcatcgtgctgtacatgctgagattcaagaagtacaagcaggccggcagccacagcaacagcttcagactgagcaacggcagaaccgaggacgtgtag

SEQ ID NO: 132564 - DNA, 2442 bp, Artificial Sequence
  derived and/or modified sequence
atggacgacgccgtgcagatcaccaagatcagcatggacagctggttcatcctggtgctgctgggcagcggcctgatctgcgtgagcgccaacaacgccaccaccgtggcccccagcgtgggcatcaccagactgatcaacagcagcaccgccgagcccgtgaaggaggaggccaagaccagcaaccccaccagcagcctgaccagcctgagcgtggcccccaccttcagccccaacatcaccctgggccccacctacctgaccaccgtgaacagcagcgacagcgacaacggcaccaccagaaccgccagcaccaacagcatcggcatcaccatcagccccaacggcacctggctgcccgacaaccagttcaccgacgccagaaccgagccctgggagggcaacagcagcaccgccgccaccacccccgagaccttcccccccagcggcaacagcgacagcaaggacagaagagacgagacccccatcatcgccgtgatggtggccctgagcagcctgctggtgatcgtgttcatcatcatcgtgctgtacatgctgagattcaagaagtacaagcaggccggcagccacagcaacagcttcagactgagcaacggcagaaccgaggacgtggagccccagagcgtgcccctgctggccagaagccccagcaccaacagaaagtacccccccctgcccgtggacaagctggaggaggagatcaacagaagaatggccgacgacaacaagctgttcagagaggagttcaacgccctgcccgcctgccccatccaggccacctgcgaggccgccagcaaggaggagaacaaggagaagaacagatacgtgaacatcctgccctacgaccacagcagagtgcacctgacccccgtggagggcgtgcccgacagcgactacatcaacgccagcttcatcaacggctaccaggagaagaacaagttcatcgccgcccagggccccaaggaggagaccgtgaacgacttctggagaatgatctgggagcagaacaccgccaccatcgtgatggtgaccaacctgaaggagagaaaggagtgcaagtgcgcccagtactggcccgaccagggctgctggacctacggcaacatcagagtgagcgtggaggacgtgaccgtgctggtggactacaccgtgagaaagttctgcatccagcaggtgggcgacatgaccaacagaaagccccagagactgatcacccagttccacttcaccagctggcccgacttcggcgtgcccttcacccccatcggcatgctgaagttcctgaagaaggtgaaggcctgcaacccccagtacgccggcgccatcgtggtgcactgcagcgccggcgtgggcagaaccggcaccttcgtggtgatcgacgccatgctggacatgatgcacaccgagagaaaggtggacgtgtacggcttcgtgagcagaatcagagcccagagatgccagatggtgcagaccgacatgcagtacgtgttcatctaccaggccctgctggagcactacctgtacggcgacaccgagctggaggtgaccagcctggagacccacctgcagaagatctacaacaagatccccggcaccagcaacaacggcctggaggaggagttcaagaagctgaccagcatcaagatccagaacgacaagatgagaaccggcaacctgcccgccaacatgaagaagaacagagtgctgcagatcatcccctacgagttcaacagagtgatcatccccgtgaagagaggcgaggagaacaccgactacgtgaacgccagcttcatcgacggctacagacagaaggacagctacatcgccagccagggccccctgctgcacaccatcgaggacttctggagaatgatctgggagtggaagagctgcagcatcgtgatgctgaccgagctggaggagagaggccaggagaagtgcgcccagtactggcccagcgacggcctggtgagctacggcgacatcaccgtggagctgaagaaggaggaggagtgcgagagctacaccgtgagagacctgctggtgaccaacaccagagagaacaagagcagacagatcagacagttccacttccacggctggcccgaggtgggcatccccagcgacggcaagggcatgatcagcatcatcgccgccgtgcagaagcagcagcagcagagcggcaaccaccccatcaccgtgcactgcagcgccggcgccggcagaaccggcaccttctgcgccctgagcaccgtgctggagagagtgaaggccgagggcatcctggacgtgttccagaccgtgaagagcctgagactgcagagaccccacatggtgcagaccctggagcagtacgagttctgctacaaggtggtgcaggagtacatcgacgccttcagcgactacgccaacttcaagtag

SEQ ID NO: 132565 - DNA, 528 bp, Artificial Sequence
  derived and/or modified sequence
atggacagctggttcatcctggtgctgctgggcagcggcctgatctgcgtgagcgccaacaacgccaccaccgtggcccccagcgtgggcatcaccagactgatcaacagcagcaccgccgagcccgtgaaggaggaggccaagaccagcaaccccaccagcagcctgaccagcctgagcgtggcccccaccttcagccccaacatcaccctgggccccacctacctgaccaccgtgaacagcagcgacagcgacaacggcaccaccagaaccgccagcaccaacagcatcggcatcaccatcagccccaacggcacctggctgcccgacaaccagttcaccgacgccagaaccgagccctgggagggcaacagcagcaccgccgccaccacccccgagaccttcccccccagcggcaacagcgacagcaaggacagaagagacgagacccccatcatcgccgtgatggtggccctgagcagcctgctggtgatcgtgttcatcatcatcgtgctgtacatgctgtag

SEQ ID NO: 132566 - protein, 1997 aa, Artificial Sequence
  derived and/or modified sequence
MLSHGAGLALWITLSLLQTGLAEPERCNFTLAESKASSHSVSIQWRILGSPCNFSLIYSSDTLGAALCPTFRIDNTTYGCNLQDLQAGTIYNFRIISLDEERTVVLQTDPLPPARFGVSKEKTTSTSLHVWWTPSSGKVTSYEVQLFDENNQKIQGVQIQESTSWNEYTFFNLTAGSKYNIAITAVSGGKRSFSVYTNGSTVPSPVKDIGISTKANSLLISWSHGSGNVERYRLMLMDKGILVHGGVVDKHATSYAFHGLTPGYLYNLTVMTEAAGLQNYRWKLVRTAPMEVSNLKVTNDGSLTSLKVKWQRPPGNVDSYNITLSHKGTIKESRVLAPWITETHFKELVPGRLYQVTVSCVSGELSAQKMAVGRTFPDKVANLEANNNGRMRSLVVSWSPPAGDWEQYRILLFNDSVVLLNITVGKEETQYVMDDTGLVPGRQYEVEVIVESGNLKNSERCQGRTVPLAVLQLRVKHANETSLSIMWQTPVAEWEKYIISLADRDLLLIHKSLSKDAKEFTFTDLVPGRKYMATVTSISGDLKNSSSVKGRTVPAQVTDLHVANQGMTSSLFTNWTQAQGDVEFYQVLLIHENVVIKNESISSETSRYSFHSLKSGSLYSVVVTTVSGGISSRQVVVEGRTVPSSVSGVTVNNSGRNDYLSVSWLLAPGDVDNYEVTLSHDGKVVQSLVIAKSVRECSFSSLTPGRLYTVTITTRSGKYENHSFSQERTVPDKVQGVSVSNSARSDYLRVSWVHATGDFDHYEVTIKNKNNFIQTKSIPKSENECVFVQLVPGRLYSVTVTTKSGQYEANEQGNGRTIPEPVKDLTLRNRSTEDLHVTWSGANGDVDQYEIQLLFNDMKVFPPFHLVNTATEYRFTSLTPGRQYKILVLTISGDVQQSAFIEGFTVPSAVKNIHISPNGATDSLTVNWTPGGGDVDSYTVSAFRHSQKVDSQTIPKHVFEHTFHRLEAGEQYQIMIASVSGSLKNQINVVGRTVPASVQGVIADNAYSSYSLIVSWQKAAGVAERYDILLLTENGILLRNTSEPATTKQHKFEDLTPGKKYKIQILTVSGGLFSKEAQTEGRTVPAAVTDLRITENSTRHLSFRWTASEGELSWYNIFLYNPDGNLQERAQVDPLVQSFSFQNLLQGRMYKMVIVTHSGELSNESFIFGRTVPASVSHLRGSNRNTTDSLWFNWSPASGDFDFYELILYNPNGTKKENWKDKDLTEWRFQGLVPGRKYVLWVVTHSGDLSNKVTAESRTAPSPPSLMSFADIANTSLAITWKGPPDWTDYNDFELQWLPRDALTVFNPYNNRKSEGRIVYGLRPGRSYQFNVKTVSGDSWKTYSKPIFGSVRTKPDKIQNLHCRPQNSTAIACSWIPPDSDFDGYSIECRKMDTQEVEFSRKLEKEKSLLNIMMLVPHKRYLVSIKVQSAGMTSEVVEDSTITMIDRPPPPPPHIRVNEKDVLISKSSINFTVNCSWFSDTNGAVKYFTVVVREADGSDELKPEQQHPLPSYLEYRHNASIRVYQTNYFASKCAENPNSNSKSFNIKLGAEMESLGGKCDPTQQKFCDGPLKPHTAYRISIRAFTQLFDEDLKEFTKPLYSDTFFSLPITTESEPLFGAIEGVSAGLFLIGMLVAVVALLICRQKVSHGRERPSARLSIRRDRPLSVHLNLGQKGNRKTSCPIKINQFEGHFMKLQADSNYLLSKEYEELKDVGRNQSCDIALLPENRGKNRYNNILPYDATRVKLSNVDDDPCSDYINASYIPGNNFRREYIVTQGPLPGTKDDFWKMVWEQNVHNIVMVTQCVEKGRVKCDHYWPADQDSLYYGDLILQMLSESVLPEWTIREFKICGEEQLDAHRLIRHFHYTVWPDHGVPETTQSLIQFVRTVRDYINRSPGAGPTVVHCSAGVGRTGTFIALDRILQQLDSKDSVDIYGAVHDLRLHRVHMVQTECQYVYLHQCVRDVLRARKLRSEQENPLFPIYENVNPEYHRDPVYSRH

SEQ ID NO: 132567 - DNA, 5994 bp, Artificial Sequence
  derived and/or modified sequence
atgctgagtcatggggccggactggctttgtggattacgctatctttgctgcaaactggcctggccgaaccggagagatgcaatttcaccttggcagagtccaaggccagcagtcacagcgtttcgatccagtggcgaatactcgggtctccatgcaacttttcactgatttactctagcgatactctgggcgcggctctgtgtcccacatttcgaatcgataatacaacctatggttgtaatctgcaagatttgcaagctgggacgatttacaacttcaggattatctcactcgacgaagagaggacagtggtgttacagaccgacccactgccccccgctcggtttggcgtctccaaagaaaaaactacgagcacttcacttcacgtctggtggaccccctcctccgggaaggtgacctcttatgaagttcagttattcgatgaaaataaccagaagattcagggggtgcaaatacaggagtctacttcttggaacgaatatacttttttcaacttaaccgccggatcgaaatacaatattgcaatcaccgctgtgtcagggggcaagcgctcattcagcgtatacaccaacggcagcactgtgccaagcccagtaaaagacattggtatctcgactaaggccaacagtcttcttatctcatggtcacatggatccggcaacgtcgagcggtaccgcctgatgctgatggacaagggaatactggtacacggcggtgtggtggacaaacatgcaacaagttatgccttccatgggttgacaccagggtacttgtacaatctcacagtaatgactgaggccgcgggtttacagaattaccggtggaaactggtgcggacggcaccaatggaggtgtctaacctcaaagtgactaacgacggctcactcactagtctcaaggttaagtggcagcggcctcctggcaacgtggacagctacaacattactctgtcacataagggcaccatcaaggaatctagagtactggcgccgtggatcacagagacgcacttcaaggagctggttcctgggcgcttgtaccaggtgactgtgtcatgtgtgtcgggtgagctatccgctcagaaaatggcggtgggtcgcacatttccagataaggtcgcaaatttagaggctaacaacaatggacgtatgcgatcactcgtggtgtcctggagcccaccagcaggggactgggagcaataccgcatccttttgttcaatgattccgtagtgctcctgaatatcaccgtgggaaaagaagaaactcagtatgtcatggacgacacaggccttgtgccggggcggcagtatgaagtcgaggttatagtcgagagcggcaatcttaagaattctgaaaggtgccaggggagaaccgttcctttagccgtgctgcagttacgggtcaagcacgctaatgaaactagcctttccattatgtggcaaacccctgtggccgaatgggagaagtacatcatctcactggccgatagagacctgctgctgatacacaaaagcttatctaaggatgctaaggagtttacattcaccgatcttgttccaggaaggaagtatatggcaacggtaacaagcatttctggcgatttaaagaactcaagttcagtaaaggggcggacagtgcctgctcaggtgacagatctgcacgtggctaaccaaggcatgacttcttctctgttcacaaattggacccaagcgcaaggggacgtagagttttaccaggtcttactgatccacgagaacgtagttatcaaaaacgaatctatttcatccgagacatctcgatatagtttccactcccttaagtccggatcattgtactctgtcgtggtgactaccgtgtctggagggatctcttcaagacaggttgttgtggagggcagaacagtcccctcaagcgtgagcggagtcacagtgaataacagtggccggaatgattaccttagtgtgagttggctgctggccccgggcgacgtagataactatgaagtgactctgagtcatgatggcaaggttgtgcagtccctcgtgatagctaagtccgttcgcgagtgtagtttctccagcctgacacctggccgcctgtacactgtgacaatcacaactagatccggtaagtacgaaaatcactctttttcccaggaaaggacagtccccgacaaggttcagggagtgagcgtgtcgaattcagcacgatcagactatctccgagtgagctgggtccacgctactggagattttgaccactatgaggtcacaattaaaaacaaaaacaatttcattcaaaccaagtcaataccaaaaagcgagaacgagtgtgtatttgtacaactagtgcctggacgcctctattctgtgaccgttactactaagtccggccagtatgaggcgaacgaacaggggaatggccgcactatccccgaaccggtgaaggatttgacactgagaaatcggtccacagaggacctccatgtgacgtggagtggggccaacggtgacgtggatcagtacgagattcagctgctgttcaacgacatgaaagtctttccaccgttccacctggtgaacactgcaacagagtaccggttcacctctttgacgccagggagacagtacaaaatcctggtacttaccatttccggggacgtccaacagtctgcgtttattgaggggttcacggtccccagcgcagtaaaaaacattcatatttccccaaacggagcaactgattcgctgacagtgaactggacaccaggaggaggcgacgtcgactcatatactgtgtcggccttccgccattctcagaaggtggatagtcaaactattcctaagcacgttttcgaacacacattccacagacttgaagccggcgaacagtaccagataatgatcgcctcggtctccgggagtctgaagaaccagatcaacgttgtcggacgaacagttcctgcctcagtgcagggcgtgattgccgataatgcctatagttcttattccctcattgtatcctggcaaaaagccgccggcgtggccgagagatatgacatcctcctgctgaccgaaaatggcatcttattgcggaatacaagcgagccagcaaccacaaaacagcacaaatttgaagatttgacccccggcaagaagtacaagattcagattctgactgtcagcggtggtctgttctcgaaggaagcacagacagaaggcagaacagtgcccgccgctgtcacagatcttagaatcactgaaaatagcactagacatttaagcttccgctggaccgcttccgagggcgaattgagctggtacaatatatttttgtacaacccagatggaaacctgcaagaacgggcccaggtcgacccactagtgcagagtttctctttccagaacctactgcagggcagaatgtacaagatggtgattgttactcatagcggcgaactgagtaatgagagtttcatttttggtaggactgtccctgcatctgtttcccaccttcggggttctaaccgcaatactacagattccctgtggtttaactggtcccctgcaagcggagattttgacttctacgaactgattctatataaccccaacggaactaagaaggaaaattggaaggataaggacctgaccgaatggcgtttccagggcctagtgccaggtaggaagtacgtgctctgggtggtaactcattcaggtgacttgagcaataaggttactgccgaatccaggacagctccctccccacctagcctgatgagctttgctgacattgcaaacacttcgcttgccattacctggaagggtccaccggattggaccgattataatgatttcgaactgcagtggctgccaagggacgcacttactgtctttaatccgtacaacaatcgcaaaagcgaaggccggattgtatacggtttgcggcctggcaggtcctaccagtttaatgtcaagactgtcagcggcgattcctggaaaacatatagtaaacccatcttcggttcagtgagaaccaaacctgataagattcagaacctgcattgtaggccccaaaactcaacggccattgcctgttcatggattccgcctgattccgatttcgacggatacagtatagaatgcaggaagatggacacacaggaggttgagtttagtagaaagctggaaaaagaaaagagcctactgaacattatgatgctggtcccacacaagcgttaccttgtcagcatcaaagtgcaaagcgcaggcatgacttcggaagtagtcgaggatagtaccatcactatgatcgatcgcccacctcctccacctcctcatattagggtcaatgagaaggatgtgttgatcagtaagtctagtatcaattttactgtgaattgttcatggttttccgatactaacggagctgttaaatattttacagtagtggtacgcgaggcggacggaagcgacgaacttaagccagaacagcagcaccctctgccttcatacctggagtataggcacaatgcttctatcagagtataccagacaaactactttgcttctaaatgtgcagaaaatcctaactccaactcaaaatcttttaacatcaagcttggtgccgagatggaaagcctcggaggcaagtgtgacccaacccagcagaaattctgcgatgggccactgaaaccccacacagcctaccgaatctctatcagggccttcacccaactgtttgatgaggacctcaaagagttcacgaagcctctctacagcgacacattttttagcctgcctattactaccgaaagtgaaccactgtttggcgcaatcgagggcgtctccgctgggttgttccttattggaatgcttgtcgccgtggtggctctgctcatatgccgccagaaagtgtctcacgggcgcgaacgtccgagcgccaggctgtccatccgccgagacagacctctgagtgtgcacctaaatctgggacagaaaggcaatcgcaaaacctcatgtcccatcaagataaatcagtttgaaggacatttcatgaagctccaagccgacagtaattacctgctttccaaggagtacgaggagctaaaggacgttgggagaaatcagagctgcgacatcgctctcctcccggaaaatcgtggcaagaatcgatacaataacatcctaccttacgacgctacccgagtaaagttaagcaacgtggatgacgatccctgtagtgactacatcaatgcatcatacatacccggcaacaactttcggcgagagtacatcgtgacgcaggggccgctgccgggcaccaaggatgacttctggaagatggtgtgggagcaaaatgtacacaatatagtcatggtaacgcagtgtgttgagaaggggcgggtgaagtgcgaccattattggccggctgatcaagacagcctctactatggcgatcttattctgcagatgctgtccgagtccgtactgcctgaatggacaatccgggagtttaagatttgcggggaagagcaactcgatgcccaccgtctcattagacacttccattacacagtgtggcctgaccatggggttcctgagacaacccagtcactgattcagtttgttagaactgtgagggactacatcaacaggtcacccggagccggcccaacagtggtccactgcagcgccggggtcgggagaactggcacgtttattgctttggatcgaattctgcagcagctggatagcaaagactcagttgacatttatggagccgtgcatgatctgcggttgcatcgggttcacatggttcagacggagtgccagtacgtgtatttacatcagtgtgtccgagatgtattgcgggcccgcaagctgagatctgagcaggagaatccactgtttccaatctacgagaatgtcaaccctgagtaccaccgggatcccgtctattccagacactag

SEQ ID NO: 132568 - DNA, 5994 bp, Artificial Sequence
  derived and/or modified sequence
atgctgagccacggggccggcctggccctgtggatcaccctgagcctgctgcagacaggcctggccgagcctgagcgctgcaacttcaccctggccgagagcaaggccagcagccacagcgtgtccatccagtggaggatcctgggcagcccctgcaacttcagcctcatctacagcagtgacaccctgggcgccgccctgtgccccaccttcagaattgacaacaccacctacggctgcaacctgcaggacctgcaggccggcaccatctacaacttccgcatcatcagcctggatgaggagaggacagtggtgctgcagacagaccccctgcccccagcccgcttcggcgtgtccaaggagaagaccaccagcaccagcctgcacgtgtggtggacccccagcagcggcaaggtgaccagctatgaggtgcagctgtttgatgagaacaaccagaagatccagggcgtgcagatccaggagagcacctcctggaatgagtacaccttcttcaacctgacagctggcagcaagtacaacatcgccatcacagctgtgtctgggggcaagaggagcttctctgtgtacaccaacggcagcacagtgcccagccctgtgaaggacatcggcatcagcaccaaggccaacagcctgctgatctcctggagccacggcagcggaaatgtggagcgctaccgcctgatgctgatggacaagggcatcctggtgcacggcggcgtggtggacaagcacgccaccagctatgccttccacggcctgaccccaggctacctgtacaacctgactgtgatgacagaggccgccggcctgcagaactaccgctggaagctggtgaggacagcccccatggaggtgagcaacctgaaggtgaccaatgatggcagcctgaccagcctgaaggtgaagtggcagaggcctcctggaaatgtggacagctacaacatcaccctgagccacaagggcaccatcaaggagagccgggtgctggccccctggatcacagagacccacttcaaggagctggtgcccggccgcctgtaccaggtgacagtgtcctgtgtgtctggagagctgagcgcccagaagatggctgtgggccgcaccttcccagacaaggtggccaacctggaggccaacaacaacggccgcatgaggagcctggtggtgtcctggagccccccagctggggactgggagcagtaccgcatcctgctcttcaatgacagcgtggtgctgctgaacatcaccgtgggcaaggaggagacccagtatgtgatggatgacaccggcctggtgcccggccggcagtatgaggtggaggtgattgtggagagcggcaacctgaagaacagcgagcgctgccagggccgcacagtgcccctggccgtgctgcagctgcgggtgaagcacgccaatgagaccagcctgagcatcatgtggcagacccctgtggccgagtgggagaagtacatcatcagcctggccgaccgggacctgctgctgatccacaagagcctgagcaaggatgccaaggagttcaccttcacagacctggtgcccggcaggaagtacatggccaccgtgaccagcatcagcggggacctgaagaacagcagctctgtgaagggccgcacagtgcctgcccaggtgacagacctgcacgtggccaaccagggcatgaccagcagcctcttcaccaactggacccaggcccagggagatgtggagttctaccaggtgctgctgattcatgaaaatgtggtgatcaagaatgaaagcatcagcagcgagaccagccgctacagcttccacagcctgaagagcggcagcctgtacagcgtggtggtgaccaccgtgtctgggggcatcagcagccggcaggtggtggtggagggccgcacagtgcccagctctgtgtctggagtgacagtgaacaacagcggcagaaatgactacctgtctgtgtcctggctgctggcccctggagatgtggacaactatgaggtgaccctgagccatgatggcaaggtggtgcagagcctggtgattgccaagtctgtgcgggagtgcagcttcagcagcctgaccccaggccgcctgtacacagtgaccatcaccaccaggtctgggaagtatgagaaccacagcttcagccaggagaggacagtgcctgacaaggtgcagggcgtgtctgtgagcaacagcgcccggagtgactacctgcgggtgtcctgggtgcacgccaccggggactttgaccactatgaggtgaccatcaagaacaagaacaacttcatccagaccaagagcatccccaagtcagaaaatgaatgtgtgtttgtgcagctggtgcccggccgcctgtacagcgtgacagtgaccaccaagagcggccagtatgaggccaatgagcagggcaatggccgcaccatccctgagcctgtgaaggacctgaccctgaggaacagaagcacagaggacctgcacgtgacctggagcggggccaatggagatgtggaccagtatgagatccagctgctcttcaatgacatgaaggtgttcccccccttccacctggtgaacacagccacagagtaccgcttcaccagcctgaccccaggccggcagtacaagatcctggtgctgaccatctctggagatgtgcagcagagcgccttcatcgagggcttcaccgtgcccagcgctgtgaagaacatccacatcagccccaacggggccacagacagcctgactgtgaactggaccccaggaggaggagatgtggacagctacacagtgtctgccttccgccacagccagaaggtggacagccagaccatccccaagcacgtgtttgagcacaccttccaccggctggaggccggggagcagtaccagatcatgattgcctctgtgtctggcagcctgaagaaccagatcaacgtggtgggccgcacagtgcctgcctctgtgcagggcgtgattgctgacaatgcctacagcagctacagcctgattgtgtcctggcagaaggccgccggcgtggccgagagatatgacatcctgctgctgacagaaaatggcatcctgctgaggaacaccagcgagcccgccaccaccaagcagcacaagtttgaggacctgaccccaggcaagaagtacaagatccagatcctgactgtgtctgggggcctcttcagcaaggaggcccagacagagggccgcacagtgcctgctgctgtgacagacctgcgcatcacagagaacagcaccaggcacctgtccttccgctggacagccagcgagggggagctgtcctggtacaacatcttcctgtacaacccagatggcaacctgcaggagcgggcccaggtggaccccctggtgcagagcttctccttccagaacctgctgcagggccgcatgtacaagatggtgattgtgacccacagcggggagctgagcaatgaaagcttcatcttcggccgcacagtgcctgcctctgtgagccacctgcggggcagcaacagaaacaccacagacagcctgtggttcaactggagccctgccagcggggactttgacttctatgagctgatcctgtacaaccccaacggcaccaagaaggagaactggaaggacaaggacctgacagagtggaggttccagggcctggtgcccggcaggaaatatgtgctgtgggtggtgacccacagcggggacctgagcaacaaggtgacagctgagagcaggacagcccccagcccccccagcctgatgagctttgctgacatcgccaacaccagcctggccatcacctggaagggccccccagactggacagactacaatgactttgagctgcagtggctgcccagagatgccctgaccgtcttcaacccctacaacaacaggaagtctgagggccgcatcgtgtatggcctgcggcccggccgcagctaccagttcaacgtgaagacagtgtctggggacagctggaagacctacagcaagcccatcttcggctctgtgaggaccaagccagacaagatccagaacctgcactgccggccccagaacagcacagccatcgcctgctcctggatccccccagacagcgactttgatggctacagcattgagtgcaggaagatggacacccaggaggtggagttcagcaggaagctggagaaggagaagagcctgctgaacatcatgatgctggtgccccacaagcgctacctggtgtccatcaaggtgcagagcgctggcatgaccagcgaggtggtggaggacagcaccatcaccatgattgaccggcccccacctcctccaccccacatccgggtgaatgagaaggatgtgctgatcagcaagagcagcatcaacttcaccgtgaactgctcctggttcagtgacaccaacggggctgtgaagtacttcaccgtggtggtgcgggaggctgatggcagtgatgagctgaagccagagcagcagcaccccctgcccagctacctggagtaccgccacaatgccagcatccgggtgtaccagaccaactactttgccagcaaatgtgccgagaaccccaacagcaacagcaagagcttcaacatcaagctgggcgctgagatggagagcctgggcggcaaatgtgaccccacccagcagaagttctgtgatggccccctgaagccccacacagcctaccgcatcagcatccgggccttcacccagctgtttgatgaggacctgaaggagttcaccaagcccctgtacagcgacaccttcttcagcctgcccatcaccacagaaagtgagcccctgtttggagccatcgagggcgtgtctgctggcctcttcctgattggcatgctggtggccgtggtggccctgctgatctgccggcagaaggtgagccacggccgggagcggcccagcgcccggctgagcatccggcgggaccggcccctgtctgtgcacctgaacctgggccagaagggcaacaggaagaccagctgccccatcaagatcaaccagtttgagggccacttcatgaagctgcaggccgacagcaactacctgctgagcaaggagtatgaggagctgaaggatgtgggcaggaaccagagctgtgacatcgccctgctgcctgagaacagaggcaagaaccgctacaacaacatcctgccctatgatgccaccagggtgaagctgagcaatgtggatgatgacccctgcagcgactacatcaatgccagctacatccctggcaacaacttcagaagagagtacatcgtgacccagggccccctgcccggcaccaaggatgacttctggaagatggtgtgggagcagaatgtgcacaacatcgtgatggtgacccagtgtgtggagaagggccgggtgaagtgtgaccactactggccagctgaccaggacagcctgtactatggagacctgatcctgcagatgctgtctgagagcgtgctgcctgagtggaccatccgggagttcaagatctgtggggaggagcagctggatgcccacaggctcatccgccacttccactacacagtgtggccagaccatggagtgcctgagaccacccagagcctcatccagtttgtgaggacagtgcgggactacatcaacagaagccctggagctggccccaccgtggtgcactgcagcgctggggtgggccgcacaggcaccttcatcgccctggaccgcatcctgcagcagctggacagcaaggacagcgtggacatctatggagctgtgcatgacctgcggctgcaccgggtgcacatggtgcagacagagtgccagtatgtgtacctgcaccagtgtgtgagagatgtgctgcgggccaggaagctgcggtctgagcaggagaaccccctcttccccatctatgaaaatgtgaaccctgagtaccaccgggaccctgtgtacagccgccactag

SEQ ID NO: 132569 - DNA, 5994 bp, Artificial Sequence
  derived and/or modified sequence
atgctgagccacggcgccggcctggccctgtggatcaccctgagcctgttgcagaccgggctcgccgagcccgagcgctgcaattttactctcgccgagagcaaagcctcgtcacactcagtgtccatacaatggcgcatcttgggaagcccttgcaacttttcgcttatatactcttctgacaccctgggggctgcgctctgcccaacgtttcgcattgataacactacttacggctgtaatctccaagacctacaggctggcactatctataacttcagaattatcagcctcgatgaagaacgcacggtagtgctgcagactgaccctctgcctccggcacgctttggcgtgtcgaaggagaagaccacgagtacctctcttcacgtctggtggacaccaagcagcggaaaggtaacaagttatgaggtccagctgttcgatgaaaacaaccaaaagatccagggcgtgcaaattcaggagagcaccagctggaatgagtatacattttttaacctgacggccggctccaaatacaacatcgccataacagctgtaagtggtgggaaaagatccttcagcgtctacacaaatggtagcaccgttccatctccagtgaaggacataggaatttctacaaaagctaactctctgctcatttcgtggagccacggaagcgggaacgtggagcgctaccgacttatgctgatggataaagggatcctagtccacggcggcgtcgtggataagcatgctaccagctacgcctttcacggtctcactcccgggtacctatataacctgaccgtaatgaccgaggcagctggattacagaattatagatggaagctcgtgcggacagcgcctatggaagtctcaaatttgaaggtcacaaacgacggttcacttacaagcttaaaagtgaaatggcagcgaccgccagggaacgtggactcttataatataaccttatctcataagggtaccatcaaggagagcagggttttggcaccatggattacagagacacattttaaagagttggtgcccggacggctctaccaagtaacagtgagctgtgtcagtggggaactcagcgctcagaagatggctgttggacggacatttccagataaggtcgctaatctcgaggccaataataacgggcggatgcgatcattagtggtcagctggagcccccctgcgggggattgggaacagtaccggatcctgctgtttaacgacagcgttgtgctgttgaacattacggtgggcaaagaggagacacaatacgtaatggatgatactggccttgttcccggccgacagtatgaggtggaggttatcgtggaaagcgggaacttaaaaaactcagaacgttgccagggaagaacagttccgctcgcagtgcttcaattgcgggtgaaacacgccaatgagacttctttgtctattatgtggcaaacccctgttgcagaatgggagaaatatatcatttccctggccgatagggacctgttgctcatccacaagtccctctccaaagacgccaaagaattcacttttacagacctggtgccgggacggaagtacatggctaccgtgaccagtatatccggcgatcttaagaattccagttccgtaaaaggccggacagtgccagcccaggtgacagatctgcacgtagctaatcaaggaatgacttccagtctcttcactaattggactcaagcccagggggacgtggagttttaccaggtgctcctcatccacgaaaacgtggtcattaagaatgagtcaatttcctctgaaacatccaggtactcattccattctctcaagagtgggtccctttactccgtcgtggtgactacagtatctgggggcatcagctcgcgtcaggttgtcgtggaggggcgcacagtgcctagctcggtgagcggcgtaactgtgaataatagtggcagaaatgactatctgagtgtgtcctggctgctcgcccctggcgatgtggataactatgaagtcaccttgagccatgacggaaaagtggtccagtcgctggtgatagcgaagtctgtccgagagtgctccttttcatcactcacgcccggccgattgtatacagttaccataaccactcggagtggcaagtacgagaaccacagcttctctcaggagagaactgtacctgacaaggtgcaaggagttagcgtctcgaactccgcacgcagtgactacttgcgcgtttcctgggtccatgccactggcgatttcgatcactacgaggtgaccattaaaaataaaaataactttatacagaccaaatccatacccaaaagcgagaatgaatgcgtgttcgttcagcttgtgcctggtagactgtacagcgtcacagtcaccacaaagtctgggcagtacgaagctaacgaacaaggaaacggcagaaccataccggaacccgtgaaagaccttacactcagaaatcgaagcacagaggacctgcacgtgacttggtctggcgctaacggcgacgtggaccagtatgaaattcagttactcttcaacgacatgaaggtcttccctccgttccatctcgttaatacagcaactgagtaccgcttcacgtctcttactcccggacggcagtataaaattcttgtcctgactatctccggtgatgtgcagcaatcagcattcatcgaaggcttcaccgtcccgtccgccgtgaaaaatatccacatttcacctaacggagcaacggactctttaaccgttaattggacacccggggggggggatgtcgattcttacaccgtgtctgctttccgacactcacaaaaggtggattctcagacaattccaaagcatgtgttcgaacataccttccatcgcctcgaggccggcgaacagtatcagattatgatagcctctgtatccggtagcctaaaaaaccaaatcaatgtagtcggacgtaccgtgcctgcttccgtgcagggggtgatcgctgacaatgcctattccagctactccttaattgtgagttggcagaaggcagcaggagttgccgaacgctacgatattcttcttctcactgaaaacggcatcctactgagaaacaccagcgagcccgcgacaactaagcagcacaagtttgaggatctcacgcccggtaaaaagtataagatacaaattctgacggtaagtggcggcctattttcaaaggaagcccagacagaaggtcgaacagtgccggcagctgtcaccgacctgaggatcaccgaaaattcaacaagacatttatcttttcggtggacagcatccgagggggaactgtcctggtacaatatctttctgtacaatcccgacggaaatttgcaagagcgcgctcaagtggaccctttggtccagagttttagctttcaaaacctcctgcaaggtaggatgtataagatggtcatcgttactcattcgggcgagttgagcaatgagagcttcattttcggcagaactgtgcctgctagtgtttctcatctccgggggagtaaccgcaatacaacggattcactgtggtttaactggagtcctgcttcaggggactttgacttctatgaactgatcctgtacaaccccaatggtacgaagaaggagaactggaaggacaaggacctcactgagtggcggttccaaggtctggtgcctgggagaaaatatgtgctttgggtggtcacccacagtggcgatctcagtaacaaagtgaccgctgaatctcgcactgctccgtcaccaccgtcccttatgtccttcgccgatattgccaatacttcgctggccatcacatggaaaggcccgcctgattggaccgactacaacgattttgaactacagtggctgccccgagatgcactgacagttttcaatccttataataaccgaaagagcgagggccggattgtctacggattaagaccagggagaagttatcagtttaatgtcaaaacggtctcaggagattcatggaagacctattccaaacccatctttggctccgtcagaaccaaacctgataagatccagaaccttcactgccgcccgcagaattccaccgcaatcgcttgtagctggataccccccgactcggatttcgatggatactcaattgagtgtcgcaagatggacactcaagaggtggaattcagcagaaaattagaaaaggagaagagtctgctcaacatcatgatgctggtgccccataaaaggtacctggtatcaattaaagttcagagtgcaggcatgacatctgaggtcgtcgaagacagtaccatcactatgatcgatagaccgccccccccacctccccatatccgagttaacgagaaggacgtgctcattagcaagtcgtccatcaacttcaccgtgaattgctcctggttttctgatacaaatggcgctgtgaagtatttcaccgtcgtagtgcgggaggccgacgggtctgacgagctgaagcctgagcagcagcacccgctgcccagctacctggagtatcgccacaacgcttccattcgggtttaccaaactaactattttgcctcaaaatgtgcggaaaatcctaatagtaacagtaagagctttaacatcaagctcggggcagaaatggaatctctgggtggcaaatgcgatccaactcagcagaagttttgtgatgggcctctaaagccccataccgcatacagaattagtatccgtgccttcactcagctctttgacgaagacctgaaggaattcacaaagcccctctattccgacacttttttttccctgcccatcaccaccgaatccgaacccttattcggagcaatcgagggggttagtgctgggttattcctgatcggaatgcttgtcgcagttgtggctctgcttatatgcaggcagaaggtttcacatgggcgcgagagaccatctgccaggctgtccatccggcgggataggccactgtcggtacatctcaacctgggacaaaaggggaatcgaaagaccagctgtcccatcaaaatcaaccagttcgagggccactttatgaagctgcaggctgactccaactatctgttgtcaaaggagtatgaggaactcaaggacgtgggacgtaatcagagctgcgacatcgctctactgcccgagaaccggggcaaaaatcgatataacaacattctgccctacgatgcgacccgcgtgaaattatcaaacgtagacgatgatccatgcagcgactatattaatgcctcgtacattccaggcaataactttcgacgagaatacattgtgacgcaggggccactaccaggaacaaaggacgatttttggaaaatggtctgggaacagaatgtacacaatattgtgatggtcacccagtgcgtcgagaagggaagagtgaaatgcgaccactactggcccgctgaccaggacagcctctactatggggacttgatcctgcaaatgctatccgagtcagtcctcccagagtggaccatccgtgagtttaaaatctgtggggaggagcaattagacgctcaccgactgattcggcactttcactataccgtctggcccgaccacggggtcccggagacaactcaatcactcattcagttcgtgcgaacggtccgagattatattaatcgctctcccggagccggcccgacagtggtgcattgctctgcaggcgtgggacgtacaggcacttttattgccctcgacagaatattgcagcagcttgattccaaagattctgtcgatatctacggtgcagtgcacgatctgaggcttcacagggtacacatggtgcagactgagtgccagtatgtctatctacaccaatgtgtacgggacgtgctgagagcgagaaagttaaggagcgagcaagagaatcctctgtttcctatttacgagaatgtcaatccagagtatcaccgggatccagtctattcccggcattag

SEQ ID NO: 132570 - DNA, 5993 bp, Artificial Sequence
  derived and/or modified sequence
atgttgagtcatggagccggactggccttgtggattacactatcgctcctacagacggggcttgctgaacctgagcggtgtaactttaccctggcagagtcaaaggctagttctcattcggtctccattcaatggcggatcctaggcagtccctgcaattttagtctcatctactcttccgatactctaggagcggcactctgtccgactttccgaatcgataacacaacctatgggtgtaatctacaggacctgcaggctgggacaatttacaacttccgcatcatcagtctggatgaagaaagaaccgtggtcttgcagaccgaccctctacccccagcacgctttggggtgtcaaaggaaaaaacgacttctacaagtttacacgtgtggtggaccccttcatctggtaaagtaacaagctacgaggtccagctcttcgacgaaaataaccagaaaatccagggggtgcagatccaggagtccacgtcttggaatgagtacacttttttcaacttgacagctggatcaaaatataatatcgcgattactgcagtgtccggtggcaaaagatccttcagcgtgtacacaaacggaagtaccgtccctagccccgtgaaagatatcggtatcagtactaaggctaatagtctcctcataagttggtcacacgggtcaggaaacgtcgagcgctacagacttatgctgatggacaagggcattttagtgcatggaggtgtcgtggacaagcacgctactagctatgctttccacggcctgacacccggatacctgtacaacctaactgttatgaccgaggctgccggactgcagaactacaggtggaagctggtccgcaccgccccaatggaagttagcaacttgaaggtcacgaacgacggctctttgactagcctgaaagtgaagtggcaaaggccccctggtaacgtcgattcttacaatataaccttatctcataaaggaacaatcaaagaatcaagagtgttagccccatggattaccgagactcactttaaggagctcgtccctgggaggctctaccaagtgacagtgtcatgcgtgtcaggagaactttcagctcagaagatggccgtagggagaacctttccagacaaggtagccaacctggaggctaataacaatggccgtatgcgaagcctcgtggtcagttggagcccgccagcgggtgactgggagcaataccgcattctcctcttcaatgattctgtggtccttttgaatattactgtgggcaaagaagagacacagtacgttatggacgacaccggactggttccagggagacagtatgaagtcgaagttatcgttgaaagcggtaacctgaaaaattcagagaggtgtcagggcagaacggtccctctcgctgttctacagctgagagtcaaacatgccaatgagacaagcctgtctattatgtggcagacacctgttgccgaatgggagaaatatataatcagtctcgccgacagggaccttttgttgatccacaaatcactgagtaaagacgccaaagaatttacctttacggatttggtacctggacgaaagtacatggctaccgtgacttccatcagcggcgatctcaagaattcatcctcggttaaagggagaaccgtccctgcccaggttactgatcttcatgtggcaaatcaggggatgacatcatccctcttcacaaattggacacaggcgcaaggagatgtggagttttaccaggtactcctgatccatgaaaatgtagtgatcaaaaacgaatctatcagctccgagacttcaaggtatagttttcacagcttgaagtcgggctcactgtattctgttgttgtgaccacagtgtccgggggtatttcctcccgccaggtggtggtggaggggaggaccgtgccttcttccgtgtctggagtaaccgtcaataatagtggcaggaatgattacctctccgtttcgtggctcctggcgcctggggacgtggacaactacgaggtaaccctgtcccatgatggcaaagttgtccagtcattggtgatagcgaaaagcgtgcgggagtgttcgttttcaagtttaacgcccggtaggttgtacactgtaacaattactacgcggtctggaaaatatgagaaccattcctttagccaggagcggacagttcctgacaaagttcagggcgtgtccgtgtccaatagcgccagaagtgactacctccgtgtgtcctgggtgcacgccacaggcgatttcgaccactatgaagtgacgatcaagaataagaataacttcattcagaccaaatccatccctaaatcagagaacgaatgcgtgttcgtgcagctggtaccagggaggctgtatagcgtgacagttacaactaagtcaggacaatatgaggcaaacgagcagggcaatggaaggacgattccagaaccagttaaggacctgacgttgaggaacagatcaaccgaggatctccatgtgacttggagtggggctaacggggacgtggaccagtatgaaatccagttacttttcaacgacatgaaagtgtttccaccctttcacctcgtcaacacggccacagaatatagatttacaagcctcacgccaggacgacagtataagatcctcgtactgactataagcggcgacgtacagcagagcgcgtttatcgagggattcacagtgccctctgctgtaaaaaatatccatatcagccctaacggcgcaactgattcacttacggtgaattggacaccagggggtggagacgtcgactcttacacggtctccgcttttaggcattctcagaaggtagactctcagacaatcccaaaacatgtgtttgaacatacgtttcaccggcttgaggccggagaacagtaccagatcatgattgcatcggttagcggctccctgaaaaatcagatcaacgtagtgggccgtaccgttcctgcttccgtgcagggagtgatagccgataacgcatactcttcatactcactgattgtgagctggcagaaagccgcaggagtggctgaacgatacgacatcttgctgctaactgaaaacggaattttgctgcggaacacctccgaacccgctacaactaaacagcataaattcgaggatcttacacccggaaagaaatataaaatccagattctgacagtgagtgggggactcttttccaaggaggctcaaacggaaggacgcacagtgccagccgctgtgacagatctgcgaatcactgaaaattccacccgccacctgtcattccggtggacagcaagcgagggtgaactgtcttggtacaacatattcttgtataatccagacggtaatcttcaggaacgggctcaggtcgaccccctcgtccagtcgttttcttttcagaatttactgcagggcaggatgtataaaatggtcatcgttactcactcaggcgagttgtcgaacgagtctttcatatttggccgtactgttcccgcttctgtgagccaccttagggggtccaacaggaacaccaccgattctctttggttcaattggtcaccagcatcgggagacttcgacttttacgaactgattttgtacaaccctaatggcactaaaaaagaaaattggaaagataaagatctcacagagtggcggtttcagggtcttgtgcctggcaggaaatacgtcctctgggttgtcacccatagtggggatttgtcaaataaagtgacggccgagagtaggactgccccttcccccccaagtctcatgtccttcgccgacattgcaaatacgtcacttgccatcacctggaaaggccctcccgactggaccgattacaacgactttgagctgcagtggctgcctcgggacgctctcaccgtttttaatccctataacaatagaaagagcgaggggaggatcgtttacgggttgcgcccaggacgctcgtatcagttcaatgtcaagactgtatcaggagacagctggaagacctattccaagccgatctttggcagtgtgcggacaaaacctgacaagatccaaaacctgcactgtcggccacaaaatagtactgcaatcgcttgttcttggatcccaccagattctgatttcgacgggtattcaatcgagtgtcgaaagatggacactcaagaggtcgagtttagtcggaaattagagaaagaaaagtccctcctcaacattatgatgttagtcccacataagaggtatcttgtctctatcaaggtgcagtctgccggaatgacatccgaagtcgtggaggacagcaccattactatgatcgacaggccccctccgcctccccctcacatccgggtcaacgagaaagatgtgcttatcagtaaatcatcaatcaatttcaccgtgaactgcagttggttttccgacaccaacggggctgttaagtactttaccgtggtcgtgagagaggcggacggaagtgatgagctgaagcctgagcagcaacaccccttaccctcttacctggagtatcgtcacaatgcatcgattcgtgtgtatcagactaactacttcgccagtaagtgcgccgagaaccccaacagtaatagcaagagctttaacattaagctaggcgctgagatggaatcactgggtgggaagtgtgatccaactcagcagaaattctgcgatggcccattgaagccacatacagcctacagaatctcaattcgagcattcacccaactgtttgacgaggaccttaaggagttcaccaagccactatatagcgatacgttcttctctctccccattacaaccgagagtgagccactctttggggcaatcgagggtgtgtctgctgggctctttttaattggtatgcttgttgccgtggtggccctcctcatctgcaggcagaaggtgagtcacggcagggagaggcctagtgccaggctgtccattaggagagacagacctctatccgtgcacttaaatctcggtcagaagggtaaccgaaaaacgtcttgccctataaaaatcaaccagtttgaggggcactttatgaagttgcaggctgattctaattacctgctgagtaaagaatacgaggaattgaaggacgttggacgtaatcagtcctgtgacattgccttgctgcccgaaaatagagggaagaaccggtacaataacattctcccatacgacgccaccagggtgaagctgagcaacgtagacgatgacccctgttctgattatatcaatgccagctacattcctgggaacaatttccgccgtgagtatatcgtcacccaggggccattgccaggaactaaagatgatttctggaaaatggtgtgggagcaaaacgtgcacaacatcgtgatggtgacgcaatgcgtcgagaaagggagagtgaagtgcgaccactactggcccgctgaccaggattccctgtattacggtgacctcatcttacagatgctcagtgagagtgtgttaccagaatggactattcgcgagttcaaaatctgtggagaagagcaattggacgctcaccggttaattcggcacttccattacactgtgtggccagatcacggggtgccagaaaccacccagtccctcatccagtttgtgaggacagtgcgcgactatataaaccggtctccaggtgccggacctaccgtggttcactgtagcgcgggagtcggaaggactggcacatttatcgccctcgaccgcattttacagcagctcgactccaaagatagcgtcgatatctacggggcagttcacgaccttcgtcttcaccgagtgcatatggtgcagaccgaatgccagtatgtgtacttacaccaatgcgtcagggacgtactgcgagccagaaagttacgttctgagcaggaaaatccgctgtttcccatttatgagaatgtaaatcctgagtatcatcgggaccccgtgtacagtcgccatta

SEQ ID NO: 132571 - DNA, 6110 bp, Artificial Sequence
  derived and/or modified sequence
gtctcctctggatcttaactactgagcgcaatgctgagccatggagccgggttggccttgtggatcacactgagcctgctgcagactggactggcggagccagagagatgtaacttcaccctggcggagtccaaggcctccagccattctgtgtctatccagtggagaattttgggctcaccctgtaactttagcctcatctatagcagtgacaccctgggggccgcgttgtgccctacctttcggatagacaacaccacatacggatgtaaccttcaagatttacaagcaggaaccatctataacttcaggattatttctctggatgaagagagaacagtggtcttgcaaacagatcctttacctcctgctaggtttggagtcagtaaagagaagacgacttcaaccagcttgcatgtttggtggactccttcttccggaaaagtcacctcatatgaggtgcaattatttgatgaaaataaccaaaagatacagggggttcaaattcaagaaagtacttcatggaatgaatacacttttttcaatctcactgctggtagtaaatacaatattgccatcacagctgtttctggaggaaaacgttctttttcagtttataccaatggatcaacagtgccatctccagtgaaagatattggtatttccacaaaagccaattctctcctgatttcctggtcccatggttctgggaatgtggaacgataccggctgatgctaatggataaagggatcctagttcatggcggtgttgtggacaaacatgctacttcctatgcttttcacgggctgacccctggctacctctacaacctcactgttatgactgaggctgcagggctgcaaaactacaggtggaaactagtcaggacagcccccatggaagtctcaaatctgaaggtgacaaatgatggcagtttgacctctctaaaagtcaaatggcaaagacctcctggaaatgtggattcttacaatatcaccctgtctcacaaagggaccatcaaggaatccagagtattagcaccttggattactgaaactcactttaaagagttagtccccggtcgactttatcaagttactgtcagctgtgtctctggtgaactgtctgctcagaagatggcagtgggcagaacatttccagacaaagttgcaaacctggaggcaaacaataatggcaggatgaggtctcttgtagtgagctggtcgccccctgctggagactgggagcagtatcggatcctactcttcaatgattctgtggtgctgctcaacatcactgtgggaaaggaagaaacacagtatgtcatggatgacacggggctcgtaccgggaagacagtatgaggtggaagtcattgttgagagtggaaatttgaagaattctgagcgttgccaaggcaggacagtccccctggctgtcctccagcttcgtgtcaaacatgccaatgaaacctcactgagtatcatgtggcagacccctgtagcagaatgggagaaatacatcatttccctagctgacagagacctcttactgatccacaagtcactctccaaagatgccaaagaattcacttttactgacctggtgcctggacgaaaatacatggctacagtcaccagtattagtggagacttaaaaaattcctcttcagtaaaaggaagaacagtgcctgcccaagtgactgacttgcatgtggccaaccaaggaatgaccagtagtctgtttactaactggacccaggcacaaggagacgtagaattttaccaagtcttactgatccatgaaaatgtggtcattaaaaatgaaagcatctccagtgagaccagcagatacagcttccactctctcaagtccggcagcctgtactccgtggtggtaacaacagtgagtggagggatctcttcccgacaagtggttgtggagggaagaacagtcccttccagtgtgagtggagtaacggtgaacaattccggtcgtaatgactacctcagcgtttcctggctgctggcgcccggagatgtggataactatgaggtaacattgtctcatgacggcaaggtggttcagtcccttgtcattgccaagtctgtcagagaatgttccttcagctccctcaccccaggccgcctctacaccgtgaccataactacaaggagtggcaagtatgaaaatcactccttcagccaagagcggacagtgcctgacaaagtccagggagtcagtgttagcaactcagccaggagtgactatttaagggtatcctgggtgcatgccactggagactttgatcactatgaagtcaccattaaaaacaaaaacaacttcattcaaactaaaagcattcccaagtcagaaaacgaatgtgtatttgttcagctagtccctggacggttgtacagtgtcactgttactacaaaaagtggacaatatgaagccaatgaacaagggaatgggagaacaattccagagcctgttaaggatctaacattgcgcaacaggagcactgaggacttgcatgtgacttggtcaggagctaatggggatgtcgaccaatatgagatccagctgctcttcaatgacatgaaagtatttcctccttttcaccttgtaaataccgcaaccgagtatcgatttacttccctaacaccaggccgccaatacaaaattcttgtcttgacgattagcggggatgtacagcagtcagccttcattgagggcttcacagttcctagtgctgtcaaaaatattcacatttctcccaatggagcaacagatagcctgacggtgaactggactcctggtgggggagacgttgattcctacacggtgtcggcattcaggcacagtcaaaaggttgactctcagactattcccaagcacgtctttgagcacacgttccacagactggaggccggggagcagtaccagatcatgattgcctcagtcagcgggtccctgaagaatcagataaatgtggttgggcggacagttccagcatctgtccaaggagtaattgcagacaatgcatacagcagttattccttaatagtaagttggcaaaaagctgctggtgtggcagaaagatatgatatcctgcttctaactgaaaatggaatccttctgcgcaacacatcagagccagccaccactaagcaacacaaatttgaagatctaacaccaggcaagaaatacaagatacagatcctaactgtcagtggaggcctctttagcaaggaagcccagactgaaggccgaacagtcccagcagctgtcaccgacctgaggatcacagagaactccaccaggcacctgtccttccgctggaccgcctcagagggggagctcagctggtacaacatctttttgtacaacccagatgggaatctccaggagagagctcaagttgacccactagtccagagcttctctttccagaacttgctacaaggcagaatgtacaagatggtgattgtaactcacagtggggagctgtctaatgagtctttcatatttggtagaacagtcccagcctctgtgagtcatctcagggggtccaatcggaacacgacagacagcctttggttcaactggagtccagcctctggggactttgacttttatgagctgattctctataatcccaatggcacaaagaaggaaaactggaaagacaaggacctgacggagtggcggtttcaaggccttgttcctggaaggaagtacgtgctgtgggtggtaactcacagtggagatctcagcaataaagtcacagcggagagcagaacagctccaagtcctcccagtcttatgtcatttgctgacattgcaaacacatccttggccatcacgtggaaagggcccccagactggacagactacaacgactttgagctgcagtggttgcccagagatgcacttactgtcttcaacccctacaacaacagaaaatcagaaggacgcattgtgtatggtcttcgtccagggagatcctatcaattcaacgtcaagactgtcagtggtgattcctggaaaacttacagcaaaccaatttttggatctgtgaggacaaagcctgacaagatacaaaacctgcattgccggcctcagaactccacggccattgcctgttcttggatccctcctgattctgactttgatggttatagtattgaatgccggaaaatggacacccaagaagttgagttttccagaaagctggagaaagaaaaatctctgctcaacatcatgatgctagtgccccataagaggtacctggtgtccatcaaagtgcagtcggccggcatgaccagcgaggtggttgaagacagcactatcacaatgatagaccgcccccctcctccacccccacacattcgtgtgaatgaaaaggatgtgctaattagcaagtcttccatcaactttactgtcaactgcagctggttcagcgacaccaatggagctgtgaaatacttcacagtggtggtgagagaggctgatggcagtgatgagctgaagccagaacagcagcaccctctcccttcctacctggagtacaggcacaatgcctccattcgggtgtatcagactaattattttgccagcaaatgtgccgaaaatcctaacagcaactccaagagttttaacattaagcttggagcagagatggagagcctaggtggaaaatgcgatcccactcagcaaaaattctgtgatggaccactgaagccacacactgcctacagaatcagcattcgagcttttacacagctctttgatgaggacctgaaggaattcacaaagccactctattcagacacatttttttctttacccatcactactgaatcagagcccttgtttggagctattgaaggtgtgagtgctggtctgtttttaattggcatgctagtggctgttgttgccttattgatctgcagacagaaagtgagccatggtcgagaaagaccctctgcccgtctgagcattcgtagggatcgaccattatctgtccacttaaacctgggccagaaaggtaaccggaaaacttcttgtccaataaaaataaatcagtttgaagggcatttcatgaagctacaggctgactccaactaccttctatccaaggaatacgaggagttaaaagacgtgggccgaaaccagtcatgtgacattgcactcttgccggagaatagagggaaaaatcgatacaacaatatattgccctatgatgccacgcgagtgaagctctccaatgtagatgatgatccttgctctgactacatcaatgccagctacatccctggcaacaacttcagaagagaatacattgtcactcagggaccgcttcctggcaccaaggatgacttctggaaaatggtgtgggaacaaaacgttcacaacatcgtcatggtgacccagtgtgttgagaagggccgagtaaagtgtgatcattactggccagcggaccaggattccctctactatggggacctcatcctgcagatgctctcagagtccgtcctgcctgagtggaccatccgggagtttaagatatgcggtgaggaacagcttgatgcacacagactcatccgccactttcactatacggtgtggccagaccatggagtcccagaaaccacccagtctctgatccagtttgtgagaactgtcagggactacatcaacagaagcccgggtgctgggcccactgtggtgcactgcagtgctggtgtgggtaggactggaacctttattgcattggaccgaatcctccagcagttagactccaaagactctgtggacatttatggagcagtgcacgacctaagacttcacagggttcacatggtccagactgagtgtcagtatgtctacctacatcagtgtgtaagagatgtcctcagagcaagaaagctacggagtgaacaagaaaaccccttgtttccaatctatgaaaatgtgaatccagagtatcacagagatccagtctattcaaggcattgagaatgtacctgaagagctcctggataaaaattattcactgtgtgatttgtttttaaaaacttgcttcatgccctacagaggtgcca

SEQ ID NO: 132572 - DNA, 5994 bp, Artificial Sequence
  derived and/or modified sequence
atgctgagccacggcgccggcctggccctgtggatcaccctgagcctgctgcagaccggcctggccgagcccgagagatgcaacttcaccctggccgagagcaaggccagcagccacagcgtgagcatccagtggagaatcctgggcagcccctgcaacttcagcctgatctacagcagcgacaccctgggcgccgccctgtgccccaccttcagaatcgacaacaccacctacggctgcaacctgcaggacctgcaggccggcaccatctacaacttcagaatcatcagcctggacgaggagagaaccgtggtgctgcagaccgaccccctgccccccgccagattcggcgtgagcaaggagaagaccaccagcaccagcctgcacgtgtggtggacccccagcagcggcaaggtgaccagctacgaggtgcagctgttcgacgagaacaaccagaagatccagggcgtgcagatccaggagagcaccagctggaacgagtacaccttcttcaacctgaccgccggcagcaagtacaacatcgccatcaccgccgtgagcggcggcaagagaagcttcagcgtgtacaccaacggcagcaccgtgcccagccccgtgaaggacatcggcatcagcaccaaggccaacagcctgctgatcagctggagccacggcagcggcaacgtggagagatacagactgatgctgatggacaagggcatcctggtgcacggcggcgtggtggacaagcacgccaccagctacgccttccacggcctgacccccggctacctgtacaacctgaccgtgatgaccgaggccgccggcctgcagaactacagatggaagctggtgagaaccgcccccatggaggtgagcaacctgaaggtgaccaacgacggcagcctgaccagcctgaaggtgaagtggcagagaccccccggcaacgtggacagctacaacatcaccctgagccacaagggcaccatcaaggagagcagagtgctggccccctggatcaccgagacccacttcaaggagctggtgcccggcagactgtaccaggtgaccgtgagctgcgtgagcggcgagctgagcgcccagaagatggccgtgggcagaaccttccccgacaaggtggccaacctggaggccaacaacaacggcagaatgagaagcctggtggtgagctggagcccccccgccggcgactgggagcagtacagaatcctgctgttcaacgacagcgtggtgctgctgaacatcaccgtgggcaaggaggagacccagtacgtgatggacgacaccggcctggtgcccggcagacagtacgaggtggaggtgatcgtggagagcggcaacctgaagaacagcgagagatgccagggcagaaccgtgcccctggccgtgctgcagctgagagtgaagcacgccaacgagaccagcctgagcatcatgtggcagacccccgtggccgagtgggagaagtacatcatcagcctggccgacagagacctgctgctgatccacaagagcctgagcaaggacgccaaggagttcaccttcaccgacctggtgcccggcagaaagtacatggccaccgtgaccagcatcagcggcgacctgaagaacagcagcagcgtgaagggcagaaccgtgcccgcccaggtgaccgacctgcacgtggccaaccagggcatgaccagcagcctgttcaccaactggacccaggcccagggcgacgtggagttctaccaggtgctgctgatccacgagaacgtggtgatcaagaacgagagcatcagcagcgagaccagcagatacagcttccacagcctgaagagcggcagcctgtacagcgtggtggtgaccaccgtgagcggcggcatcagcagcagacaggtggtggtggagggcagaaccgtgcccagcagcgtgagcggcgtgaccgtgaacaacagcggcagaaacgactacctgagcgtgagctggctgctggcccccggcgacgtggacaactacgaggtgaccctgagccacgacggcaaggtggtgcagagcctggtgatcgccaagagcgtgagagagtgcagcttcagcagcctgacccccggcagactgtacaccgtgaccatcaccaccagaagcggcaagtacgagaaccacagcttcagccaggagagaaccgtgcccgacaaggtgcagggcgtgagcgtgagcaacagcgccagaagcgactacctgagagtgagctgggtgcacgccaccggcgacttcgaccactacgaggtgaccatcaagaacaagaacaacttcatccagaccaagagcatccccaagagcgagaacgagtgcgtgttcgtgcagctggtgcccggcagactgtacagcgtgaccgtgaccaccaagagcggccagtacgaggccaacgagcagggcaacggcagaaccatccccgagcccgtgaaggacctgaccctgagaaacagaagcaccgaggacctgcacgtgacctggagcggcgccaacggcgacgtggaccagtacgagatccagctgctgttcaacgacatgaaggtgttcccccccttccacctggtgaacaccgccaccgagtacagattcaccagcctgacccccggcagacagtacaagatcctggtgctgaccatcagcggcgacgtgcagcagagcgccttcatcgagggcttcaccgtgcccagcgccgtgaagaacatccacatcagccccaacggcgccaccgacagcctgaccgtgaactggacccccggcggcggcgacgtggacagctacaccgtgagcgccttcagacacagccagaaggtggacagccagaccatccccaagcacgtgttcgagcacaccttccacagactggaggccggcgagcagtaccagatcatgatcgccagcgtgagcggcagcctgaagaaccagatcaacgtggtgggcagaaccgtgcccgccagcgtgcagggcgtgatcgccgacaacgcctacagcagctacagcctgatcgtgagctggcagaaggccgccggcgtggccgagagatacgacatcctgctgctgaccgagaacggcatcctgctgagaaacaccagcgagcccgccaccaccaagcagcacaagttcgaggacctgacccccggcaagaagtacaagatccagatcctgaccgtgagcggcggcctgttcagcaaggaggcccagaccgagggcagaaccgtgcccgccgccgtgaccgacctgagaatcaccgagaacagcaccagacacctgagcttcagatggaccgccagcgagggcgagctgagctggtacaacatcttcctgtacaaccccgacggcaacctgcaggagagagcccaggtggaccccctggtgcagagcttcagcttccagaacctgctgcagggcagaatgtacaagatggtgatcgtgacccacagcggcgagctgagcaacgagagcttcatcttcggcagaaccgtgcccgccagcgtgagccacctgagaggcagcaacagaaacaccaccgacagcctgtggttcaactggagccccgccagcggcgacttcgacttctacgagctgatcctgtacaaccccaacggcaccaagaaggagaactggaaggacaaggacctgaccgagtggagattccagggcctggtgcccggcagaaagtacgtgctgtgggtggtgacccacagcggcgacctgagcaacaaggtgaccgccgagagcagaaccgcccccagcccccccagcctgatgagcttcgccgacatcgccaacaccagcctggccatcacctggaagggcccccccgactggaccgactacaacgacttcgagctgcagtggctgcccagagacgccctgaccgtgttcaacccctacaacaacagaaagagcgagggcagaatcgtgtacggcctgagacccggcagaagctaccagttcaacgtgaagaccgtgagcggcgacagctggaagacctacagcaagcccatcttcggcagcgtgagaaccaagcccgacaagatccagaacctgcactgcagaccccagaacagcaccgccatcgcctgcagctggatcccccccgacagcgacttcgacggctacagcatcgagtgcagaaagatggacacccaggaggtggagttcagcagaaagctggagaaggagaagagcctgctgaacatcatgatgctggtgccccacaagagatacctggtgagcatcaaggtgcagagcgccggcatgaccagcgaggtggtggaggacagcaccatcaccatgatcgacagacccccccccccccccccccacatcagagtgaacgagaaggacgtgctgatcagcaagagcagcatcaacttcaccgtgaactgcagctggttcagcgacaccaacggcgccgtgaagtacttcaccgtggtggtgagagaggccgacggcagcgacgagctgaagcccgagcagcagcaccccctgcccagctacctggagtacagacacaacgccagcatcagagtgtaccagaccaactacttcgccagcaagtgcgccgagaaccccaacagcaacagcaagagcttcaacatcaagctgggcgccgagatggagagcctgggcggcaagtgcgaccccacccagcagaagttctgcgacggccccctgaagccccacaccgcctacagaatcagcatcagagccttcacccagctgttcgacgaggacctgaaggagttcaccaagcccctgtacagcgacaccttcttcagcctgcccatcaccaccgagagcgagcccctgttcggcgccatcgagggcgtgagcgccggcctgttcctgatcggcatgctggtggccgtggtggccctgctgatctgcagacagaaggtgagccacggcagagagagacccagcgccagactgagcatcagaagagacagacccctgagcgtgcacctgaacctgggccagaagggcaacagaaagaccagctgccccatcaagatcaaccagttcgagggccacttcatgaagctgcaggccgacagcaactacctgctgagcaaggagtacgaggagctgaaggacgtgggcagaaaccagagctgcgacatcgccctgctgcccgagaacagaggcaagaacagatacaacaacatcctgccctacgacgccaccagagtgaagctgagcaacgtggacgacgacccctgcagcgactacatcaacgccagctacatccccggcaacaacttcagaagagagtacatcgtgacccagggccccctgcccggcaccaaggacgacttctggaagatggtgtgggagcagaacgtgcacaacatcgtgatggtgacccagtgcgtggagaagggcagagtgaagtgcgaccactactggcccgccgaccaggacagcctgtactacggcgacctgatcctgcagatgctgagcgagagcgtgctgcccgagtggaccatcagagagttcaagatctgcggcgaggagcagctggacgcccacagactgatcagacacttccactacaccgtgtggcccgaccacggcgtgcccgagaccacccagagcctgatccagttcgtgagaaccgtgagagactacatcaacagaagccccggcgccggccccaccgtggtgcactgcagcgccggcgtgggcagaaccggcaccttcatcgccctggacagaatcctgcagcagctggacagcaaggacagcgtggacatctacggcgccgtgcacgacctgagactgcacagagtgcacatggtgcagaccgagtgccagtacgtgtacctgcaccagtgcgtgagagacgtgctgagagccagaaagctgagaagcgagcaggagaaccccctgttccccatctacgagaacgtgaaccccgagtaccacagagaccccgtgtacagcagacactag

SEQ ID NO: 132573 - protein, 240 aa, Artificial Sequence
  derived and/or modified sequence
MYLWLKLLAFGFAFLDTEVFVTGQSPTPSPTGHLQAEEQGSQSKSPNLKSREADSSAFSWWPKAREPLTNHWRLTTAKMPSVPLSSDPLPTHTTAFSPASTFERENDFSETTTSLSPDNTSTQVSPDSLDNASAFNTTGVSSVQTPHLPTHADSQTPSAGTDTQTFSGSAANAKLNPTPGSNAISDVPGERSTASTFPTDPVSPLTTTLSLAHHSSAALPARTSNTTITANTSDAYLNAS

SEQ ID NO: 132574 - protein, 1306 aa, Artificial Sequence
  derived and/or modified sequence
MTMYLWLKLLAFGFAFLDTEVFVTGQSPTPSPTGLTTAKMPSVPLSSDPLPTHTTAFSPASTFERENDFSETTTSLSPDNTSTQVSPDSLDNASAFNTTGVSSVQTPHLPTHADSQTPSAGTDTQTFSGSAANAKLNPTPGSNAISDVPGERSTASTFPTDPVSPLTTTLSLAHHSSAALPARTSNTTITANTSDAYLNASETTTLSPSGSAVISTTTIATTPSKPTCDEKYANITVDYLYNKETKLFTAKLNVNENVECGNNTCTNNEVHNLTECKNASVSISHNSCTAPDKTLILDVPPGVEKFQLHDCTQVEKADTTICLKWKNIETFTCDTQNITYRFQCGNMIFDNKEIKLENLEPEHEYKCDSEILYNNHKFTNASKIIKTDFGSPGEPQIIFCRSEAAHQGVITWNPPQRSFHNFTLCYIKETEKDCLNLDKNLIKYDLQNLKPYTKYVLSLHAYIIAKVQRNGSAAMCHFTTKSAPPSQVWNMTVSMTSDNSMHVKCRPPRDRNGPHERYHLEVEAGNTLVRNESHKNCDFRVKDLQYSTDYTFKAYFHNGDYPGEPFILHHSTSYNSKALIAFLAFLIIVTSIALLVVLYKIYDLHKKRSCNLDEQQELVERDDEKQLMNVEPIHADILLETYKRKIADEGRLFLAEFQSIPRVFSKFPIKEARKPFNQNKNRYVDILPYDYNRVELSEINGDAGSNYINASYIDGFKEPRKYIAAQGPRDETVDDFWRMIWEQKATVIVMVTRCEEGNRNKCAEYWPSMEEGTRAFGDVVVKINQHKRCPDYIIQKLNIVNKKEKATGREVTHIQFTSWPDHGVPEDPHLLLKLRRRVNAFSNFFSGPIVVHCSAGVGRTGTYIGIDAMLEGLEAENKVDVYGYVVKLRRQRCLMVQVEAQYILIHQALVEYNQFGETEVNLSELHPYLHNMKKRDPPSEPSPLEAEFQRLPSYRSWRTQHIGNQEENKSKNRNSNVIPYDYNRVPLKHELEMSKESEHDSDESSDDDSDSEEPSKYINASFIMSYWKPEVMIAAQGPLKETIGDFWQMIFQRKVKVIVMLTELKHGDQEICAQYWGEGKQTYGDIEVDLKDTDKSSTYTLRVFELRHSKRKDSRTVYQYQYTNWSVEQLPAEPKELISMIQVVKQKLPQKNSSEGNKHHKSTPLLIHCRDGSQQTGIFCALLNLLESAETEEVVDIFQVVKALRKARPGMVSTFEQYQFLYDVIASTYPAQNGQVKKNNHQEDKIEFDNEVDKVKQDANCVNPLGAPEKLPEAKEQAEGSEPTSGTEGPEHSVNGPASPALNQGS

SEQ ID NO: 132575 - protein, 1304 aa, Artificial Sequence
  derived and/or modified sequence
MYLWLKLLAFGFAFLDTEVFVTGQSPTPSPTGLTTAKMPSVPLSSDPLPTHTTAFSPASTFERENDFSETTTSLSPDNTSTQVSPDSLDNASAFNTTGVSSVQTPHLPTHADSQTPSAGTDTQTFSGSAANAKLNPTPGSNAISDVPGERSTASTFPTDPVSPLTTTLSLAHHSSAALPARTSNTTITANTSDAYLNASETTTLSPSGSAVISTTTIATTPSKPTCDEKYANITVDYLYNKETKLFTAKLNVNENVECGNNTCTNNEVHNLTECKNASVSISHNSCTAPDKTLILDVPPGVEKFQLHDCTQVEKADTTICLKWKNIETFTCDTQNITYRFQCGNMIFDNKEIKLENLEPEHEYKCDSEILYNNHKFTNASKIIKTDFGSPGEPQIIFCRSEAAHQGVITWNPPQRSFHNFTLCYIKETEKDCLNLDKNLIKYDLQNLKPYTKYVLSLHAYIIAKVQRNGSAAMCHFTTKSAPPSQVWNMTVSMTSDNSMHVKCRPPRDRNGPHERYHLEVEAGNTLVRNESHKNCDFRVKDLQYSTDYTFKAYFHNGDYPGEPFILHHSTSYNSKALIAFLAFLIIVTSIALLVVLYKIYDLHKKRSCNLDEQQELVERDDEKQLMNVEPIHADILLETYKRKIADEGRLFLAEFQSIPRVFSKFPIKEARKPFNQNKNRYVDILPYDYNRVELSEINGDAGSNYINASYIDGFKEPRKYIAAQGPRDETVDDFWRMIWEQKATVIVMVTRCEEGNRNKCAEYWPSMEEGTRAFGDVVVKINQHKRCPDYIIQKLNIVNKKEKATGREVTHIQFTSWPDHGVPEDPHLLLKLRRRVNAFSNFFSGPIVVHCSAGVGRTGTYIGIDAMLEGLEAENKVDVYGYVVKLRRQRCLMVQVEAQYILIHQALVEYNQFGETEVNLSELHPYLHNMKKRDPPSEPSPLEAEFQRLPSYRSWRTQHIGNQEENKSKNRNSNVIPYDYNRVPLKHELEMSKESEHDSDESSDDDSDSEEPSKYINASFIMSYWKPEVMIAAQGPLKETIGDFWQMIFQRKVKVIVMLTELKHGDQEICAQYWGEGKQTYGDIEVDLKDTDKSSTYTLRVFELRHSKRKDSRTVYQYQYTNWSVEQLPAEPKELISMIQVVKQKLPQKNSSEGNKHHKSTPLLIHCRDGSQQTGIFCALLNLLESAETEEVVDIFQVVKALRKARPGMVSTFEQYQFLYDVIASTYPAQNGQVKKNNHQEDKIEFDNEVDKVKQDANCVNPLGAPEKLPEAKEQAEGSEPTSGTEGPEHSVNGPASPALNQGS

SEQ ID NO: 132576 - DNA, 723 bp, Artificial Sequence
  derived and/or modified sequence
atgtacctgtggctgaagctgctggccttcggcttcgccttcctggacaccgaggtgttcgtgaccggccagagccccacccccagccccaccggccacctgcaggccgaggagcagggcagccagagcaagagccccaacctgaagagcagagaggccgacagcagcgccttcagctggtggcccaaggccagagagcccctgaccaaccactggagactgaccaccgccaagatgcccagcgtgcccctgagcagcgaccccctgcccacccacaccaccgccttcagccccgccagcaccttcgagagagagaacgacttcagcgagaccaccaccagcctgagccccgacaacaccagcacccaggtgagccccgacagcctggacaacgccagcgccttcaacaccaccggcgtgagcagcgtgcagaccccccacctgcccacccacgccgacagccagacccccagcgccggcaccgacacccagaccttcagcggcagcgccgccaacgccaagctgaaccccacccccggcagcaacgccatcagcgacgtgcccggcgagagaagcaccgccagcaccttccccaccgaccccgtgagccccctgaccaccaccctgagcctggcccaccacagcagcgccgccctgcccgccagaaccagcaacaccaccatcaccgccaacaccagcgacgcctacctgaacgccagctag

SEQ ID NO: 132577 - DNA, 3921 bp, Artificial Sequence
  derived and/or modified sequence
atgaccatgtacctgtggctgaagctgctggccttcggcttcgccttcctggacaccgaggtgttcgtgaccggccagagccccacccccagccccaccggcctgaccaccgccaagatgcccagcgtgcccctgagcagcgaccccctgcccacccacaccaccgccttcagccccgccagcaccttcgagagagagaacgacttcagcgagaccaccaccagcctgagccccgacaacaccagcacccaggtgagccccgacagcctggacaacgccagcgccttcaacaccaccggcgtgagcagcgtgcagaccccccacctgcccacccacgccgacagccagacccccagcgccggcaccgacacccagaccttcagcggcagcgccgccaacgccaagctgaaccccacccccggcagcaacgccatcagcgacgtgcccggcgagagaagcaccgccagcaccttccccaccgaccccgtgagccccctgaccaccaccctgagcctggcccaccacagcagcgccgccctgcccgccagaaccagcaacaccaccatcaccgccaacaccagcgacgcctacctgaacgccagcgagaccaccaccctgagccccagcggcagcgccgtgatcagcaccaccaccatcgccaccacccccagcaagcccacctgcgacgagaagtacgccaacatcaccgtggactacctgtacaacaaggagaccaagctgttcaccgccaagctgaacgtgaacgagaacgtggagtgcggcaacaacacctgcaccaacaacgaggtgcacaacctgaccgagtgcaagaacgccagcgtgagcatcagccacaacagctgcaccgcccccgacaagaccctgatcctggacgtgccccccggcgtggagaagttccagctgcacgactgcacccaggtggagaaggccgacaccaccatctgcctgaagtggaagaacatcgagaccttcacctgcgacacccagaacatcacctacagattccagtgcggcaacatgatcttcgacaacaaggagatcaagctggagaacctggagcccgagcacgagtacaagtgcgacagcgagatcctgtacaacaaccacaagttcaccaacgccagcaagatcatcaagaccgacttcggcagccccggcgagccccagatcatcttctgcagaagcgaggccgcccaccagggcgtgatcacctggaaccccccccagagaagcttccacaacttcaccctgtgctacatcaaggagaccgagaaggactgcctgaacctggacaagaacctgatcaagtacgacctgcagaacctgaagccctacaccaagtacgtgctgagcctgcacgcctacatcatcgccaaggtgcagagaaacggcagcgccgccatgtgccacttcaccaccaagagcgccccccccagccaggtgtggaacatgaccgtgagcatgaccagcgacaacagcatgcacgtgaagtgcagaccccccagagacagaaacggcccccacgagagataccacctggaggtggaggccggcaacaccctggtgagaaacgagagccacaagaactgcgacttcagagtgaaggacctgcagtacagcaccgactacaccttcaaggcctacttccacaacggcgactaccccggcgagcccttcatcctgcaccacagcaccagctacaacagcaaggccctgatcgccttcctggccttcctgatcatcgtgaccagcatcgccctgctggtggtgctgtacaagatctacgacctgcacaagaagagaagctgcaacctggacgagcagcaggagctggtggagagagacgacgagaagcagctgatgaacgtggagcccatccacgccgacatcctgctggagacctacaagagaaagatcgccgacgagggcagactgttcctggccgagttccagagcatccccagagtgttcagcaagttccccatcaaggaggccagaaagcccttcaaccagaacaagaacagatacgtggacatcctgccctacgactacaacagagtggagctgagcgagatcaacggcgacgccggcagcaactacatcaacgccagctacatcgacggcttcaaggagcccagaaagtacatcgccgcccagggccccagagacgagaccgtggacgacttctggagaatgatctgggagcagaaggccaccgtgatcgtgatggtgaccagatgcgaggagggcaacagaaacaagtgcgccgagtactggcccagcatggaggagggcaccagagccttcggcgacgtggtggtgaagatcaaccagcacaagagatgccccgactacatcatccagaagctgaacatcgtgaacaagaaggagaaggccaccggcagagaggtgacccacatccagttcaccagctggcccgaccacggcgtgcccgaggacccccacctgctgctgaagctgagaagaagagtgaacgccttcagcaacttcttcagcggccccatcgtggtgcactgcagcgccggcgtgggcagaaccggcacctacatcggcatcgacgccatgctggagggcctggaggccgagaacaaggtggacgtgtacggctacgtggtgaagctgagaagacagagatgcctgatggtgcaggtggaggcccagtacatcctgatccaccaggccctggtggagtacaaccagttcggcgagaccgaggtgaacctgagcgagctgcacccctacctgcacaacatgaagaagagagacccccccagcgagcccagccccctggaggccgagttccagagactgcccagctacagaagctggagaacccagcacatcggcaaccaggaggagaacaagagcaagaacagaaacagcaacgtgatcccctacgactacaacagagtgcccctgaagcacgagctggagatgagcaaggagagcgagcacgacagcgacgagagcagcgacgacgacagcgacagcgaggagcccagcaagtacatcaacgccagcttcatcatgagctactggaagcccgaggtgatgatcgccgcccagggccccctgaaggagaccatcggcgacttctggcagatgatcttccagagaaaggtgaaggtgatcgtgatgctgaccgagctgaagcacggcgaccaggagatctgcgcccagtactggggcgagggcaagcagacctacggcgacatcgaggtggacctgaaggacaccgacaagagcagcacctacaccctgagagtgttcgagctgagacacagcaagagaaaggacagcagaaccgtgtaccagtaccagtacaccaactggagcgtggagcagctgcccgccgagcccaaggagctgatcagcatgatccaggtggtgaagcagaagctgccccagaagaacagcagcgagggcaacaagcaccacaagagcacccccctgctgatccactgcagagacggcagccagcagaccggcatcttctgcgccctgctgaacctgctggagagcgccgagaccgaggaggtggtggacatcttccaggtggtgaaggccctgagaaaggccagacccggcatggtgagcaccttcgagcagtaccagttcctgtacgacgtgatcgccagcacctaccccgcccagaacggccaggtgaagaagaacaaccaccaggaggacaagatcgagttcgacaacgaggtggacaaggtgaagcaggacgccaactgcgtgaaccccctgggcgcccccgagaagctgcccgaggccaaggagcaggccgagggcagcgagcccaccagcggcaccgagggccccgagcacagcgtgaacggccccgccagccccgccctgaaccagggcagctag

SEQ ID NO: 132578 - DNA, 3915 bp, Artificial Sequence
  derived and/or modified sequence
atgtacctgtggctgaagctgctggccttcggcttcgccttcctggacaccgaggtgttcgtgaccggccagagccccacccccagccccaccggcctgaccaccgccaagatgcccagcgtgcccctgagcagcgaccccctgcccacccacaccaccgccttcagccccgccagcaccttcgagagagagaacgacttcagcgagaccaccaccagcctgagccccgacaacaccagcacccaggtgagccccgacagcctggacaacgccagcgccttcaacaccaccggcgtgagcagcgtgcagaccccccacctgcccacccacgccgacagccagacccccagcgccggcaccgacacccagaccttcagcggcagcgccgccaacgccaagctgaaccccacccccggcagcaacgccatcagcgacgtgcccggcgagagaagcaccgccagcaccttccccaccgaccccgtgagccccctgaccaccaccctgagcctggcccaccacagcagcgccgccctgcccgccagaaccagcaacaccaccatcaccgccaacaccagcgacgcctacctgaacgccagcgagaccaccaccctgagccccagcggcagcgccgtgatcagcaccaccaccatcgccaccacccccagcaagcccacctgcgacgagaagtacgccaacatcaccgtggactacctgtacaacaaggagaccaagctgttcaccgccaagctgaacgtgaacgagaacgtggagtgcggcaacaacacctgcaccaacaacgaggtgcacaacctgaccgagtgcaagaacgccagcgtgagcatcagccacaacagctgcaccgcccccgacaagaccctgatcctggacgtgccccccggcgtggagaagttccagctgcacgactgcacccaggtggagaaggccgacaccaccatctgcctgaagtggaagaacatcgagaccttcacctgcgacacccagaacatcacctacagattccagtgcggcaacatgatcttcgacaacaaggagatcaagctggagaacctggagcccgagcacgagtacaagtgcgacagcgagatcctgtacaacaaccacaagttcaccaacgccagcaagatcatcaagaccgacttcggcagccccggcgagccccagatcatcttctgcagaagcgaggccgcccaccagggcgtgatcacctggaaccccccccagagaagcttccacaacttcaccctgtgctacatcaaggagaccgagaaggactgcctgaacctggacaagaacctgatcaagtacgacctgcagaacctgaagccctacaccaagtacgtgctgagcctgcacgcctacatcatcgccaaggtgcagagaaacggcagcgccgccatgtgccacttcaccaccaagagcgccccccccagccaggtgtggaacatgaccgtgagcatgaccagcgacaacagcatgcacgtgaagtgcagaccccccagagacagaaacggcccccacgagagataccacctggaggtggaggccggcaacaccctggtgagaaacgagagccacaagaactgcgacttcagagtgaaggacctgcagtacagcaccgactacaccttcaaggcctacttccacaacggcgactaccccggcgagcccttcatcctgcaccacagcaccagctacaacagcaaggccctgatcgccttcctggccttcctgatcatcgtgaccagcatcgccctgctggtggtgctgtacaagatctacgacctgcacaagaagagaagctgcaacctggacgagcagcaggagctggtggagagagacgacgagaagcagctgatgaacgtggagcccatccacgccgacatcctgctggagacctacaagagaaagatcgccgacgagggcagactgttcctggccgagttccagagcatccccagagtgttcagcaagttccccatcaaggaggccagaaagcccttcaaccagaacaagaacagatacgtggacatcctgccctacgactacaacagagtggagctgagcgagatcaacggcgacgccggcagcaactacatcaacgccagctacatcgacggcttcaaggagcccagaaagtacatcgccgcccagggccccagagacgagaccgtggacgacttctggagaatgatctgggagcagaaggccaccgtgatcgtgatggtgaccagatgcgaggagggcaacagaaacaagtgcgccgagtactggcccagcatggaggagggcaccagagccttcggcgacgtggtggtgaagatcaaccagcacaagagatgccccgactacatcatccagaagctgaacatcgtgaacaagaaggagaaggccaccggcagagaggtgacccacatccagttcaccagctggcccgaccacggcgtgcccgaggacccccacctgctgctgaagctgagaagaagagtgaacgccttcagcaacttcttcagcggccccatcgtggtgcactgcagcgccggcgtgggcagaaccggcacctacatcggcatcgacgccatgctggagggcctggaggccgagaacaaggtggacgtgtacggctacgtggtgaagctgagaagacagagatgcctgatggtgcaggtggaggcccagtacatcctgatccaccaggccctggtggagtacaaccagttcggcgagaccgaggtgaacctgagcgagctgcacccctacctgcacaacatgaagaagagagacccccccagcgagcccagccccctggaggccgagttccagagactgcccagctacagaagctggagaacccagcacatcggcaaccaggaggagaacaagagcaagaacagaaacagcaacgtgatcccctacgactacaacagagtgcccctgaagcacgagctggagatgagcaaggagagcgagcacgacagcgacgagagcagcgacgacgacagcgacagcgaggagcccagcaagtacatcaacgccagcttcatcatgagctactggaagcccgaggtgatgatcgccgcccagggccccctgaaggagaccatcggcgacttctggcagatgatcttccagagaaaggtgaaggtgatcgtgatgctgaccgagctgaagcacggcgaccaggagatctgcgcccagtactggggcgagggcaagcagacctacggcgacatcgaggtggacctgaaggacaccgacaagagcagcacctacaccctgagagtgttcgagctgagacacagcaagagaaaggacagcagaaccgtgtaccagtaccagtacaccaactggagcgtggagcagctgcccgccgagcccaaggagctgatcagcatgatccaggtggtgaagcagaagctgccccagaagaacagcagcgagggcaacaagcaccacaagagcacccccctgctgatccactgcagagacggcagccagcagaccggcatcttctgcgccctgctgaacctgctggagagcgccgagaccgaggaggtggtggacatcttccaggtggtgaaggccctgagaaaggccagacccggcatggtgagcaccttcgagcagtaccagttcctgtacgacgtgatcgccagcacctaccccgcccagaacggccaggtgaagaagaacaaccaccaggaggacaagatcgagttcgacaacgaggtggacaaggtgaagcaggacgccaactgcgtgaaccccctgggcgcccccgagaagctgcccgaggccaaggagcaggccgagggcagcgagcccaccagcggcaccgagggccccgagcacagcgtgaacggccccgccagccccgccctgaaccagggcagctag

SEQ ID NO: 132579 - DNA, 723 bp, Artificial Sequence
  derived and/or modified sequence
atgtacctctggctgaaactgctggccttcgggttcgcctttctggatactgaagtgttcgtcaccgggcaatcacccacgccaagcccgacaggccacctccaggccgaggagcagggaagtcagtcaaagtcacccaatctcaagagtagggaggccgactcatccgctttctcttggtggcccaaggctcgcgagcccctgaccaaccactggcgcttaacaaccgccaaaatgccaagcgtaccgctgagctccgatcctttaccaactcacacgactgccttctcccctgcctcaacgtttgagcgcgaaaacgatttctctgaaacaactacgagcctgtcgcccgataatactagcacacaggtttcgcccgattctctggataatgcgtccgcattcaataccactggagtatcgtcagtgcagactccccacttacccacccatgctgacagtcagactccaagcgccggcacagacacccagaccttctcaggatccgccgcaaacgccaagctgaacccaacgcccggaagcaacgcaatttctgatgtgccgggcgaacgctccactgcctccacatttcctactgatcctgtctctcccttgactacgacgctgtctctagcacaccattctagcgcggcattacccgcccgcacctcaaatactactatcactgctaatacttccgatgcttacctgaacgcttcttag

SEQ ID NO: 132580 - DNA, 3921 bp, Artificial Sequence
  derived and/or modified sequence
atgactatgtacctatggttgaaattactggcctttggatttgctttcctcgacacagaggtgttcgtgaccgggcagagtcccacaccaagccctacaggactaacaactgcaaagatgcccagtgtgccccttagcagtgaccctctgcccacgcacaccacagcattctccccagccagtaccttcgaaagggaaaacgatttttcagagaccaccaccagccttagccccgataatacatccacccaagtaagcccagattctctagataacgcgtcagcctttaacaccacaggcgtctccagtgttcagaccccccacttgcctactcacgcagactcgcaaacaccatctgcaggaactgacactcagacttttagtggatccgccgccaacgccaaattgaatcccactcctggaagcaatgctataagcgacgtgcccggcgagcggtcgacggcgagcacctttcctacagacccggtatcccctctcactaccacactcagtttagctcaccattccagtgccgcgctgcctgcaaggacgtctaatactacaattaccgccaatacatcagacgcctacttgaacgcatcagagaccactacactgtctccatccggctccgcggttatatccacaaccactatcgccacgacgcccagcaagcctacctgcgatgagaaatacgctaacataactgtggactatctttacaacaaggagaccaagctctttaccgctaaactgaacgtcaacgagaatgttgaatgtgggaacaacacttgtaccaacaacgaggtacataatttgaccgaatgtaaaaatgccagcgtttccatctctcataatagctgtacagcgccggataagactttaatcctggatgtgccgcctggggtggagaagttccagctccacgactgtacccaggtagagaaagccgacaccacgatttgcctaaaatggaagaacatcgaaacttttacttgcgatacacaaaatataacataccgctttcagtgcggcaacatgatctttgacaacaaggagataaagctcgaaaatctggagccagagcacgagtacaagtgcgactccgagatcctgtacaacaaccacaagtttaccaacgcctctaagattatcaagactgattttggatctcccggagaaccccagatcatcttctgcaggtccgaagcggctcatcagggagtcattacctggaacccccctcagagatcgttccacaattttacactgtgctatattaaggagaccgagaaagattgtctgaacttggacaaaaacctgattaaatacgatctgcagaatttgaagccgtataccaagtacgtgcttagtctgcatgcctatatcatcgcaaaggtccagcgtaacgggtccgcagctatgtgccacttcacaacaaagagcgcccctccaagtcaggtctggaatatgaccgtaagtatgacgagcgacaactctatgcacgtcaagtgccgacccccccgagacaggaatggtccccatgaaaggtatcatttggaggtggaagctgggaacactctggtccggaacgagagccataagaactgcgacttcagggtcaaggacttacaatattcgaccgattacacatttaaagcatactttcataatggagactatccaggtgagccctttatcttgcaccattcaacgagttacaactcgaaggctctgatcgccttcctggcatttctcatcatcgtaacatcaatcgccttgctggtggtgttgtacaaaatctacgatctccacaagaagaggtcttgcaatcttgacgaacagcaggaactcgtggagcgcgacgacgagaaacagctgatgaatgttgaacccatccacgctgatattctgctggagacctacaagcgcaaaatagccgatgaaggccgtttatttctggctgagttccagtccatcccaagggtgttctctaagttccccataaaggaggcccgcaagcccttcaaccagaataaaaaccggtatgttgacattctgccctatgattataacagggttgagttatccgagatcaatggagacgcgggctctaactatattaacgccagttatatcgacggctttaaagagcctcgaaaatacattgctgcgcagggaccccgggacgaaacagttgacgatttctggcgtatgatctgggagcagaaggccaccgtcatagtgatggttacaaggtgtgaagagggcaaccgaaataaatgcgcagagtattggcccagcatggaggagggtacaagggccttcggagacgtcgtcgttaagattaatcagcacaagaggtgccccgattatatcatccaaaaactgaacattgtgaacaagaaagaaaaagccactggacgagaggtgactcacatccaatttacctcgtggccggatcatggggtccctgaggatccccacttgctcttaaagttgcgaaggcgggttaacgctttcagcaactttttttctgggccaatcgtggtccattgctcagcaggtgttgggagaaccggcacctacatcgggattgatgccatgctcgaaggattagaggccgaaaacaaggtcgacgtgtacggttacgtggttaaattgaggcggcagaggtgtcttatggtgcaggtggaagcccagtatatcctcattcaccaagctctggtggaatacaaccaatttggagaaaccgaggtgaacctaagcgagctgcacccctacctgcacaacatgaagaagagagatcccccatccgagccctccccactggaggccgaattccagcgcctaccttcttaccggtcatggagaacacaacatatcgggaaccaggaggaaaacaagtccaaaaatagaaactctaacgtgatcccatatgattacaatagagtgcctttgaagcacgagctggagatgagcaaggaatcagagcacgactctgacgaaagtagtgacgacgattccgactctgaggaaccctccaagtacattaacgcgagttttattatgagttattggaaacccgaagtcatgatcgcggcccagggcccactgaaagagaccatcggcgatttctggcaaatgatctttcaaagaaaggtaaaagttatcgttatgctcaccgaactaaagcacggtgaccaggagatttgtgctcagtattggggtgaggggaaacaaacctatggtgacattgaagtagacttgaaagataccgataaaagctctacctatacgttgcgcgtgtttgagttgagacactctaaaagaaaagactcaagaaccgtttaccagtatcagtacactaattggtccgtggagcagctacccgccgagccgaaggaactcatctctatgatccaggtggtcaagcaaaagttaccccagaaaaattcctctgaaggcaacaaacatcacaagtctacccccctgttgatacactgcagagatggatctcaacagactggcattttctgtgccctccttaacctgctcgaatcagccgaaacggaggaagtggtcgacatattccaagtggttaaggcacttaggaaagcaagaccaggcatggtgagcacttttgagcagtaccagttcctgtacgatgtgattgctagcacttaccctgctcagaatggccaggttaagaagaacaaccaccaggaggataagatagagttcgacaatgaggtagataaagtgaagcaagatgcaaactgtgttaatcccttgggcgctccagagaagctgcccgaggccaaggagcaagcagaggggagcgagcctacctccggaacagaaggccccgagcacagtgtcaatggacccgcctctcccgcgctgaatcagggctcttag

SEQ ID NO: 132581 - DNA, 3915 bp, Artificial Sequence
  derived and/or modified sequence
atgtacctgtggctgaagctactcgcttttggtttcgcctttttggacaccgaggtcttcgtgacgggccagagtccaacgccgtcccctaccggtctgaccaccgctaagatgccatcagttccactatcctcagatcctttgcctactcacactacagcattctcccctgccagcacctttgagcgagaaaacgatttcagcgaaactacgacatccctctcccctgacaacactagtactcaggtcagtccagattccctcgacaacgcgtccgcttttaacacaactggtgtaagctcggtacagaccccacaccttcctacacacgctgactcacagactccgtcagctgggacagatacccaaaccttctcaggctcagccgccaacgcaaagcttaatccgacacctgggtccaatgccatctctgacgttccaggcgagagatctaccgcctctaccttcccaacggaccctgtatccccgctcacgactacactttcacttgcccatcactcaagtgcagccctgcctgctcgaacttctaacaccactataacagcaaatacatcagacgcgtacctgaacgcctcagagaccacgactcttagcccgtctggcagcgctgtgatctcaacgacaactatagccaccactccgagtaaacccacctgcgacgagaagtacgctaacattacagtagactatctgtacaacaaagagacaaaactcttcactgccaagctgaacgtcaatgagaatgtggagtgcgggaacaatacatgcaccaataacgaggttcataatctcactgagtgcaagaacgcctctgtgtcgatttcccacaactcatgtacagctccggacaagacactcattctagatgtcccaccaggagtggagaaattccagttgcatgactgtacccaggtggaaaaggctgatactaccatctgtttaaagtggaaaaatattgaaaccttcacttgcgatacacagaatatcacttatcggttccaatgtggcaacatgatctttgacaacaaggagatcaagttggagaatctggagcctgagcacgagtataaatgtgactccgagatactgtataataatcacaagtttaccaacgccagcaagattatcaaaactgattttggatcgccaggggaaccacagattattttttgtcgttccgaggccgcacaccaaggcgtgatcacgtggaacccgcctcagcgtagctttcataattttactctctgctacatcaaagagaccgagaaggactgtctgaacttggacaaaaatctgattaaatacgatctacagaacctcaagccttacactaagtacgtgctgtctctgcatgcatatataattgctaaggttcagcgaaacgggagcgccgctatgtgccatttcaccaccaaaagcgccccgccaagtcaggtttggaatatgacagtgtccatgaccagcgataacagcatgcatgtaaagtgccgcccaccaagagaccgcaacggcccgcatgaacggtatcacttagaggtagaagcggggaataccctggtcaggaacgagagtcataagaactgcgattttcgggtgaaggatctccagtacagtacagactacaccttcaaggcctatttccataacggagactatcctggcgaaccttttattcttcaccacagtacatcttacaatagtaaagcgctgattgcctttttagccttcctgataatcgttactagcatcgcactcctggtggtgctgtataagatctatgatcttcataaaaaacgcagctgcaatctcgatgaacagcaggaactggtggagagggatgacgaaaagcagctgatgaatgtggagcctattcacgctgatatcttgttggaaacctacaagcgaaaaatagccgacgagggtaggctattcctggccgaatttcagagcatcccacgcgtatttagcaagttccctatcaaagaggctagaaagccctttaaccagaacaagaaccgttacgtcgatatcttaccttatgactataacagagtggagctgagtgaaattaatggcgacgccggttcgaactacatcaatgcctcctacatcgatggatttaaggagccgagaaaatacatcgcagctcagggcccccgcgatgaaacagtggacgatttttggcgcatgatttgggagcagaaagccaccgtcattgtcatggtcacccgttgcgaggagggcaaccggaacaagtgcgcagagtattggccctccatggaggaagggacccgagcattcggcgatgtggtggtgaaaataaatcagcacaagcggtgccccgactacattattcagaagctaaacatcgtcaacaaaaaagagaaggccacagggcgggaggtgactcacatccagtttacaagctggcctgaccatggggtacctgaggatccccatctgcttctgaaactacggcggcgcgtgaacgctttctcaaactttttttctggacccattgttgttcactgcagtgccggtgtcggaaggaccggaacctacatcggcatcgacgccatgctcgaggggctcgaggctgaaaataaggtggacgtgtacggatacgttgttaaactgaggcggcagagatgccttatggtccaggtagaagcacagtatattcttatacatcaggcgctcgtggagtataaccagtttggagaaacggaggtgaatttgtccgagctccacccgtacttgcacaatatgaaaaagagggacccgcccagcgaacccagtccgctagaagccgaatttcagcggctccccagctatcggtcttggagaacccaacacatcggcaatcaagaagagaataaatcaaaaaacaggaactcaaatgtcattccctatgattataatcgcgtcccgctcaagcatgaactggaaatgtcgaaggagtccgagcatgatagcgatgagagctccgacgatgattccgactccgaagagcccagcaagtatatcaacgcctctttcatcatgtcctactggaagccggaggtaatgatagccgcccagggacctctgaaggagactataggagatttctggcagatgatcttccaacgtaaagtgaaagtgatcgtgatgctcactgagctgaagcacggggaccaagagatctgtgctcaatattggggcgagggaaaacagacatacggagacatcgaggttgacctcaaggacaccgacaaaagttcaacgtatactctgagagtattcgaattgagacactctaagcggaaggacagccggacagtgtaccagtaccagtacacgaactggtctgtagagcaattgcccgcagaacccaaagaattgatttccatgatacaggtggtcaaacagaagctaccacagaagaactcttctgagggaaacaaacaccacaagtcaacaccgctactcattcattgtagggacgggtctcaacaaaccggcattttttgcgcactacttaacctattggagtcagccgaaaccgaggaggtagtggacatcttccaggtcgtgaaggcccttcgcaaagcaaggcctgggatggtctctacgttcgagcaatatcagttcctgtacgacgtgatcgccagcacttacccagcccagaatgggcaagtgaaaaagaacaaccaccaggaggataaaattgagtttgacaacgaagtcgacaaagttaagcaggatgccaattgtgtgaatcctctcggcgcccccgagaagcttccggaagcaaaagagcaggcagaaggcagtgaacctacgtctggtaccgagggtcccgaacactcagtcaatggccccgcctcccccgcgctcaaccagggaagttag

SEQ ID NO: 132582 - DNA, 723 bp, Artificial Sequence
  derived and/or modified sequence
atgtacctgtggctgaagctgctggccttcggctttgccttcctggacacagaggtgtttgtgacaggccagagccccacccccagccccaccggccacctgcaggccgaggagcagggcagccagagcaagagccccaacctgaagagccgggaggccgacagcagcgccttctcctggtggcccaaggcccgggagcccctgaccaaccactggaggctgaccacagccaagatgcccagcgtgcccctgagcagtgaccccctgcccacccacaccacagccttcagccctgccagcacctttgaaagagaaaatgacttcagcgagaccaccaccagcctgagcccagacaacaccagcacccaggtgtccccagacagcctggacaatgccagcgccttcaacaccaccggggtgtcctctgtgcagaccccccacctgcccacccacgccgacagccagacccccagcgctggaacagacacccagaccttcagcggcagcgctgccaatgccaagctgaaccccaccccaggcagcaatgccatcagtgatgtgcctggagagaggagcacagccagcaccttccccacagatcctgtgagccccctgaccaccaccctgagcctggcccaccacagcagcgctgccctgcctgcccggaccagcaacaccaccatcacagccaacaccagtgatgcctacctgaatgccagctag

SEQ ID NO: 132583 - DNA, 3921 bp, Artificial Sequence
  derived and/or modified sequence
atgaccatgtacctgtggctgaagctgctggccttcggctttgccttcctggacacagaggtgtttgtgacaggccagagccccacccccagccccaccggcctgaccacagccaagatgcccagcgtgcccctgagcagtgaccccctgcccacccacaccacagccttctccccagccagcacctttgagcgggagaatgacttcagcgagaccaccaccagcctgagcccagacaacaccagcacccaggtgtccccagacagcctggacaatgccagcgccttcaacaccactggagtgtcctctgtgcagaccccccacctgcccacccatgctgacagccagaccccatctgctggaacagacacccagaccttcagcggcagcgctgccaatgccaagctgaaccccaccccaggcagcaatgccatcagtgatgtgcctggagagaggagcacagccagcaccttccccacagatcctgtgagccccctgaccaccaccctgagcctggcccaccacagcagcgctgccctgcctgcccggaccagcaacaccaccatcacagccaacaccagtgatgcctacctgaatgccagcgagaccaccaccctgagccccagcggcagcgctgtgatcagcaccaccaccatcgccaccacccccagcaagcccacctgtgatgagaagtatgccaacatcaccgtggactacctgtacaacaaggagaccaagctgttcaccgccaagctgaatgtgaatgaaaatgtggagtgtggcaacaacacctgcaccaacaatgaggtgcacaacctgacagagtgcaagaatgcctctgtgtccatcagccacaacagctgcacagccccagacaagaccctcatcctggatgtgcccccaggagtggagaagttccagctgcatgactgcacccaggtggagaaggctgacaccaccatctgcctgaagtggaagaacatcgagaccttcacctgtgacacccagaacatcacctaccgcttccagtgtggcaacatgatctttgacaacaaggagatcaagctggagaacctggagcctgagcacgagtacaagtgtgacagcgagatcctgtacaacaaccacaagttcaccaatgccagcaagatcatcaagacagactttggcagccctggagagccccagatcatcttctgccgctctgaggccgcccaccagggcgtcatcacctggaaccccccccagaggagcttccacaacttcaccctgtgctacatcaaggagacagagaaggactgcctgaacctggacaagaacctgatcaagtatgacctgcagaacctgaagccctacaccaagtatgtgctgagcctgcacgcctacatcatcgccaaggtgcagagaaatggcagcgctgccatgtgccacttcaccaccaagagcgccccacccagccaggtgtggaacatgacagtgtccatgaccagtgacaacagcatgcacgtgaagtgcaggcctccccgggacagaaatggcccccatgagcgctaccacctggaggtggaggccggcaacaccctggtgagaaatgaaagccacaagaactgtgacttccgggtgaaggacctgcagtacagcacagactacaccttcaaggcctacttccacaacggggactacccaggagagcccttcatcctgcaccacagcaccagctacaacagcaaggccctgattgccttcctggccttcctgatcatcgtgaccagcatcgccctgctggtggtgctgtacaagatctatgacctgcacaagaagaggagctgcaacctggatgagcagcaggagctggtggagagagatgatgagaagcagctgatgaatgtggagcccatccatgctgacatcctgctggagacctacaagaggaagattgctgatgagggccgcctcttcctggccgagttccagagcatccccagggtcttcagcaagttccccatcaaggaggccaggaagcccttcaaccagaacaagaacagatatgtggacatcctgccctatgactacaacagagtggagctgtctgagatcaatggagatgctggcagcaactacatcaatgccagctacattgatggcttcaaggagcccaggaagtacatcgccgcccagggccccagagatgagaccgtggatgacttctggaggatgatctgggagcagaaggccaccgtcatcgtgatggtgacccgctgtgaggagggcaacagaaataaatgtgccgagtactggcccagcatggaggagggcacccgggcctttggagatgtggtggtgaagatcaaccagcacaagcgctgcccagactacatcatccagaagctgaacatcgtgaacaagaaggagaaggccaccggccgggaggtgacccacatccagttcacctcctggccagaccacggcgtgcctgaggacccccacctgctgctgaagctgcggcggcgggtgaatgccttcagcaacttcttcagcggccccatcgtggtgcactgcagcgctggggtgggccgcacaggcacctacatcggcattgatgccatgctggagggcctggaggccgagaacaaggtggatgtgtatggctacgtggtgaagctgcggcggcagcgctgcctgatggtgcaggtggaggcccagtacatcctgatccaccaggccctggtggagtacaaccagtttggagaaacagaggtgaacctgtctgagctgcacccctacctgcacaacatgaagaagagggaccccccatctgagcccagccccctggaggccgagttccagaggctgcccagctaccgctcctggaggacccagcacatcggcaaccaggaggagaacaagagcaagaacagaaacagcaatgtcatcccctatgactacaacagagtgcccctgaagcatgagctggagatgagcaaggagagcgagcatgacagtgatgagagcagtgatgatgacagcgacagcgaggagcccagcaagtacatcaatgccagcttcatcatgagctactggaagccagaggtgatgattgctgcccagggccccctgaaggagaccatcggggacttctggcagatgatcttccagaggaaggtgaaggtgattgtgatgctgacagagctgaagcacggggaccaggagatctgtgcccagtactggggcgagggcaagcagacctatggagacatcgaggtggacctgaaggacacagacaagagcagcacctacaccctgcgggtgtttgagctgcggcacagcaagaggaaggacagcaggacagtgtaccagtaccagtacaccaactggagcgtggagcagctgcctgctgagcccaaggagctgatctccatgatccaggtggtgaagcagaagctgccccagaagaacagcagcgagggcaacaagcaccacaagagcacccccctgctgatccactgcagagatggcagccagcagacaggcatcttctgtgccctgctgaacctgctggagagcgctgagacagaggaggtggtggacatcttccaggtggtgaaggccctgaggaaggcccggcccggcatggtgtccacctttgagcagtaccagttcctgtatgatgtgattgccagcacctacccagcccagaatggccaggtgaagaagaacaaccaccaggaggacaagattgaatttgacaatgaggtggacaaggtgaagcaggatgccaactgtgtgaaccccctgggcgcccctgagaagctgcctgaggccaaggagcaggccgagggcagcgagcccaccagcggcacagagggccctgagcacagcgtgaatggacctgccagccctgccctgaaccagggcagctag

SEQ ID NO: 132584 - DNA, 3915 bp, Artificial Sequence
  derived and/or modified sequence
atgtacctgtggctgaagctgctggccttcggctttgccttcctggacacagaggtgtttgtgacaggccagagccccacccccagccccaccggcctgaccacagccaagatgcccagcgtgcccctgagcagtgaccccctgcccacccacaccacagccttctccccagccagcacctttgagcgggagaatgacttcagcgagaccaccaccagcctgagcccagacaacaccagcacccaggtgtccccagacagcctggacaatgccagcgccttcaacaccactggagtgtcctctgtgcagaccccccacctgcccacccatgctgacagccagaccccatctgctggaacagacacccagaccttcagcggcagcgctgccaatgccaagctgaaccccaccccaggcagcaatgccatcagtgatgtgcctggagagaggagcacagccagcaccttccccacagatcctgtgagccccctgaccaccaccctgagcctggcccaccacagcagcgctgccctgcctgcccggaccagcaacaccaccatcacagccaacaccagtgatgcctacctgaatgccagcgagaccaccaccctgagccccagcggcagcgctgtgatcagcaccaccaccatcgccaccacccccagcaagcccacctgtgatgagaagtatgccaacatcaccgtggactacctgtacaacaaggagaccaagctgttcaccgccaagctgaatgtgaatgaaaatgtggagtgtggcaacaacacctgcaccaacaatgaggtgcacaacctgacagagtgcaagaatgcctctgtgtccatcagccacaacagctgcacagccccagacaagaccctcatcctggatgtgcccccaggagtggagaagttccagctgcatgactgcacccaggtggagaaggctgacaccaccatctgcctgaagtggaagaacatcgagaccttcacctgtgacacccagaacatcacctaccgcttccagtgtggcaacatgatctttgacaacaaggagatcaagctggagaacctggagcctgagcacgagtacaagtgtgacagcgagatcctgtacaacaaccacaagttcaccaatgccagcaagatcatcaagacagactttggcagccctggagagccccagatcatcttctgccgctctgaggccgcccaccagggcgtcatcacctggaaccccccccagaggagcttccacaacttcaccctgtgctacatcaaggagacagagaaggactgcctgaacctggacaagaacctgatcaagtatgacctgcagaacctgaagccctacaccaagtatgtgctgagcctgcacgcctacatcatcgccaaggtgcagagaaatggcagcgctgccatgtgccacttcaccaccaagagcgccccacccagccaggtgtggaacatgacagtgtccatgaccagtgacaacagcatgcacgtgaagtgcaggcctccccgggacagaaatggcccccatgagcgctaccacctggaggtggaggccggcaacaccctggtgagaaatgaaagccacaagaactgtgacttccgggtgaaggacctgcagtacagcacagactacaccttcaaggcctacttccacaacggggactacccaggagagcccttcatcctgcaccacagcaccagctacaacagcaaggccctgattgccttcctggccttcctgatcatcgtgaccagcatcgccctgctggtggtgctgtacaagatctatgacctgcacaagaagaggagctgcaacctggatgagcagcaggagctggtggagagagatgatgagaagcagctgatgaatgtggagcccatccatgctgacatcctgctggagacctacaagaggaagattgctgatgagggccgcctcttcctggccgagttccagagcatccccagggtcttcagcaagttccccatcaaggaggccaggaagcccttcaaccagaacaagaacagatatgtggacatcctgccctatgactacaacagagtggagctgtctgagatcaatggagatgctggcagcaactacatcaatgccagctacattgatggcttcaaggagcccaggaagtacatcgccgcccagggccccagagatgagaccgtggatgacttctggaggatgatctgggagcagaaggccaccgtcatcgtgatggtgacccgctgtgaggagggcaacagaaataaatgtgccgagtactggcccagcatggaggagggcacccgggcctttggagatgtggtggtgaagatcaaccagcacaagcgctgcccagactacatcatccagaagctgaacatcgtgaacaagaaggagaaggccaccggccgggaggtgacccacatccagttcacctcctggccagaccacggcgtgcctgaggacccccacctgctgctgaagctgcggcggcgggtgaatgccttcagcaacttcttcagcggccccatcgtggtgcactgcagcgctggggtgggccgcacaggcacctacatcggcattgatgccatgctggagggcctggaggccgagaacaaggtggatgtgtatggctacgtggtgaagctgcggcggcagcgctgcctgatggtgcaggtggaggcccagtacatcctgatccaccaggccctggtggagtacaaccagtttggagaaacagaggtgaacctgtctgagctgcacccctacctgcacaacatgaagaagagggaccccccatctgagcccagccccctggaggccgagttccagaggctgcccagctaccgctcctggaggacccagcacatcggcaaccaggaggagaacaagagcaagaacagaaacagcaatgtcatcccctatgactacaacagagtgcccctgaagcatgagctggagatgagcaaggagagcgagcatgacagtgatgagagcagtgatgatgacagcgacagcgaggagcccagcaagtacatcaatgccagcttcatcatgagctactggaagccagaggtgatgattgctgcccagggccccctgaaggagaccatcggggacttctggcagatgatcttccagaggaaggtgaaggtgattgtgatgctgacagagctgaagcacggggaccaggagatctgtgcccagtactggggcgagggcaagcagacctatggagacatcgaggtggacctgaaggacacagacaagagcagcacctacaccctgcgggtgtttgagctgcggcacagcaagaggaaggacagcaggacagtgtaccagtaccagtacaccaactggagcgtggagcagctgcctgctgagcccaaggagctgatctccatgatccaggtggtgaagcagaagctgccccagaagaacagcagcgagggcaacaagcaccacaagagcacccccctgctgatccactgcagagatggcagccagcagacaggcatcttctgtgccctgctgaacctgctggagagcgctgagacagaggaggtggtggacatcttccaggtggtgaaggccctgaggaaggcccggcccggcatggtgtccacctttgagcagtaccagttcctgtatgatgtgattgccagcacctacccagcccagaatggccaggtgaagaagaacaaccaccaggaggacaagattgaatttgacaatgaggtggacaaggtgaagcaggatgccaactgtgtgaaccccctgggcgcccctgagaagctgcctgaggccaaggagcaggccgagggcagcgagcccaccagcggcacagagggccctgagcacagcgtgaatggacctgccagccctgccctgaaccagggcagctag

SEQ ID NO: 132585 - DNA, 723 bp, Artificial Sequence
  derived and/or modified sequence
atgtacctgtggctgaagctgctggccttcggcttcgccttcctggacacagaggtctttgtgacaggacagtctccaactccatccccgactggacaccttcaggccgaggaacaaggatcacagtccaagtcccctaatctgaaatcccgcgaagccgatagtagcgccttctcctggtggcctaaagccagagaaccgctcactaatcactggcggctgacaactgctaaaatgccgagcgtacccctaagtagcgacccattgcctacacacactactgctttcagcccagcttcaacgttcgagcgtgagaacgatttcagcgagaccacgaccagtctgagccccgacaacacttctacgcaggttagcccagattctctcgataatgctagcgctttcaacactaccggtgtgtcaagcgttcagaccccacaccttccgacccacgctgattcacaaacgccctcagctggcaccgatacccaaactttcagtggcagcgccgctaacgccaaacttaacccaacacccggcagtaatgctattagtgacgtacccggagagcgcagcaccgccagcacattcccaacagatcccgtgagcccccttactacaacattatccctggcccaccactctagcgctgccctcccagcccgaacatcaaacacaacgatcacagccaacacctccgatgcttacttgaacgcgtcatag

SEQ ID NO: 132586 - DNA, 3921 bp, Artificial Sequence
  derived and/or modified sequence
atgaccatgtacctgtggctgaagctgctggccttcggcttcgcctttctcgacaccgaggtgtttgtgacgggtcagagtcctactccaagtcccactggcctgacgacagccaaaatgccgagcgtcccccttagctcagacccccttcctacgcatacaacagcctttagccccgcctccacttttgagcgtgagaacgacttttcagagacgaccacctcactgtccccagacaatactagtacgcaggtgtctcctgacagcctggataatgcatcagctttcaatactaccggtgtgagtagtgtccagactccccacctacctactcacgctgactcccagacgccatcagctggtaccgatacgcagaccttctccgggtccgccgcaaatgcaaagctaaaccctacccctggctccaatgccatctccgacgtccccggggagcgctcaacggcgtcgacatttcctaccgatcctgtgagtcctttgactacgaccttgagcttagcacatcactctagcgccgctctgccggctcgcacatctaatactactattacggccaatacttcagatgcttacttgaatgcttccgagacaactacactgtcgcccagcgggtccgcagtgatttcaactaccactatcgctactactccttcaaaacctacatgcgacgagaaatatgcgaacatcactgtagactacctgtacaataaggaaaccaagctttttacagcaaagctgaatgtgaatgaaaatgtggagtgtggtaataatacttgcaccaacaacgaagtgcacaatctgaccgagtgcaagaacgccagcgtctctatctctcacaacagctgcactgcccccgacaagactcttatcctagacgtcccccccggcgtcgagaagtttcagctccatgattgcacacaggtggagaaagctgatacgactatctgtctgaagtggaagaacatcgagactttcacttgtgacactcagaatattacttaccggtttcagtgtgggaatatgatttttgacaacaaggaaattaagctcgagaacttggaacctgaacatgagtataaatgcgatagcgagatcctctacaataaccataagttcactaatgcctccaaaattatcaaaaccgatttcggatcacctggtgaaccacaaataatcttctgccggtccgaggcggctcatcaaggagtaatcacgtggaaccctcctcagagaagttttcacaactttactctgtgctacatcaaggagaccgaaaaagattgcctcaacctggataaaaacctgattaaatacgacctacagaacctcaagccttatacaaaatatgttctatccctccacgcttatatcatcgccaaggtgcagaggaacggatccgcggctatgtgtcactttacaactaagtccgcacccccatcgcaggtgtggaatatgacagtttccatgacttccgacaactccatgcacgttaagtgcaggcctcccagagatcgaaatggccctcatgagcgttatcatctggaagtcgaggccgggaacaccctagtgcggaacgagagccacaagaattgcgatttccgcgtgaaggatctgcagtactcaaccgactacaccttcaaggcctatttccacaacggagattatcctggcgagcctttcatactgcaccactccacctcatacaactcaaaggctctcatcgccttccttgcatttttgataatcgtcacaagcatcgctctactggtggtgctgtacaagatatatgatttgcataaaaagaggtcctgcaacctggatgaacaacaggagctggttgagagagacgatgaaaagcagctcatgaatgttgagcctatccacgcagatatcctgttagaaacttacaaacgaaaaatcgctgatgagggtaggcttttcctagcagagttccaatccatcccccgagtgttctccaaatttcccatcaaggaagccagaaagccctttaaccagaataagaatagatacgtggacatcttgccgtatgactataaccgcgtggagctcagcgagattaatggagacgctggctctaattacatcaacgctagctacatcgacggcttcaaagaaccgaggaaatacatcgctgctcaggggccgagggacgaaacggtcgacgatttttggagaatgatctgggagcagaaagcaaccgttattgtcatggttacccgctgtgaagaggggaatcggaacaagtgtgcagagtactggccatccatggaggagggaaccagagcctttggagacgtcgtggtaaaaatcaatcagcacaaacgatgccccgattatattattcaaaaacttaacattgtgaataaaaaagagaaagccacaggtcgcgaggtgacccatatccagttcacctcatggcctgaccatggggtacccgaagatccgcacttgctgctgaagcttcgccgcagggtcaatgcatttagcaatttcttcagcggaccgatcgtagtacattgctcagccggcgtcggaaggacgggcacgtacattgggattgatgctatgctcgaaggattggaggcagagaacaaggtggacgtatacggatacgtcgtaaaactgcggcgccagcgttgcctgatggtgcaggttgaggctcaatacatcttaatccatcaggcgctggtggaatacaatcagtttggggaaacggaagtcaacctatctgaactccacccatatctccacaacatgaagaagagagatcctcctagcgagccatcaccccttgaggccgagtttcagaggctcccgagctacagatcttggcgaacccagcacatcgggaaccaggaggaaaataaaagtaagaacaggaacagtaatgtgataccctatgattataatcgggtgcctcttaagcatgaactggagatgagcaaagagagtgagcacgattcggatgagtctagcgatgatgattccgacagcgaggagcccagtaagtacattaacgctagctttatcatgtcatactggaagcctgaggtgatgattgccgctcaaggccccctgaaagagaccatcggggatttctggcagatgatcttccagcgcaaggtaaaagtcatcgtcatgttaactgaactgaaacacggggaccaagaaatctgcgcccagtattggggcgaagggaagcagacttacggagacatcgaggtcgatctaaaagatacggataagagttctacctacactttacgggtgttcgaactccgacattccaagaggaaagactcccgtacagtctaccagtatcaatataccaattggtccgtggagcagctccccgctgaacccaaagaactgatctccatgatccaggttgtcaagcagaagctcccacagaaaaactcttctgaggggaataagcatcacaagagtacacccctgttaatccattgccgcgacgggtcgcagcagactgggattttctgtgcactgcttaatttgctcgagagcgctgagactgaggaagtggtcgacatattccaagtggtgaaggcgctgcgcaaggcacgtcctggcatggtgtccacatttgagcaatatcaatttctgtacgacgttatagcatccacttatcccgcgcagaacggccaagtgaaaaagaataatcatcaggaggacaaaatcgaatttgacaacgaggtggataaggtgaaacaagatgctaattgtgttaacccacttggcgcgccggagaagctccctgaggccaaggagcaagcggagggctctgagccaacaagtggtacagaaggtccagagcattcagtgaatggccccgcaagccccgccctcaaccagggttcttag

SEQ ID NO: 132587 - DNA, 3915 bp, Artificial Sequence
  derived and/or modified sequence
atgtacctgtggctgaagctgctggccttcggcttcgccttcctggataccgaggtcttcgtcactggtcagtcacccaccccatcccccacagggttgaccaccgccaaaatgccttctgttcccttgtctagtgaccctcttcccacacatactaccgctttcagccctgcgtcaacttttgagcgcgagaacgatttcagcgaaacaactacatccctcagcccagataatacttccactcaagtttctcctgattcactggacaatgcctccgcgttcaacaccaccggggtgtcttctgtgcagactccccatctcccaacccatgcagatagtcagacgccttccgccggcaccgacacccagactttctccggaagcgcagccaatgccaagttgaatccaacaccagggtcaaatgctatatccgatgtccctggggagcgctcgaccgcctccaccttccccactgatccagtatcacctctgaccactaccctgtctttggcccatcactccagtgcagcactgcccgccagaaccagcaatactacgatcacagctaacacctcagatgcctacttgaatgcttcggagactactaccctctcaccctcgggcagtgctgtgatctccacaaccacaatcgcaaccaccccgtccaaacccacctgtgacgaaaagtatgctaacattaccgtagattacttgtacaataaggaaaccaagttgtttacagccaagctaaatgtgaacgagaatgtggagtgtggtaacaatacatgtactaataatgaggttcacaacctcaccgagtgtaagaatgcatccgttagtattagccacaattcctgcactgcccccgataaaactcttattctggacgtcccaccaggagttgagaagtttcagttgcacgactgcacacaggtcgaaaaagctgacaccaccatctgtctcaagtggaaaaacatcgagacgttcacttgtgatactcaaaacatcacctaccgatttcagtgcggcaatatgatcttcgacaacaaggaaatcaagctcgagaacttagagcccgaacacgaatacaaatgcgactctgagatactgtacaataaccacaaatttactaacgcatcaaaaatcattaaaacggatttcggctcccccggcgagcctcagatcatcttctgtcggtccgaggctgcacatcagggtgtaattacctggaacccaccccagcgatcatttcataattttactctttgctatattaaagaaacggaaaaagattgtctgaacctggataagaatttgatcaagtacgacctacagaaccttaagccatacaccaagtacgtgctgagcctgcacgcttacattatcgcaaaggtccagcggaatggctcggcagctatgtgtcacttcactaccaaatccgcccctccatcacaggtctggaacatgaccgtgtccatgacatctgataacagtatgcacgtgaaatgtagacccccccgcgataggaatggtccacacgagaggtaccacttggaagtcgaggccggtaataccctggtgaggaatgagagccataagaactgtgacttcagggtaaaagacctccagtactccaccgattacacttttaaggcctactttcacaatggggactaccctggggaacccttcatcctccatcacagcacaagttacaactcaaaggctctgatcgcctttctggcatttctgatcatcgtcacttctattgccttgctggtggttctctataagatctacgacctgcataagaagcgctcttgtaacctagacgagcagcaggagttggttgagcgggatgatgagaagcaactcatgaatgtggagccaattcacgctgacatcctcctagagacctacaaacggaaaatcgctgacgagggccgcctttttttggcagagttccagtcaatcccccgcgtcttcagtaagttccctatcaaagaggctcgcaagcctttcaatcagaacaagaacaggtacgttgacatcctcccctatgactacaacagagtggagttatctgagatcaatggcgatgcaggtagtaattacattaacgccagctatatcgatgggttcaaagagccacgcaaatacatcgccgcccagggtccgagagacgagaccgtagatgatttctggagaatgatctgggaacaaaaggctaccgtgatcgttatggtcacccgatgtgaggagggtaacaggaacaagtgtgccgaatactggccatctatggaagaggggacaagagcgttcggggacgtggtagttaaaatcaatcaacacaaaagatgcccggactacattatacagaaactgaacatcgttaacaaaaaggagaaagctaccgggagagaagtcactcacattcagtttacgtcatggcctgatcatggggtcccagaagatcctcacctgttactgaagctgagaaggcgagtcaatgcatttagtaactttttttctggtccgatcgtcgtccattgttctgccggagtaggccggacagggacatatatcggcatcgatgctatgttggaagggctcgaggccgagaataaggtggatgtctatggttatgttgtaaagttacgcagacaacgctgcctgatggtgcaggtggaggcccaatatatcttaatacatcaagctctggtggaatataatcagttcggagagacagaagtgaacttgagtgaactgcacccctacctgcacaatatgaaaaagagagacccgccgtctgagccttcacccctcgaggccgagttccagcggttaccctcatacaggagttggcgaacacagcacatcgggaaccaagaggaaaacaagtcaaagaatcgaaactccaatgtgattccctatgactacaatcgggtgcctttaaaacatgaattagaaatgtccaaggagagtgagcatgactcagacgagtcatctgatgatgacagtgactccgaagagccttccaaatacataaatgcttcatttattatgtcttactggaagccggaagtgatgatcgccgcgcagggtccgttaaaggagaccatcggcgatttctggcaaatgatatttcaaagaaaggtcaaagtgattgtgatgctgaccgaactcaaacacggtgatcaggagatttgcgctcagtactggggggaggggaagcagacatatggcgacatcgaagtggacctgaaagacaccgacaagtcaagcacctacaccctgagagtgttcgagctaagacactcaaagcggaaagattctcgcactgtgtatcagtatcagtatactaactggtctgtggagcagctgccagctgaacctaaagagctgatttcaatgatacaggtggtcaaacagaagcttccccagaaaaactctagcgaaggcaacaagcaccacaagtcgacgccgctattaattcactgcagggatggttcccagcagaccggcattttctgcgccctcctcaatctactggagtcagccgagaccgaagaagtcgttgacatcttccaagttgtgaaagccctcaggaaggccaggcctggtatggtatcgacatttgagcagtaccaatttctgtacgatgttattgctagcacctacccagcccagaacggtcaagtgaaaaaaaacaaccatcaagaggataagatagagtttgacaacgaggtagataaggttaagcaggatgctaattgtgtcaatccactcggggcccctgagaagctgccggaagctaaggagcaggctgagggatccgaacccacctcaggcaccgagggtccggagcactcagttaacggcccagccagcccagcattgaatcaggggagctag

SEQ ID NO: 132588 - DNA, 723 bp, Artificial Sequence
  derived and/or modified sequence
atgtatctttggctaaagctgctggctttcggctttgcatttctggacaccgaggttttcgtcaccggccaatcccccactccttcaccaaccggccatcttcaggctgaagagcagggcagccaatctaaatcccctaatctgaagagcagggaggctgattctagtgcttttagttggtggccaaaagccagagagcccctgacgaaccattggcgactgacaaccgccaagatgcctagcgtgccactgtcgtccgatcctcttcccacgcacactactgccttcagtccagcttctacatttgaacgtgagaatgacttcagcgagacgactacaagcctcagcccagacaatacttccacgcaagtgtccccagacagtctggacaatgcctctgcttttaatacaacaggggtgtcctccgtgcagacgccacacctcccaacccacgccgacagccagaccccctcagccggtacagacacgcagacatttagcggctccgcagctaacgccaaactgaatccaacacccggatctaatgccatctctgacgtgccgggagaacggagtacagcctcgactttccccaccgatccggtctccccactgaccacaaccctgtcactcgcccatcactctagcgcggctttgccggcacggacctccaataccaccatcacagcaaacacttctgacgcttatttgaatgcttcttag

SEQ ID NO: 132589 - DNA, 3921 bp, Artificial Sequence
  derived and/or modified sequence
atgacgatgtacctgtggttaaaactattagcattcggcttcgcatttcttgacactgaagtttttgtcacaggccagtctcccacaccaagtcctactggcctcacaaccgcgaaaatgccgagtgtgccactgagttctgatccacttcctacacacactactgccttctcacctgcctctacttttgaacgcgagaacgacttctccgaaacaacaacatccctaagtcctgataatacctctacacaggtttctccggatagtcttgacaacgcaagcgccttcaacactacaggggtgtccagcgtccagacccctcaccttccaacccatgccgacagtcagactcccagcgcagggacggacacccaaaccttttccggttctgctgctaacgcaaaactcaatccaactcccggtagtaacgctatttcagacgtacccggtgagagaagcaccgcttccaccttccctactgatccggttagtccccttactaccaccctaagccttgctcaccattcttctgctgccttacctgcacggacatccaacacgaccatcactgctaatacttccgatgcatatctcaatgccagtgagactaccacactaagccctagcggaagtgctgttatctctactacaaccatcgccaccacaccatcgaaaccgacatgcgatgaaaaatacgctaatataacagttgattacctgtataataaggaaaccaagctctttaccgctaagcttaacgtgaacgagaatgtggaatgcgggaacaatacatgtactaataacgaagttcacaacctcaccgagtgcaagaatgcaagtgtcagcatcagccacaacagttgcacagcccctgataaaacccttatactggatgtgccacctggggtggaaaagttccagctacacgactgtacccaggtggagaaagctgataccacaatctgtctcaaatggaaaaacatcgaaacatttacttgtgacacccagaatataacttatcgcttccagtgtgggaatatgattttcgataataaagagattaaattagaaaacctagagcccgagcacgagtacaaatgcgatagcgaaattctctataacaaccataaattcacaaacgcctctaaaatcattaagactgacttcgggtcccccggagaacctcagataattttctgtaggagcgaagctgcacaccagggagtgattacttggaaccccccacaacgatccttccacaatttcactttgtgttacataaaggagaccgaaaaggattgcctgaacctggacaaaaacctgatcaagtatgacctgcagaatcttaagccctatacaaagtatgttttgtcactccatgcttacataatcgctaaagtccaacgtaacggctctgccgctatgtgccatttcacaacgaagagcgctccgccttcacaggtgtggaatatgactgtgtccatgacttctgataatagcatgcacgtcaaatgcagaccacctagagatagaaacggcccacacgagaggtaccaccttgaggtcgaggccggaaataccctagttcgcaatgagagccacaaaaattgtgactttagggtcaaagacttgcaatactccactgactatacattcaaagcctatttccacaatggcgattatcccggagaaccttttatccttcaccacagtacatcctacaacagcaaagcccttattgcttttttggcattccttattattgtgacgtctatcgctctgctggtggtattgtataaaatctatgacctacataaaaagcggagctgtaacttggatgagcagcaggaactggtggaacgcgatgatgaaaagcagttgatgaatgtagagcccatacatgccgatatattgttggagacctacaagaggaagattgcagatgaggggagattgtttctagctgaattccaatctatccctagggtcttcagtaagttcccgattaaggaggcccgaaagccttttaatcaaaacaaaaatcgctacgtggacatccttccatatgattataatagagtggagctgtccgagattaatggcgatgccggtagcaactacatcaacgcaagttacatcgacgggttcaaggagccaagaaagtacatcgccgctcaaggccctagggacgagacagtcgacgatttctggcggatgatctgggagcaaaaagccaccgtgattgtgatggtgaccagatgcgaagaagggaatcggaacaaatgtgcagagtactggccttccatggaggaaggcaccagggcctttggcgatgttgttgttaagatcaatcaacacaagcgctgtcctgactacataatacagaaactcaacatagtaaacaaaaaggagaaggctaccgggagagaagtcactcatatccagtttacctcttggccagaccacggggtaccagaggatccacaccttttgctgaagttacgcaggagggtcaatgcattttccaactttttttccggccctattgtggtccactgctccgccggagtgggtaggacagggacctacatcgggattgacgctatgctggaggggctggaggcagagaataaagttgatgtgtatggctacgtggttaaattaaggcggcaaagatgtctcatggtccaggtagaagcgcagtatatcctcatccaccaggccctggttgaatacaatcagtttggcgagactgaggtgaatctgtctgagctgcatccctacctgcacaatatgaagaagcgagatccccctagcgaaccaagccccctggaagccgagttccagagactgccttcctataggtcctggcgcacacaacacatcggcaaccaggaagaaaataagagcaaaaacaggaattccaacgtgatcccatacgactataatcgagtcccactgaaacatgagcttgaaatgtcaaaggaatccgaacacgacagcgacgaatccagcgatgacgactcggactctgaagaaccctccaagtatataaacgcctccttcatcatgtcttattggaagcccgaagtcatgatcgccgcacagggcccattgaaagagactattggggatttttggcagatgatattccagagaaaagtgaaagtgatcgttatgttaaccgaactgaaacatggagatcaagagatctgcgctcaatattggggtgaaggcaagcagacatatggagatatcgaagtggatcttaaggatactgataagtcctccacctacacactccgcgtgtttgaactccggcacagcaagagaaaagatagccgaactgtgtaccagtaccaatacacgaactggtctgtggagcaacttcccgcagagcccaaagagctgatctctatgatccaggtggtaaagcagaagctacctcaaaaaaacagcagcgaaggcaataaacaccataaaagcacgcctttgctcatccattgtcgggacggctcccaacagaccggaattttttgcgccctcctgaacctcctcgaatcagctgagactgaggaggtggttgacatctttcaggtggtgaaggcactaagaaaggcaaggcctggtatggtgagtacctttgaacagtatcaatttctatacgatgtaatcgcatcgacatatcctgcccaaaacggccaagtgaaaaaaaataaccaccaagaggataagatcgaattcgataatgaggtggacaaggtcaaacaagacgcaaactgcgtcaaccccctgggcgctcccgagaaactcccggaggctaaagaacaagcagagggctctgaacctactagcgggactgaaggtcctgaacactccgtgaacggccctgcatcgcccgcattgaaccagggctcctag

SEQ ID NO: 132590 - DNA, 3915 bp, Artificial Sequence
  derived and/or modified sequence
atgtacttgtggctcaagctgcttgcttttggatttgcattcctggacaccgaggtgttcgttacggggcagtccccaaccccttctcccaccggtcttacaaccgccaagatgcccagcgtgcctctgagctccgaccctctccctactcatacgaccgcatttagcccagcttccacttttgagcgagaaaatgatttttctgagactacaactagtctctcacctgacaatacctccacacaggttagccctgattctctggataatgcgtcagcctttaacaccacaggcgtatcctctgtgcagacaccccacctgcccactcacgcggatagccaaacacctagcgccggtaccgacactcagacgttcagcgggtcagcagcaaacgcaaagcttaaccccacgcctgggagtaacgcgattagcgatgttcccggagagcggagcactgcatcaaccttccctaccgatcccgtctctccactgaccaccacgcttagtttagctcatcattcctctgccgcactgcccgcaagaacctcaaataccacaataacggcaaacaccagtgatgcatacctgaacgcgtctgaaacaacaacactctcgccaagcggttcggctgttatttccaccactaccatagccacgaccccgtcaaagcccacatgcgatgaaaaatatgccaatatcaccgtggactatctatataataaagaaacaaagttatttacggcaaaactcaacgtcaacgagaatgtggagtgcggcaataatacttgcacaaacaacgaagtgcataatcttaccgaatgcaagaacgcttccgtttccatcagtcacaactcatgtactgctccggacaaaactttgattcttgatgtccccccaggcgtggagaagttccagctgcacgactgcactcaggtggagaaggccgatacaactatttgcctcaagtggaagaacatcgaaacatttacttgtgatacacagaacattacgtaccgatttcaatgcggtaatatgatctttgataataaggagataaaacttgagaacctcgagccagaacacgagtataagtgtgactcagaaattctgtacaacaaccacaagttcaccaacgcctcgaagattatcaagactgattttggctctcccggtgagccgcagatcatcttctgtcgcagcgaagctgcccaccagggcgtgatcacgtggaacccccctcagaggtcattccacaacttcactttgtgttacataaaggaaacagagaaagactgtcttaacctggacaagaatctgatcaagtacgatctgcagaatctgaagccatatacaaagtacgtcctttcccttcatgcctacattattgccaaggtgcagcgaaatggttccgcagcaatgtgtcacttcacaaccaagagcgcccctccatcccaggtgtggaacatgacagtgtctatgactagtgacaacagcatgcatgtcaagtgccgacctccccgtgatcgcaacggcccacatgaaaggtaccatctggaggtcgaggccggtaataccctggttcgtaatgagtctcacaagaactgtgactttagagtgaaggacttgcagtattctactgattacacttttaaggcctactttcacaacggcgattatcccggagagccctttattttgcaccattccacttcatataactcgaaggcacttattgctttcctcgccttcttgatcattgtaacatccatcgcgttgctggtagtactgtacaagatctacgacttacataagaaacgctcctgcaatttagacgagcagcaggaactcgtggagagagatgacgagaaacaactcatgaatgtggaaccaattcacgctgatattctcctcgagacctacaagcggaagattgccgacgaaggcaggctgttcctcgccgaattccagagcattcccagagtgttctccaaattccccattaaagaagctcgaaagccctttaaccaaaacaaaaatcggtatgtagatattcttccttatgactataatcgggtcgaattgtccgagatcaacggcgacgctggaagcaactatattaacgcctcgtacatagacggttttaaagagcccaggaagtatattgcggcacagggtcccagggacgaaacagttgacgatttttggagaatgatctgggagcaaaaggctaccgtaatcgtcatggtcactaggtgcgaggagggcaaccggaataagtgtgccgaatattggccctctatggaggagggtactcgcgctttcggggatgtcgttgttaagatcaaccagcacaagaggtgcccagattacatcatccaaaagctaaacatcgtgaataagaaggagaaagctactggtcgcgaagttacgcatattcagttcaccagctggcctgatcatggggtgcccgaggatccacacctgctgctaaagctgagacgtcgagttaatgcgtttagcaactttttcagtggacctatagttgtccactgttctgcaggagtcggcaggaccggcacctatatcggaattgatgccatgttagaggggctcgaagcggaaaacaaggtagatgtgtacggctatgtggtcaagttaaggagacagaggtgtcttatggtgcaggtcgaggcgcaatatatcctcattcatcaggccctcgtcgaatataatcaatttggagaaaccgaggtgaacctgtcagagctccatccctacctgcataatatgaaaaaaagagaccctccatccgagcccagtcccctcgaagccgaatttcagaggctgccttcatataggtcttggcggacacaacatatcgggaaccaggaagaaaacaaaagtaagaataggaattcaaatgtgatcccatacgactacaaccgggtccctctgaaacatgaattagagatgagcaaagaatctgagcacgactcagatgagtctagcgacgatgattcagatagtgaggaaccaagcaagtatattaacgcctcgttcatcatgtcgtactggaaacctgaagtgatgatcgcggcacaaggccctctcaaggagacaataggcgacttttggcagatgatttttcagaggaaggtgaaggtcatcgtcatgctaacggaactcaagcacggcgaccaggagatttgtgctcagtactggggagagggaaaacaaacttacggtgatatcgaagtggatctgaaagacacagacaagagtagcacgtatacactaagagtgtttgaattgaggcacagcaagagaaaggacagcaggaccgtctatcagtaccaatatacaaattggtcggtcgagcagctgcccgctgagcccaaggaactgattagcatgatacaagtcgtcaagcagaagctacctcagaagaatagtagtgagggcaacaaacaccacaaatctacacctttactgatacattgccgggatggtagccagcagactggtatcttctgtgctcttctgaaccttctagagagcgctgagacagaggaagtcgttgatatttttcaagtggtcaaggccttacgcaaggcccgtcccggaatggtgagcactttcgaacagtaccaattcctgtacgatgtgatcgccagcacctaccccgctcagaatggccaggtcaaaaaaaacaatcatcaggaggataagattgagttcgataatgaggttgataaggttaaacaggacgcgaactgcgtaaacccactgggagcgccagaaaagttgcctgaagccaaagaacaggctgaaggctctgagcccaccagcggcacagagggtccagagcacagcgtcaatgggcctgccagtccagcactgaaccaaggcagctag

SEQ ID NO: 132591 - DNA, 5444 bp, Artificial Sequence
  derived and/or modified sequence
ggagaagttagtaaaaccgaatctgacatcatcacctagcagttcatgcagctagcaagtggtttgttcttagggtaacagaggaggaaattgttcctcgtctgataagacaacagtggagaaaggacgcatgctgtttcttagggacacggctgacttccagatatgaccatgtatttgtggcttaaactcttggcatttggctttgcctttctggacacagaagtatttgtgacagggcaaagcccaacaccttcccccactggccatctgcaagctgaggagcaaggaagccaatccaagtcaccaaacctcaaaagtagggaagctgacagttcagccttcagttggtggccaaaggcccgagagcccctcacaaaccactggagattgactacagcaaagatgcccagtgttccactttcaagtgaccccttacctactcacaccactgcattctcacccgcaagcacctttgaaagagaaaatgacttctcagagaccacaacttctcttagtccagacaatacttccacccaagtatccccggactctttggataatgctagtgcttttaataccacaggtgtttcatcagtacagacgcctcaccttcccacgcacgcagactcgcagacgccctctgctggaactgacacgcagacattcagcggctccgccgccaatgcaaaactcaaccctaccccaggcagcaatgctatctcagatgtcccaggagagaggagtacagccagcacctttcctacagacccagtttccccattgacaaccaccctcagccttgcacaccacagctctgctgccttacctgcacgcacctccaacaccaccatcacagcgaacacctcagatgcctaccttaatgcctctgaaacaaccactctgagcccttctggaagcgctgtcatttcaaccacaacaatagctactactccatctaagccaacatgtgatgaaaaatatgcaaacatcactgtggattacttatataacaaggaaactaaattatttacagcaaagctaaatgttaatgagaatgtggaatgtggaaacaatacttgcacaaacaatgaggtgcataaccttacagaatgtaaaaatgcgtctgtttccatatctcataattcatgtactgctcctgataagacattaatattagatgtgccaccaggggttgaaaagtttcagttacatgattgtacacaagttgaaaaagcagatactactatttgtttaaaatggaaaaatattgaaacctttacttgtgatacacagaatattacctacagatttcagtgtggtaatatgatatttgataataaagaaattaaattagaaaaccttgaacccgaacatgagtataagtgtgactcagaaatactctataataaccacaagtttactaacgcaagtaaaattattaaaacagattttgggagtccaggagagcctcagattattttttgtagaagtgaagctgcacatcaaggagtaattacctggaatccccctcaaagatcatttcataattttaccctctgttatataaaagagacagaaaaagattgcctcaatctggataaaaacctgatcaaatatgatttgcaaaatttaaaaccttatacgaaatatgttttatcattacatgcctacatcattgcaaaagtgcaacgtaatggaagtgctgcaatgtgtcatttcacaactaaaagtgctcctccaagccaggtctggaacatgactgtctccatgacatcagataatagtatgcatgtcaagtgtaggcctcccagggaccgtaatggcccccatgaacgttaccatttggaagttgaagctggaaatactctggttagaaatgagtcgcataagaattgcgatttccgtgtaaaagatcttcaatattcaacagactacacttttaaggcctattttcacaatggagactatcctggagaaccctttattttacatcattcaacatcttataattctaaggcactgatagcatttctggcatttctgattattgtgacatcaatagccctgcttgttgttctctacaaaatctatgatctacataagaaaagatcctgcaatttagatgaacagcaggagcttgttgaaagggatgatgaaaaacaactgatgaatgtggagccaatccatgcagatattttgttggaaacttataagaggaagattgctgatgaaggaagactttttctggctgaatttcagagcatcccgcgggtgttcagcaagtttcctataaaggaagctcgaaagccctttaaccagaataaaaaccgttatgttgacattcttccttatgattataaccgtgttgaactctctgagataaacggagatgcagggtcaaactacataaatgccagctatattgatggtttcaaagaacccaggaaatacattgctgcacaaggtcccagggatgaaactgttgatgatttctggaggatgatttgggaacagaaagccacagttattgtcatggtcactcgatgtgaagaaggaaacaggaacaagtgtgcagaatactggccgtcaatggaagagggcactcgggcttttggagatgttgttgtaaagatcaaccagcacaaaagatgtccagattacatcattcagaaattgaacattgtaaataaaaaagaaaaagcaactggaagagaggtgactcacattcagttcaccagctggccagaccacggggtgcctgaggatcctcacttgctcctcaaactgagaaggagagtgaatgccttcagcaatttcttcagtggtcccattgtggtgcactgcagtgctggtgttgggcgcacaggaacctatatcggaattgatgccatgctagaaggcctggaagccgagaacaaagtggatgtttatggttatgttgtcaagctaaggcgacagagatgcctgatggttcaagtagaggcccagtacatcttgatccatcaggctttggtggaatacaatcagtttggagaaacagaagtgaatttgtctgaattacatccatatctacataacatgaagaaaagggatccacccagtgagccgtctccactagaggctgaattccagagacttccttcatataggagctggaggacacagcacattggaaatcaagaagaaaataaaagtaaaaacaggaattctaatgtcatcccatatgactataacagagtgccacttaaacatgagctggaaatgagtaaagagagtgagcatgattcagatgaatcctctgatgatgacagtgattcagaggaaccaagcaaatacatcaatgcatcttttataatgagctactggaaacctgaagtgatgattgctgctcagggaccactgaaggagaccattggtgacttttggcagatgatcttccaaagaaaagtcaaagttattgttatgctgacagaactgaaacatggagaccaggaaatctgtgctcagtactggggagaaggaaagcaaacatatggagatattgaagttgacctgaaagacacagacaaatcttcaacttatacccttcgtgtctttgaactgagacattccaagaggaaagactctcgaactgtgtaccagtaccaatatacaaactggagtgtggagcagcttcctgcagaacccaaggaattaatctctatgattcaggtcgtcaaacaaaaacttccccagaagaattcctctgaagggaacaagcatcacaagagtacacctctactcattcactgcagggatggatctcagcaaacgggaatattttgtgctttgttaaatctcttagaaagtgcggaaacagaagaggtagtggatatttttcaagtggtaaaagctctacgcaaagctaggccaggcatggtttccacattcgagcaatatcaattcctatatgacgtcattgccagcacctaccctgctcagaatggacaagtaaagaaaaacaaccatcaagaagataaaattgaatttgataatgaagtggacaaagtaaagcaggatgctaattgtgttaatccacttggtgccccagaaaagctccctgaagcaaaggaacaggctgaaggttctgaacccacgagtggcactgaggggccagaacattctgtcaatggtcctgcaagtccagctttaaatcaaggttcataggaaaagacataaatgaggaaactccaaacctcctgttagctgttatttctatttttgtagaagtaggaagtgaaaataggtatacagtggattaattaaatgcagcgaaccaatatttgtagaagggttatattttactactgtggaaaaatatttaagatagttttgccagaacagtttgtacagacgtatgcttattttaaaattttatctcttattcagtaaaaaacaacttctttgtaatcgttatgtgtgtatatgtatgtgtgtatgggtgtgtgtttgtgtgagagacagagaaagagagagaattctttcaagtgaatctaaaagcttttgcttttcctttgtttttatgaagaaaaaatacattttatattagaagtgttaacttagcttgaaggatctgtttttaaaaatcataaactgtgtgcagactcaataaaatcatgtacatttctgaaatgacctcaagatgtcctccttgttctactcatatatatctatcttatatagtttactattttacttctagagatagtacataaaggtggtatgtgtgtgtatgctactacaaaaaagttgttaactaaattaacattgggaaatcttatattccatatattagcatttagtccaatgtctttttaagcttatttaattaaaaaatttccagtgagcttatcatgctgtctttacatggggttttcaattttgcatgctcgattattccctgtacaatatttaaaatttattgcttgatacttttgacaacaaattaggttttgtacaattgaacttaaataaatgtcattaaaataaataaatgcaatatgtattaatattcattgtataaaaatagaagaatacaaacatatttgttaaatatttacatatgaaatttaatatagctatttttatggaatttttcattgatatgaaaaatatgatattgcatatgcatagttcccatgttaaatcccattcataactttcattaaagcatttactttgaatttctccaatgcttagaatgtttttaccaggaatggatgtcgctaatcataataaaattcaaccattatttttttcttgtttataatacattgtgttatatgttcaaatatgaaatgtgtatgcacctattgaaatatgtttaatgcatttattaacatttgcaggacacttttacaggccccaattatccaatagtctaataattgtttaagatctag

SEQ ID NO: 132592 - DNA, 5321 bp, Artificial Sequence
  derived and/or modified sequence
ggagaagttagtaaaaccgaatctgacatcatcacctagcagttcatgcagctagcaagtggtttgttcttagggtaacagaggaggaaattgttcctcgtctgataagacaacagtggagaaaggacgcatgctgtttcttagggacacggctgacttccagatatgaccatgtatttgtggcttaaactcttggcatttggctttgcctttctggacacagaagtatttgtgacagggcaaagcccaacaccttcccccactggattgactacagcaaagatgcccagtgttccactttcaagtgaccccttacctactcacaccactgcattctcacccgcaagcacctttgaaagagaaaatgacttctcagagaccacaacttctcttagtccagacaatacttccacccaagtatccccggactctttggataatgctagtgcttttaataccacaggtgtttcatcagtacagacgcctcaccttcccacgcacgcagactcgcagacgccctctgctggaactgacacgcagacattcagcggctccgccgccaatgcaaaactcaaccctaccccaggcagcaatgctatctcagatgtcccaggagagaggagtacagccagcacctttcctacagacccagtttccccattgacaaccaccctcagccttgcacaccacagctctgctgccttacctgcacgcacctccaacaccaccatcacagcgaacacctcagatgcctaccttaatgcctctgaaacaaccactctgagcccttctggaagcgctgtcatttcaaccacaacaatagctactactccatctaagccaacatgtgatgaaaaatatgcaaacatcactgtggattacttatataacaaggaaactaaattatttacagcaaagctaaatgttaatgagaatgtggaatgtggaaacaatacttgcacaaacaatgaggtgcataaccttacagaatgtaaaaatgcgtctgtttccatatctcataattcatgtactgctcctgataagacattaatattagatgtgccaccaggggttgaaaagtttcagttacatgattgtacacaagttgaaaaagcagatactactatttgtttaaaatggaaaaatattgaaacctttacttgtgatacacagaatattacctacagatttcagtgtggtaatatgatatttgataataaagaaattaaattagaaaaccttgaacccgaacatgagtataagtgtgactcagaaatactctataataaccacaagtttactaacgcaagtaaaattattaaaacagattttgggagtccaggagagcctcagattattttttgtagaagtgaagctgcacatcaaggagtaattacctggaatccccctcaaagatcatttcataattttaccctctgttatataaaagagacagaaaaagattgcctcaatctggataaaaacctgatcaaatatgatttgcaaaatttaaaaccttatacgaaatatgttttatcattacatgcctacatcattgcaaaagtgcaacgtaatggaagtgctgcaatgtgtcatttcacaactaaaagtgctcctccaagccaggtctggaacatgactgtctccatgacatcagataatagtatgcatgtcaagtgtaggcctcccagggaccgtaatggcccccatgaacgttaccatttggaagttgaagctggaaatactctggttagaaatgagtcgcataagaattgcgatttccgtgtaaaagatcttcaatattcaacagactacacttttaaggcctattttcacaatggagactatcctggagaaccctttattttacatcattcaacatcttataattctaaggcactgatagcatttctggcatttctgattattgtgacatcaatagccctgcttgttgttctctacaaaatctatgatctacataagaaaagatcctgcaatttagatgaacagcaggagcttgttgaaagggatgatgaaaaacaactgatgaatgtggagccaatccatgcagatattttgttggaaacttataagaggaagattgctgatgaaggaagactttttctggctgaatttcagagcatcccgcgggtgttcagcaagtttcctataaaggaagctcgaaagccctttaaccagaataaaaaccgttatgttgacattcttccttatgattataaccgtgttgaactctctgagataaacggagatgcagggtcaaactacataaatgccagctatattgatggtttcaaagaacccaggaaatacattgctgcacaaggtcccagggatgaaactgttgatgatttctggaggatgatttgggaacagaaagccacagttattgtcatggtcactcgatgtgaagaaggaaacaggaacaagtgtgcagaatactggccgtcaatggaagagggcactcgggcttttggagatgttgttgtaaagatcaaccagcacaaaagatgtccagattacatcattcagaaattgaacattgtaaataaaaaagaaaaagcaactggaagagaggtgactcacattcagttcaccagctggccagaccacggggtgcctgaggatcctcacttgctcctcaaactgagaaggagagtgaatgccttcagcaatttcttcagtggtcccattgtggtgcactgcagtgctggtgttgggcgcacaggaacctatatcggaattgatgccatgctagaaggcctggaagccgagaacaaagtggatgtttatggttatgttgtcaagctaaggcgacagagatgcctgatggttcaagtagaggcccagtacatcttgatccatcaggctttggtggaatacaatcagtttggagaaacagaagtgaatttgtctgaattacatccatatctacataacatgaagaaaagggatccacccagtgagccgtctccactagaggctgaattccagagacttccttcatataggagctggaggacacagcacattggaaatcaagaagaaaataaaagtaaaaacaggaattctaatgtcatcccatatgactataacagagtgccacttaaacatgagctggaaatgagtaaagagagtgagcatgattcagatgaatcctctgatgatgacagtgattcagaggaaccaagcaaatacatcaatgcatcttttataatgagctactggaaacctgaagtgatgattgctgctcagggaccactgaaggagaccattggtgacttttggcagatgatcttccaaagaaaagtcaaagttattgttatgctgacagaactgaaacatggagaccaggaaatctgtgctcagtactggggagaaggaaagcaaacatatggagatattgaagttgacctgaaagacacagacaaatcttcaacttatacccttcgtgtctttgaactgagacattccaagaggaaagactctcgaactgtgtaccagtaccaatatacaaactggagtgtggagcagcttcctgcagaacccaaggaattaatctctatgattcaggtcgtcaaacaaaaacttccccagaagaattcctctgaagggaacaagcatcacaagagtacacctctactcattcactgcagggatggatctcagcaaacgggaatattttgtgctttgttaaatctcttagaaagtgcggaaacagaagaggtagtggatatttttcaagtggtaaaagctctacgcaaagctaggccaggcatggtttccacattcgagcaatatcaattcctatatgacgtcattgccagcacctaccctgctcagaatggacaagtaaagaaaaacaaccatcaagaagataaaattgaatttgataatgaagtggacaaagtaaagcaggatgctaattgtgttaatccacttggtgccccagaaaagctccctgaagcaaaggaacaggctgaaggttctgaacccacgagtggcactgaggggccagaacattctgtcaatggtcctgcaagtccagctttaaatcaaggttcataggaaaagacataaatgaggaaactccaaacctcctgttagctgttatttctatttttgtagaagtaggaagtgaaaataggtatacagtggattaattaaatgcagcgaaccaatatttgtagaagggttatattttactactgtggaaaaatatttaagatagttttgccagaacagtttgtacagacgtatgcttattttaaaattttatctcttattcagtaaaaaacaacttctttgtaatcgttatgtgtgtatatgtatgtgtgtatgggtgtgtgtttgtgtgagagacagagaaagagagagaattctttcaagtgaatctaaaagcttttgcttttcctttgtttttatgaagaaaaaatacattttatattagaagtgttaacttagcttgaaggatctgtttttaaaaatcataaactgtgtgcagactcaataaaatcatgtacatttctgaaatgacctcaagatgtcctccttgttctactcatatatatctatcttatatagtttactattttacttctagagatagtacataaaggtggtatgtgtgtgtatgctactacaaaaaagttgttaactaaattaacattgggaaatcttatattccatatattagcatttagtccaatgtctttttaagcttatttaattaaaaaatttccagtgagcttatcatgctgtctttacatggggttttcaattttgcatgctcgattattccctgtacaatatttaaaatttattgcttgatacttttgacaacaaattaggttttgtacaattgaacttaaataaatgtcattaaaataaataaatgcaatatgtattaatattcattgtataaaaatagaagaatacaaacatatttgttaaatatttacatatgaaatttaatatagctatttttatggaatttttcattgatatgaaaaatatgatattgcatatgcatagttcccatgttaaatcccattcataactttcattaaagcatttactttgaatttctccaatgcttagaatgtttttaccaggaatggatgtcgctaatcataataaaattcaaccattatttttttcttgtttataatacattgtgttatatgttcaaatatgaaatgtgtatgcacctattgaaatatgtttaatgcatttattaacatttgcaggacacttttacaggccccaattatccaatagtctaataattgtttaagatctag

SEQ ID NO: 132593 - DNA, 5164 bp, Artificial Sequence
  derived and/or modified sequence
gacatcatcacctagcagttcatgcagctagcaagtggtttgttcttagggtaacagaggaggaaattgttcctcgtctgataagacaacagtggagaaaggacgcatgctgtttcttagggacacggctgacttccagatatgaccatgtatttgtggcttaaactcttggcatttggctttgcctttctggacacagaagtatttgtgacagggcaaagcccaacaccttcccccactggattgactacagcaaagatgcccagtgttccactttcaagtgaccccttacctactcacaccactgcattctcacccgcaagcacctttgaaagagaaaatgacttctcagagaccacaacttctcttagtccagacaatacttccacccaagtatccccggactctttggataatgctagtgcttttaataccacaggtgtttcatcagtacagacgcctcaccttcccacgcacgcagactcgcagacgccctctgctggaactgacacgcagacattcagcggctccgccgccaatgcaaaactcaaccctaccccaggcagcaatgctatctcagatgtcccaggagagaggagtacagccagcacctttcctacagacccagtttccccattgacaaccaccctcagccttgcacaccacagctctgctgccttacctgcacgcacctccaacaccaccatcacagcgaacacctcagatgcctaccttaatgcctctgaaacaaccactctgagcccttctggaagcgctgtcatttcaaccacaacaatagctactactccatctaagccaacatgtgatgaaaaatatgcaaacatcactgtggattacttatataacaaggaaactaaattatttacagcaaagctaaatgttaatgagaatgtggaatgtggaaacaatacttgcacaaacaatgaggtgcataaccttacagaatgtaaaaatgcgtctgtttccatatctcataattcatgtactgctcctgataagacattaatattagatgtgccaccaggggttgaaaagtttcagttacatgattgtacacaagttgaaaaagcagatactactatttgtttaaaatggaaaaatattgaaacctttacttgtgatacacagaatattacctacagatttcagtgtggtaatatgatatttgataataaagaaattaaattagaaaaccttgaacccgaacatgagtataagtgtgactcagaaatactctataataaccacaagtttactaacgcaagtaaaattattaaaacagattttgggagtccaggagagcctcagattattttttgtagaagtgaagctgcacatcaaggagtaattacctggaatccccctcaaagatcatttcataattttaccctctgttatataaaagagacagaaaaagattgcctcaatctggataaaaacctgatcaaatatgatttgcaaaatttaaaaccttatacgaaatatgttttatcattacatgcctacatcattgcaaaagtgcaacgtaatggaagtgctgcaatgtgtcatttcacaactaaaagtgctcctccaagccaggtctggaacatgactgtctccatgacatcagataatagtatgcatgtcaagtgtaggcctcccagggaccgtaatggcccccatgaacgttaccatttggaagttgaagctggaaatactctggttagaaatgagtcgcataagaattgcgatttccgtgtaaaagatcttcaatattcaacagactacacttttaaggcctattttcacaatggagactatcctggagaaccctttattttacatcattcaacatcttataattctaaggcactgatagcatttctggcatttctgattattgtgacatcaatagccctgcttgttgttctctacaaaatctatgatctacataagaaaagatcctgcaatttagatgaacagcaggagcttgttgaaagggatgatgaaaaacaactgatgaatgtggagccaatccatgcagatattttgttggaaacttataagaggaagattgctgatgaaggaagactttttctggctgaatttcagagcatcccgcgggtgttcagcaagtttcctataaaggaagctcgaaagccctttaaccagaataaaaaccgttatgttgacattcttccttatgattataaccgtgttgaactctctgagataaacggagatgcagggtcaaactacataaatgccagctatattgatggtttcaaagaacccaggaaatacattgctgcacaaggtcccagggatgaaactgttgatgatttctggaggatgatttgggaacagaaagccacagttattgtcatggtcactcgatgtgaagaaggaaacaggaacaagtgtgcagaatactggccgtcaatggaagagggcactcgggcttttggagatgttgttgtaaagatcaaccagcacaaaagatgtccagattacatcattcagaaattgaacattgtaaataaaaaagaaaaagcaactggaagagaggtgactcacattcagttcaccagctggccagaccacggggtgcctgaggatcctcacttgctcctcaaactgagaaggagagtgaatgccttcagcaatttcttcagtggtcccattgtggtgcactgcagtgctggtgttgggcgcacaggaacctatatcggaattgatgccatgctagaaggcctggaagccgagaacaaagtggatgtttatggttatgttgtcaagctaaggcgacagagatgcctgatggttcaagtagaggcccagtacatcttgatccatcaggctttggtggaatacaatcagtttggagaaacagaagtgaatttgtctgaattacatccatatctacataacatgaagaaaagggatccacccagtgagccgtctccactagaggctgaattccagagacttccttcatataggagctggaggacacagcacattggaaatcaagaagaaaataaaagtaaaaacaggaattctaatgtcatcccatatgactataacagagtgccacttaaacatgagctggaaatgagtaaagagagtgagcatgattcagatgaatcctctgatgatgacagtgattcagaggaaccaagcaaatacatcaatgcatcttttataatgagctactggaaacctgaagtgatgattgctgctcagggaccactgaaggagaccattggtgacttttggcagatgatcttccaaagaaaagtcaaagttattgttatgctgacagaactgaaacatggagaccaggaaatctgtgctcagtactggggagaaggaaagcaaacatatggagatattgaagttgacctgaaagacacagacaaatcttcaacttatacccttcgtgtctttgaactgagacattccaagaggaaagactctcgaactgtgtaccagtaccaatatacaaactggagtgtggagcagcttcctgcagaacccaaggaattaatctctatgattcaggtcgtcaaacaaaaacttccccagaagaattcctctgaagggaacaagcatcacaagagtacacctctactcattcactgcagggatggatctcagcaaacgggaatattttgtgctttgttaaatctcttagaaagtgcggaaacagaagaggtagtggatatttttcaagtggtaaaagctctacgcaaagctaggccaggcatggtttccacattcgagcaatatcaattcctatatgacgtcattgccagcacctaccctgctcagaatggacaagtaaagaaaaacaaccatcaagaagataaaattgaatttgataatgaagtggacaaagtaaagcaggatgctaattgtgttaatccacttggtgccccagaaaagctccctgaagcaaaggaacaggctgaaggttctgaacccacgagtggcactgaggggccagaacattctgtcaatggtcctgcaagtccagctttaaatcaaggttcataggaaaagacataaatgaggaaactccaaacctcctgttagctgttatttctatttttgtagaagtaggaagtgaaaataggtatacagtggattaattaaatgcagcgaaccaatatttgtagaagggttatattttactactgtggaaaaatatttaagatagttttgccagaacagtttgtacagacgtatgcttattttaaaattttatctcttattcagtaaaaaacaacttctttgtaatcgttatgtgtgtatatgtatgtgtgtatgggtgtgtgtttgtgtgagagacagagaaagagagagaattctttcaagtgaatctaaaagcttttgcttttcctttgtttttatgaagaaaaaatacattttatattagaagtgttaacttagcttgaaggatctgtttttaaaaatcataaactgtgtgcagactcaataaaatcatgtacatttctgaaatgacctcaagatgtcctccttgttctactcatatatatctatcttatatagtttactattttacttctagagatagtacataaaggtggtatgtgtgtgtatgctactacaaaaaagttgttaactaaattaacattgggaaatcttatattccatatattagcatttagtccaatgtctttttaagcttatttaattaaaaaatttccagtgagcttatcatgctgtctttacatggggttttcaattttgcatgctcgattattccctgtacaatatttaaaatttattgcttgatacttttgacaacaaattaggttttgtacaattgaacttaaataaatgtcattaaaataaataaatgcaatatgtattaatattcattgtataaaaatagaagaatacaaacatatttgttaaatatttacatatgaaatttaatatagctatttttatggaatttttcattgatatgaaaaatatgatattgcatatgcatagttcccatgttaaatcccattcataactttcattaaagcatttactttgaatttctccaatgcttagaatgtttttaccaggaatggatgtcgctaatcataataaaattcaaccattatttttttcttgtttataa

SEQ ID NO: 132594 - protein, 1912 aa, Artificial Sequence
  derived and/or modified sequence
MVHVARLLLLLLTFFLRTDAETPPRFTRTPVDQTGVSGGVASFICQATGDPRPKIVWNKKGKKVSNQRFEVIEFDDGSGSVLRIQPLRTPRDEAIYECVASNNVGEISVSTRLTVLREDQIPRGFPTIDMGPQLKVVERTRTATMLCAASGNPDPEITWFKDFLPVDTSNNNGRIKQLRSESIGGTPIRGALQIEQSEESDQGKYECVATNSAGTRYSAPANLYVRELREVRRVPPRFSIPPTNHEIMPGGSVNITCVAVGSPMPYVKWMLGAEDLTPEDDMPIGRNVLELNDVRQSANYTCVAMSTLGVIEAIAQITVKALPKPPGTPVVTESTATSITLTWDSGNPEPVSYYIIQHKPKNSEELYKEIDGVATTRYSVAGLSPYSDYEFRVVAVNNIGRGPPSEPVLTQTSEQAPSSAPRDVQARMLSSTTILVQWKEPEEPNGQIQGYRVYYTMDPTQHVNNWMKHNVADSQITTIGNLVPQKTYSVKVLAFTSIGDGPLSSDIQVITQTGVPGQPLNFKAEPESETSILLSWTPPRSDTIANYELVYKDGEHGEEQRITIEPGTSYRLQGLKPNSLYYFRLAARSPQGLGASTAEISARTMQSKPSAPPQDISCTSPSSTSILVSWQPPPVEKQNGIITEYSIKYTAVDGEDDKPHEILGIPSDTTKYLLEQLEKWTEYRITVTAHTDVGPGPESLSVLIRTNEDVPSGPPRKVEVEAVNSTSVKVSWRSPVPNKQHGQIRGYQVHYVRMENGEPKGQPMLKDVMLADAQWEFDDTTEHDMIISGLQPETSYSLTVTAYTTKGDGARSKPKLVSTTGAVPGKPRLVINHTQMNTALIQWHPPVDTFGPLQGYRLKFGRKDMEPLTTLEFSEKEDHFTATDIHKGASYVFRLSARNKVGFGEEMVKEISIPEEVPTGFPQNLHSEGTTSTSVQLSWQPPVLAERNGIITKYTLLYRDINIPLLPMEQLIVPADTTMTLTGLKPDTTYDVKVRAHTSKGPGPYSPSVQFRTLPVDQVFAKNFHVKAVMKTSVLLSWEIPENYNSAMPFKILYDDGKMVEEVDGRATQKLIVNLKPEKSYSFVLTNRGNSAGGLQHRVTAKTAPDVLRTKPAFIGKTNLDGMITVQLPEVPANENIKGYYIIIVPLKKSRGKFIKPWESPDEMELDELLKEISRKRRSIRYGREVELKPYIAAHFDVLPTEFTLGDDKHYGGFTNKQLQSGQEYVFFVLAVMEHAESKMYATSPYSDPVVSMDLDPQPITDEEEGLIWVVGPVLAVVFIICIVIAILLYKRKRAESDSRKSSIPNNKEIPSHHPTDPVELRRLNFQTPGMASHPPIPILELADHIERLKANDNLKFSQEYESIDPGQQFTWEHSNLEVNKPKNRYANVIAYDHSRVLLSAIEGIPGSDYVNANYIDGYRKQNAYIATQGSLPETFGDFWRMIWEQRSATVVMMTKLEERSRVKCDQYWPSRGTETHGLVQVTLLDTVELATYCVRTFALYKNGSSEKREVRQFQFTAWPDHGVPEHPTPFLAFLRRVKTCNPPDAGPMVVHCSAGVGRTGCFIVIDAMLERIKHEKTVDIYGHVTLMRAQRNYMVQTEDQYIFIHDALLEAVTCGNTEVPARNLYAYIQKLTQIETGENVTGMELEFKRLASSKAHTSRFISANLPCNKFKNRLVNIMPYESTRVCLQPIRGVEGSDYINASFIDGYRQQKAYIATQGPLAETTEDFWRMLWEHNSTIVVMLTKLREMGREKCHQYWPAERSARYQYFVVDPMAEYNMPQYILREFKVTDARDGQSRTVRQFQFTDWPEQGVPKSGEGFIDFIGQVHKTKEQFGQDGPISVHCSAGVGRTGVFITLSIVLERMRYEGVVDIFQTVKMLRTQRPAMVQTEDQYQFSYRAALEYLGSFDHYAT

SEQ ID NO: 132595 - protein, 1899 aa, Artificial Sequence
  derived and/or modified sequence
MVHVARLLLLLLTFFLRTDAETPPRFTRTPVDQTGVSGGVASFICQATGDPRPKIVWNKKGKKVSNQRFEVIEFDDGSGSVLRIQPLRTPRDEAIYECVASNNVGEISVSTRLTVLREDQIPRGFPTIDMGPQLKVVERTRTATMLCAASGNPDPEITWFKDFLPVDTSNNNGRIKQLRSGALQIEQSEESDQGKYECVATNSAGTRYSAPANLYVRVRRVPPRFSIPPTNHEIMPGGSVNITCVAVGSPMPYVKWMLGAEDLTPEDDMPIGRNVLELNDVRQSANYTCVAMSTLGVIEAIAQITVKALPKPPGTPVVTESTATSITLTWDSGNPEPVSYYIIQHKPKNSEELYKEIDGVATTRYSVAGLSPYSDYEFRVVAVNNIGRGPPSEPVLTQTSEQAPSSAPRDVQARMLSSTTILVQWKEPEEPNGQIQGYRVYYTMDPTQHVNNWMKHNVADSQITTIGNLVPQKTYSVKVLAFTSIGDGPLSSDIQVITQTGVPGQPLNFKAEPESETSILLSWTPPRSDTIANYELVYKDGEHGEEQRITIEPGTSYRLQGLKPNSLYYFRLAARSPQGLGASTAEISARTMQSKPSAPPQDISCTSPSSTSILVSWQPPPVEKQNGIITEYSIKYTAVDGEDDKPHEILGIPSDTTKYLLEQLEKWTEYRITVTAHTDVGPGPESLSVLIRTNEDVPSGPPRKVEVEAVNSTSVKVSWRSPVPNKQHGQIRGYQVHYVRMENGEPKGQPMLKDVMLADAQWEFDDTTEHDMIISGLQPETSYSLTVTAYTTKGDGARSKPKLVSTTGAVPGKPRLVINHTQMNTALIQWHPPVDTFGPLQGYRLKFGRKDMEPLTTLEFSEKEDHFTATDIHKGASYVFRLSARNKVGFGEEMVKEISIPEEVPTGFPQNLHSEGTTSTSVQLSWQPPVLAERNGIITKYTLLYRDINIPLLPMEQLIVPADTTMTLTGLKPDTTYDVKVRAHTSKGPGPYSPSVQFRTLPVDQVFAKNFHVKAVMKTSVLLSWEIPENYNSAMPFKILYDDGKMVEEVDGRATQKLIVNLKPEKSYSFVLTNRGNSAGGLQHRVTAKTAPDVLRTKPAFIGKTNLDGMITVQLPEVPANENIKGYYIIIVPLKKSRGKFIKPWESPDEMELDELLKEISRKRRSIRYGREVELKPYIAAHFDVLPTEFTLGDDKHYGGFTNKQLQSGQEYVFFVLAVMEHAESKMYATSPYSDPVVSMDLDPQPITDEEEGLIWVVGPVLAVVFIICIVIAILLYKRKRAESDSRKSSIPNNKEIPSHHPTDPVELRRLNFQTPGMASHPPIPILELADHIERLKANDNLKFSQEYESIDPGQQFTWEHSNLEVNKPKNRYANVIAYDHSRVLLSAIEGIPGSDYVNANYIDGYRKQNAYIATQGSLPETFGDFWRMIWEQRSATVVMMTKLEERSRVKCDQYWPSRGTETHGLVQVTLLDTVELATYCVRTFALYKNGSSEKREVRQFQFTAWPDHGVPEHPTPFLAFLRRVKTCNPPDAGPMVVHCSAGVGRTGCFIVIDAMLERIKHEKTVDIYGHVTLMRAQRNYMVQTEDQYIFIHDALLEAVTCGNTEVPARNLYAYIQKLTQIETGENVTGMELEFKRLASSKAHTSRFISANLPCNKFKNRLVNIMPYESTRVCLQPIRGVEGSDYINASFIDGYRQQKAYIATQGPLAETTEDFWRMLWEHNSTIVVMLTKLREMGREKCHQYWPAERSARYQYFVVDPMAEYNMPQYILREFKVTDARDGQSRTVRQFQFTDWPEQGVPKSGEGFIDFIGQVHKTKEQFGQDGPISVHCSAGVGRTGVFITLSIVLERMRYEGVVDIFQTVKMLRTQRPAMVQTEDQYQFSYRAALEYLGSFDHYAT

SEQ ID NO: 132596 - DNA, 5739 bp, Artificial Sequence
  derived and/or modified sequence
atggtgcatgtagcccggctcctgctgctcctgcttacattttttctacgaacagatgccgaaacaccccccaggtttacccggacaccagtggaccaaaccggtgtttcaggtggagtggcttccttcatctgccaggcgaccggcgatcctcgccccaagattgtctggaataagaaaggcaagaaagtgtccaatcaacgcttcgaggtaattgaattcgacgatggctctggctccgtcctccgcatccagcctctcaggacgccccgagacgaggctatatatgaatgtgttgcctccaacaacgtgggcgaaatttcagtgtctacccgattgacagtgctgcgggaggaccagatccctcgcgggttccccaccattgatatgggcccacaacttaaggtggtggaacgcacgcgcaccgctactatgctgtgtgcagcatccgggaaccccgacccagaaataacttggttcaaagacttcttacctgtagatacttccaataacaacggccgcattaaacaactgaggagcgagtctatcggggggacccctattaggggagcccttcagatagagcaatcagaagaaagcgatcagggaaagtatgaatgcgtggccaccaatagtgctgggacccggtactcggccccagctaacctctatgtacgcgaattacgggaggtgaggcgagtgcctccccggttttccattcccccaactaaccatgagattatgcctggcgggtcagtgaacattacttgcgtggcagtcgggtcaccaatgccttatgtgaaatggatgctcggcgccgaagacctgactcccgaggacgacatgccgataggtaggaacgttcttgagctgaatgatgtccgtcagtctgctaattacacttgtgttgcaatgagtacgctgggcgtgatagaggcaattgcccagatcacagtaaaagctctgccgaagcccccgggaaccccggtcgtgaccgagtccactgccaccagcatcaccctcacatgggacagtggcaatcccgagcctgtgtcatactacatcattcagcataagcctaaaaactctgaggagctctacaaagaaatcgatggggtggctaccacacggtatagcgtcgcaggcctgtcgccatactccgattacgagtttagggtggttgctgtgaacaacataggcagagggccccccagcgaacccgtgctcactcagacatccgagcaagccccttcctctgcaccacgcgacgtgcaggccaggatgctgagttccactactattctggtccagtggaaagaaccggaagagcccaacggccagatccagggttatcgcgtctactacaccatggatccaacccagcacgttaacaattggatgaaacacaacgtggcagactcccagataaccacaatcgggaatctagtgccacagaagacgtactcggtaaaagtcctcgccttcaccagcatcggtgatggccctctgagtagcgatatccaggtgatcactcaaaccggcgtgcctgggcaacctctaaattttaaagccgaaccggagtctgaaacctccatcctcctgagttggacgccccctcggtctgacacaattgccaactacgagctggtttacaaagacggggagcacggagaagaacaacgaattaccattgagccggggacctcttatcgcctccagggactcaagcccaactcgctttactattttcgcctcgctgctcgctccccccagggtctcggtgcttcaacagcagagatatccgcacggacaatgcaaagtaaaccttcagcccctcctcaagatatctcatgtacttcccctagctctaccagtatcttggtgtcatggcagccccccccagtggagaaacagaacggcattattactgaatatagcattaagtatacagccgtcgacggtgaagatgacaaacctcacgaaattctcggcatccctagtgataccactaaatatttattggagcagcttgaaaagtggactgagtatcgcattaccgttaccgctcataccgacgtcggaccaggccccgaaagtctttccgttttgatacgaacaaacgaggatgtcccctcaggtccgcctcggaaagtcgaggtagaggctgtgaactctacatctgtcaaggtcagctggcgctctccggtcccaaacaagcagcacgggcagatacgcgggtatcaggtccactatgtgcggatggaaaacggcgaacctaaaggccagccgatgctgaaggacgtcatgcttgcggatgcccagtgggaattcgacgacactactgaacatgatatgatcatttccgggctacagcccgaaaccagctatagccttaccgtgactgcttacaccactaaaggtgacggcgccaggagtaagccaaagttggtatctactactggagcagtgccaggtaagccccgtctggtcatcaaccatacccagatgaatacagcactgatccagtggcacccgcccgtggacacctttgggcccctccaaggctatcggctgaaatttggtcggaaggacatggaaccgttaacaaccctggaattctcagaaaaagaggaccattttaccgccaccgacattcataaaggcgcatcttacgttttccgactctctgcacggaacaaagtgggctttggcgaggaaatggtcaaggaaatttccataccagaggaggtgcccactggctttcctcagaatctgcatagtgagggaaccacttctacgtccgtacagctctcatggcaacctcccgtgctggccgagagaaatggcatcatcaccaagtatactctcctatatagggacatcaatatccccctgctcccgatggagcaacttatcgtccctgcggatacaacgatgactctgacaggtctaaagccggataccacatacgatgtaaaagtgcgggcccatacctcaaagggaccgggtccttattcgccaagcgtccagttccgcaccctcccggtggatcaggtgtttgctaagaattttcacgtcaaggccgtcatgaagacttcagtcctgctgagttgggagatcccagagaattataattccgccatgccctttaagatactgtacgatgatgggaagatggtggaggaggtggacggaagagccacacagaaactgatcgtcaacctcaaacctgagaagtcgtacagtttcgtcctgaccaaccgcgggaacagtgctggtgggctccagcatagagtgacagcaaagacagctccagacgtactccgaacaaaaccagcctttatcgggaaaacaaatttagacgggatgataacagtgcagctcccagaagtccctgcaaacgaaaatataaagggttattacattataatcgtcccgctcaagaagtcacgagggaaattcattaaaccatgggagtcgcccgacgagatggaactggatgagttgttaaaagagatctctagaaaaaggagatcgattaggtacggtcgggaagtagaactcaaaccctacatagctgcgcactttgacgtccttccaaccgaatttactctcggagacgacaaacactacggcggtttcacaaataagcaactgcagagtggacaggaatacgttttcttcgtgctggcggtcatggagcatgccgagagtaagatgtatgccacctccccgtactctgacccagtcgtctcaatggatcttgatccacagccaattaccgatgaggaagagggattgatttgggtagtcggtccggtgctggccgtggtatttataatctgcattgttatcgcgatcctgttgtataaacgcaaacgggcagagagcgactcgcggaagtcttcaatcccaaataacaaggagatcccctcacatcaccccactgatccagtggagttgagacgcctgaacttccaaacccctggcatggctagccacccgccaatccccatcctggaactggccgaccacatcgagcggctcaaagcgaacgataatcttaaattctcacaagaatatgagagcatcgatccaggacaacaattcacatgggaacattccaatctggaagtgaacaagcctaaaaacaggtatgccaatgtgatcgcctatgaccacagccgagtcctactttctgctattgaaggcatcccaggtagcgactacgtgaacgcgaattacatcgatgggtaccggaaacagaatgcctacatcgcaacccaaggtagcttgccagaaacgttcggcgatttctggcgcatgatttgggagcagcgttcagcaaccgtggtaatgatgactaaattggaggagaggtcccgtgtgaagtgcgatcaatattggcctagtaggggcaccgaaactcatggccttgtgcaggtgaccttgctggatacggtggaactcgccacttattgcgtcaggaccttcgcactttacaagaatgggagctccgagaagcgggaggtcagacagtttcagttcacagcatggccagaccatggagtgcctgaacaccccactccctttctggcattcctcagacgcgtgaaaacgtgtaatccacctgacgctggcccgatggtagttcattgcagcgcaggcgtgggcagaacaggatgctttatagttatagacgctatgctcgaacggatcaagcatgaaaaaacagtggacatttatggacacgttacgctgatgagagcacagcggaattacatggtgcagaccgaagaccaatacattttcatccatgacgcactgctagaggcagtgacttgtggcaatacagaagtgcccgctcgaaatttgtacgcttatattcagaaacttacccagatcgagacgggcgaaaatgttactggaatggagctggaatttaaacgactcgctagctcaaaagcccacacatcgagatttatctcagccaatctcccctgtaacaagttcaagaatcgccttgtgaatataatgccctatgaatccaccagggtctgcctgcagcccattcgaggggtggaggggtccgattatatcaacgcgtcattcattgatggctacagacaacagaaagcctatatcgccacgcagggtccgctcgccgaaactaccgaggacttctggcggatgctatgggagcacaattctaccatcgtggtgatgctgaccaaacttagagaaatgggacgcgaaaaatgccaccaatactggccagccgagcgctctgcccgttaccagtactttgtggtagacccgatggccgaatacaacatgcctcagtacatcttacgtgaatttaaagtgactgacgcaagagatggtcagtccaggaccgtgcgtcaattccaatttacagattggcccgaacagggggttccaaagagtggggagggcttcatcgattttattgggcaagtgcataaaaccaaggagcagttcggtcaggacgggccaatcagcgtccattgcagcgctggagttggcaggaccggagtgttcattactttatcaattgtgcttgaaaggatgaggtatgaaggcgtcgtcgacattttccagaccgtgaagatgctgaggactcaaagaccagctatggtccaaactgaggaccagtaccaattttcgtatcgagcagctctggaatatctgggatctttcgatcactacgccacatag

SEQ ID NO: 132597 - DNA, 5700 bp, Artificial Sequence
  derived and/or modified sequence
atggtgcatgtcgcaaggcttttgctcctgctgctaacattttttctccgcacagatgcagaaaccccaccaaggtttacgcgtaccccggtggaccaaacaggcgtgtcaggaggagtggcttcattcatctgtcaggctactggagaccctcgaccgaagatcgtctggaacaaaaaagggaagaaggtgagtaaccagcggtttgaggtcattgaatttgatgacgggagtggttccgtgctgagaatccaacctttgagaactccgagggacgaagcaatttacgagtgcgttgcttctaataacgtgggtgagatatcagtctctacccgccttacagtgctgcgggaagatcagattccccgaggttttccaactatcgacatggggccccagcttaaagtggtcgaaagaacaaggaccgccacaatgttgtgcgctgcaagtggaaacccagacccagagattacatggttcaaagatttcctgcccgtggatactagcaacaacaacggccgcataaagcagctacggtctggagcactccagattgaacaatctgaggaaagcgatcagggcaaatacgagtgtgtggccacgaactcggctggcactcggtatagcgctccagctaatctgtacgtgagagttcggcgtgtccctccacgcttttccattcctccaacaaaccatgagattatgccggggggcagcgtgaatattacgtgcgtggccgttggaagtcctatgccctatgtcaaatggatgttgggcgcagaagatctgacacctgaagacgatatgcccatcgggcggaacgtgctggagttaaatgacgttcgtcagagtgccaactacacgtgcgtcgccatgagcacactcggagtgatcgaagccattgcccagattactgtgaaagctttgcctaaacctccgggcacacccgttgtgacagagtctacagctactagcataactctgacttgggacagtggcaatccggaaccagtcagctattatatcatccagcacaagcccaagaactccgaagagctgtacaaagaaattgatggtgtggccacgactcgatattcagtggcaggcctcagcccctactccgattatgagttcagggtggttgccgtcaacaacataggccggggtccgccatctgaacccgtcctgacgcagaccagtgagcaggcaccatcttctgcgccgagagatgtacaagcacggatgctgtcatccacgaccatactagtgcaatggaaggaaccagaagaacccaacggacagatacaaggttatcgggtgtactacactatggatcccacccaacacgtcaacaattggatgaaacacaacgtggcagacagtcaaattaccaccatagggaatctcgttccccaaaaaacgtattcagtcaaagtgcttgcattcacatccatcggagacggacctttgagtagcgacattcaggtgatcacccagactggtgtgccaggccaacctctcaactttaaggcagaacccgagagcgagacttccatcctgctgtcatggactcctccacgttctgacaccatcgcaaactatgagctagtttacaaagacggcgagcacggggaggagcagaggattaccatcgaaccgggaacttcttacaggctgcaggggctgaaaccaaattcattgtattactttcgactcgccgcacgttctccacagggcctcggcgccagtaccgcggaaataagcgcaagaaccatgcagtcgaaaccttctgctccccctcaggacatctcttgcactagcccctcatccacaagcatccttgtttcctggcaaccgccccctgtggaaaagcaaaatgggataataaccgagtactctattaagtatacagccgttgatggtgaagatgataaaccccacgagatattaggaattccctccgatacaactaaatacctgctggaacagctcgagaaatggacggagtatcgtataactgtcacggctcacaccgatgtgggcccagggccagagtcattgtccgtgctaatccgtacaaatgaagatgtcccaagcggacctcccaggaaagtggaggtcgaggcggttaactctacatccgtgaaagtttcctggagatccccggtccctaacaaacagcacggccagatccgggggtaccaagttcattacgtccgcatggaaaacggcgaaccaaagggacagccaatgttgaaagacgtaatgttggctgatgcccagtgggaattcgacgacacaacagagcacgatatgatcatctctgggctgcagccggagacttcctacagcctgacggtgaccgcatatacaactaagggggatggcgcacgctcaaagcctaaactggtgagtactactggggctgtccctgggaaaccacgcctggtgatcaaccacacacagatgaatacagcactaattcaatggcatccccctgttgacacatttggcccattgcagggctacaggctgaaattcggcagaaaagacatggaaccacttactactttagagttctccgagaaggaggatcacttcacggccacggatatccacaagggcgcctcctacgtgttcaggttgtctgccagaaacaaagtcggatttggcgaggagatggtgaaagaaatatcgattcccgaagaggttcccaccggcttccctcagaatctgcattcagaggggacaacaagcaccagtgtgcagctcagttggcagcctcctgtcctggcagaacgcaacgggattatcaccaagtacacattgctttatcgagacatcaacatccctctgctacccatggagcagctgatagtacctgcagatactacaatgacactgactggcttgaagcctgatacaacttacgatgtaaaggttagggctcacacaagtaaaggcccaggcccctacagcccgtcagtgcagtttcgaacactgcctgtggaccaggtgttcgcaaagaacttccatgtgaaggctgttatgaagacaagtgtactgctgtcgtgggagattcctgagaattataactccgcaatgccctttaagatactctatgatgacggcaaaatggttgaagaggttgacggtcgggctacccagaagctcatagttaatcttaaacctgagaagagctattcattcgtcctgacgaacaggggaaatagtgcaggtggcttacaacaccgggtgaccgcaaagacagcacccgatgtcctgcggaccaaacctgccttcattgggaaaacaaacctggacggcatgatcacagttcagctgcctgaagtgccagcaaacgaaaatataaaggggtactatatcatcattgttcctctaaagaaatcacggggcaaattcattaaaccatgggaaagccccgatgagatggaactggacgaacttctgaaggagatatccaggaagaggaggagcatcaggtacggtcgggaagtcgaacttaaaccctatatagccgcacatttcgacgtgctccctactgagtttacactcggggatgacaagcactacggaggcttcactaacaagcagctccagagtggacaggagtacgtgttcttcgtgttggcggtgatggaacacgcagaaagcaaaatgtatgcaacgtccccgtacagtgatccggtggtgtcaatggatctcgacccacagcccattacggacgaagaggagggtcttatatgggtggttggcccagtccttgcggtggtattcatcatctgcattgtcattgccatattactttataaacggaagagggcagaatccgattctcgcaagtcaagtatcccgaataacaaggagattcccagtcaccatccaacagacccagtcgagctgagaagactgaactttcagactccagggatggcttcccacccgccaatccccatcttggagctggccgatcacatcgagaggctgaaagccaacgataatttgaagttttctcaggaatacgaaagcattgaccccggccagcagttcacatgggagcactcaaaccttgaagtgaacaagcccaaaaatcgatacgcaaatgtcattgcttatgatcacagcagagtgttactgagcgcaattgagggcatacctgggagcgattatgtgaatgccaattatattgacgggtatcgtaaacaaaatgcctacatagctacccagggctcattacccgagacctttggagatttctggaggatgatctgggagcagagaagtgctacagtggtgatgatgaccaagctggaggaaagatctcgagttaaatgtgatcaatactggccaagtagaggtacagagactcacgggctggttcaggtcacacttctggatactgtcgaactggctacctattgtgtgagaaccttcgctctgtacaaaaatggctctagtgagaaacgagaggtaaggcagttccagttcaccgcctggcctgatcacggcgtgcctgaacatccaactcctttcctggcatttctaagaagagtgaaaacctgtaatccacctgacgctggcccgatggtggtgcactgctctgccggagtaggccggacaggctgttttatcgtgattgatgccatgctggaaaggattaagcacgagaagacagtcgatatttatggccacgtgacgcttatgcgggcacaaaggaattacatggttcagaccgaggatcaatacatcttcattcatgatgctctcttggaggccgtgacttgcggcaatacagaagtgccagctcgcaacctttatgcctatatccagaagcttacgcaaatcgagacaggtgagaatgtgacaggcatggagctcgagttcaaaaggctcgcttcctctaaagctcacacaagcaggtttatctcggccaatttgccatgcaacaaatttaagaacaggcttgtgaatatcatgccctatgaatctaccagggtgtgcctgcaaccaatacgcggggtcgaaggatccgactacattaatgcttcttttattgacgggtatcggcagcagaaagcgtatattgccacgcaggggcccctggcagagactacagaggatttttggcgtatgctgtgggaacacaactccacaattgtggttatgctgaccaaattgcgggagatggggcgcgagaaatgccaccagtattggcctgctgagcggagcgctagataccagtattttgtggtggatcctatggcagagtacaatatgccccagtatatcctgcgcgagtttaaagttacagatgcacgagatggccagagccggacagtccgccaatttcagttcacggattggcccgagcaaggcgtccctaagagcggagagggcttcattgacttcatcgggcaggtgcacaagaccaaggagcagtttggacaggatggacctatctcagtccattgctccgccggggtggggagaacgggggtttttataactttgagcatcgtgctggagcgaatgcggtacgagggagtggtagacattttccagactgtgaagatgctgagaacacagcggcctgccatggtgcagactgaggatcagtaccagttcagctaccgcgccgctctggagtatctcggatccttcgaccattatgcgacctag

SEQ ID NO: 132598 - DNA, 5739 bp, Artificial Sequence
  derived and/or modified sequence
atggtccacgtggcccgtctcctcctgctgctgctaacgtttttccttaggacagacgctgagacgcctccaaggttcaccagaactcctgtagaccaaaccggggtttctggcggggttgcgagcttcatctgtcaggcgacaggcgacccacgacctaagatcgtatggaataagaagggaaagaaagtttcaaatcaacgattcgaagtcattgagttcgacgacggatctggatccgtgctgcgcatccaacctctgaggaccccacgagacgaggccatctatgaatgtgtggcttccaataacgtgggagagattagcgtctcaactagactgactgtgcttcgggaggatcagattccaaggggattccccacaatagacatgggccctcagctgaaagtggtggagcgtacacgtacagccaccatgctctgtgcagcctccggaaatccagacccggagatcacgtggttcaaggattttctccccgtggacactagcaacaacaacggcaggatcaaacagctgagaagtgagagtataggcggtacacccattagaggtgctctacaaatcgagcagagtgaagagtccgatcagggcaagtacgaatgtgtcgctaccaattccgccggtacacgctacagcgcacccgccaacctgtacgtccgagagcttcgcgaagtgaggagagtaccaccgagattctctatacccccaactaatcatgagataatgcccgggggctccgtgaacataacttgtgtggccgtaggctctccgatgccatatgttaaatggatgttgggggctgaagatctgacccccgaggatgatatgccaattggtcggaacgttctggagcttaacgatgtacgtcaatccgccaattacacctgcgtcgcaatgtcgaccttgggtgtcattgaagccatagcccaaattacagtgaaggctctgcccaagcccccagggaccccagtggtgaccgaaagcacagccaccagtatcaccctgacatgggattctggaaaccccgaacctgtttcctattatattatccagcataaaccaaaaaactctgaagagctgtacaaggagatagatggcgtcgcaacaacacggtatagcgttgccggcctttcaccttactctgactatgagttccgggtggtcgcggtgaataatattggaagggggcctccatctgagcccgtgctgacacagacatccgagcaggctccgagcagtgcgcctcgagacgtccaggcacgcatgctctcttctaccaccatcctggtacagtggaaagaacctgaagagccgaatggacagattcagggatatagggtctattacaccatggatccaactcagcacgtgaacaactggatgaagcataacgttgctgactctcagataacaacaatcggcaacctcgtgcctcagaagacttactccgtgaaagtgcttgcattcacatctataggagatggtccgctgtcttccgatatccaagtgatcacccaaacaggggttccagggcaacctctgaactttaaggccgaacccgaaagcgaaacgtcaatcttactgtcatggactccccctcggtccgataccatcgccaattacgaactggtgtataaagatggagagcatggcgaggagcagcgtattacaatagagccgggaacatcatatcggctacaggggttgaaacctaacagcttatattacttccggttggcagcccggtctcctcaaggactgggcgcatcgacagccgagatcagcgcgcggaccatgcagtccaaacccagcgcccccccccaggatatttcctgcacctcacctagcagcacaagcatcctcgtgagttggcaaccaccccccgttgaaaagcagaacggaataattacggaatactctattaaatatacagccgtagatggagaagacgataaaccccacgagatcctcggcatcccaagcgacaccaccaaatacctcctggaacaactcgagaagtggaccgagtatcgtattaccgtgacagcccatacagacgttggtccaggcccagaatcactatctgttcttataagaaccaacgaggatgttccaagcgggccgccccggaaagttgaggttgaagcggtgaattcaacatctgtcaaagtgagctggagatcgcccgtcccaaacaaacagcatggccagatcagaggctatcaggtgcattacgtgcgaatggagaatggtgagcctaaagggcaacccatgctgaaagatgtgatgttagccgatgctcagtgggagttcgatgacaccacagagcacgacatgatcatcagcggcctccaacccgaaacttcttatagccttactgtgaccgcttatactacgaagggagatggcgccaggtccaagcctaaactggtgtctacaactggcgccgtcccaggtaagcccagacttgttattaatcacactcagatgaacactgcactcattcagtggcatccacctgtggataccttcgggcccctccaggggtaccgcctaaaatttggaagaaaagacatggagccactcaccaccctggagttttccgagaaggaggatcatttcacagccaccgacattcacaagggcgcctcttatgtttttagactgtcagcgcggaacaaagtggggttcggggaagagatggtgaaggagatatccatccccgaggaggttcctaccggcttccctcagaaccttcactcagaggggacaaccagcactagcgtacagctgtcttggcaaccgcctgtgttggctgaacgtaacggtattataacaaagtacaccctcctttatcgcgatattaatatccctctactccccatggagcaattgatcgtcccagcggacacgactatgaccctgaccggactgaagcccgacacgacttatgacgtaaaagttcgggcgcacaccagtaagggcccagggccatactcaccatcagtgcaattcagaacgttacctgttgaccaggtctttgccaaaaattttcatgtcaaggccgtaatgaagaccagtgtgcttctctcttgggagatcccggaaaattacaacagcgcaatgccctttaagatcctctacgatgatggtaaaatggtggaagaggtggatggcagggccacccaaaaactcattgttaacttgaaacctgagaaatcttacagcttcgtgttaacaaataggggaaactctgcgggggggctgcagcatcgggttaccgccaagaccgcgccagatgtacttcgcacaaagccagctttcatcggaaagaccaaccttgacggtatgatcactgttcagctccccgaggtaccagcgaacgaaaatatcaagggctactatattatcattgtgcccctaaagaagagtagaggtaagtttataaaaccttgggaatctccagatgagatggaactggacgaactacttaaggagatctctaggaaacgacggagcattcggtacgggcgagaggtggagctgaaaccttacatagccgcacactttgatgtgcttccgacggagttcacacttggagatgataaacattacggcggtttcaccaataaacagttgcagtccgggcaggaatacgtgtttttcgtgctcgctgtaatggaacatgctgagtcaaagatgtacgcgacctcgccttacagcgacccagtggtatcgatggatctagatccacagcccatcaccgacgaagaagagggactgatatgggtagtcggaccggtgctcgccgtggtattcataatctgtattgtcatcgccatccttttatacaagcgaaagagagcagaaagtgactcacgcaaatcatcaatccctaacaataaagaaattccttcacaccatccaaccgaccccgtggagcttaggagactgaattttcaaacacccggcatggcttcacatccacctatacccatcttggaattagccgatcatatcgaaaggctgaaagcaaatgataatctgaaatttagtcaggagtatgagagcattgacccaggccaacagttcacatgggagcacagcaatctggaggtcaacaagcccaagaatagatacgccaacgtgattgcttatgatcattcacgcgtgcttctgagcgctatagagggaataccgggttctgattacgtcaacgcaaactatatcgacggctacaggaaacagaatgcttatatagcaacacaaggaagtctacctgaaacatttggggatttttggagaatgatctgggagcaaaggagcgctactgtggtcatgatgactaagctggaggagcggtctcgagttaagtgtgatcagtattggcccagccgcggcaccgagacacacggcctagtccaggttacgttgttggacacagtggaattggctacttactgcgtccggacattcgctttgtacaaaaacggctctagcgagaaacgcgaggttaggcaattccagtttacagcttggccagatcacggggtccctgaacaccccacccccttcctcgcttttctgaggcgagttaagacctgtaaccctcccgatgcagggccaatggtcgtgcattgctccgcaggagtgggaagaacgggttgttttatagtcatcgatgcaatgctcgagagaataaagcacgaaaagacagtagacatttacgggcatgtcaccctgatgcgagcccagagaaactacatggtgcagaccgaggatcagtatatattcatccatgatgcactcctcgaagcagtgacctgtgggaatacagaagtgcccgcccgaaacctgtatgcctatatccagaaacttacacagatagagacaggagaaaatgtgacaggtatggagctggaattcaagcgcctggcctcgtccaaagcacatacttcacggttcatcagtgcgaatctcccatgcaacaagtttaagaatcgcctcgttaatattatgccctacgaatcgacgcgcgtgtgcttacagccaattcgcggcgtggaggggtcagactatatcaacgctagcttcatcgatggatacagacagcagaaggcatatatcgccacccagggcccattggctgagaccactgaagacttttggaggatgctgtgggaacataacagcactattgtggtaatgctgaccaaattgcgcgaaatggggcgggagaagtgccaccaatattggcctgctgagagatcagccaggtaccagtactttgtggtcgatcctatggccgagtacaatatgcctcaatacatcttaagagaatttaaagtcacagacgccagagatggccagtctcgcaccgtgcggcagtttcagtttaccgattggccagagcaaggcgtgccaaaatcaggcgaaggatttattgatttcattggccaggtgcacaaaaccaaagagcaattcggtcaggatggccctatctctgtgcattgctcagcaggagttggccggacaggagttttcataacattgtcaatagtgttagagcgaatgagatatgagggagtggttgatatcttccagactgtgaagatgctcaggacacagcggccggcaatggttcagactgaggatcagtatcaattcagttatcgcgctgccctagaatatctcggcagcttcgatcactacgccacatag

SEQ ID NO: 132599 - DNA, 5739 bp, Artificial Sequence
  derived and/or modified sequence
atggtgcatgtggccagattactactcttactgctaacattcttcctacggactgatgctgagacacccccccgttttaccagaaccccagtggatcaaacgggggtgtctggtggggtggcttcgttcatctgccaggccaccggggacccacgccccaaaatcgtctggaacaagaagggtaaaaaggtctcgaaccagcgttttgaggtgatcgagttcgatgatggctccggatccgtcctgagaatccagccgctcaggacaccccgcgacgaagctatttatgaatgtgttgcatccaataacgttggtgagatttcggtgagcacacgtctgactgtgttacgcgaggaccagattccgagaggctttcccacaatcgacatgggacctcaactgaaggttgtggaacgcacacggaccgctactatgttatgtgccgcctcaggcaaccccgatccagaaatcacttggttcaaggatttcttaccagtggacaccagcaacaataatggacgaattaagcagctgcgctccgagagtataggcggaacccccattcgcggcgcgctgcagatcgaacagagcgaagagtctgaccaaggaaagtacgagtgtgttgctacaaattcagccggaacgaggtattccgctcccgctaacctgtatgtgcgcgaactgagagaggtgcggcgggtgccgcctaggttttccatcccccctacaaaccatgagatcatgcctggtgggagcgttaacatcacttgtgtggctgtgggatcccctatgccttacgtgaaatggatgcttggggccgaggatcttacacccgaggatgacatgccaatcggccgcaatgttctcgagttgaacgatgtgcggcagtcggcaaactacacctgcgtcgccatgagcacactgggtgttattgaggcaatagcccagatcaccgttaaagccctgccaaaaccgccaggtactcccgtcgtcactgaatcaaccgcaactagtatcaccctgacctgggactccggcaaccccgagcccgtatcctattatatcatacaacacaaacccaagaatagcgaggagctgtacaaggaaattgacggtgtggcaaccacccgctattcagtcgccgggctgtccccctattctgactatgagtttcgggttgtggcagtgaacaatatcggcagagggcctcctagcgaacccgtgctgacacagacaagcgaacaggccccatcctccgctccgagagatgtgcaggcgcgcatgcttagcagcacaaccattttggtgcagtggaaagagcctgaagagccgaatggacaaatccagggatacagagtttactacaccatggaccctacgcagcatgtgaacaactggatgaaacacaatgttgcggactcgcagattactaccatcgggaatctcgtgcctcagaagacatatagcgtaaaagttcttgcatttacatccataggagatggccccctcagttcagacattcaggttatcacccaaacaggggtccctggacagcctctaaacttcaaggccgaaccagagagcgagactagcatcttgctatcgtggacacctccacgcagtgatacaattgccaattatgaactcgtatataaagatggcgaacacggcgaagaacagagaattacaatcgagcctggtacatcatataggctgcaggggctcaaacctaatagcctgtactactttcgccttgcagccaggtcacctcagggcctgggcgcctcaaccgccgagatcagcgctagaacaatgcaaagtaaaccctccgccccaccacaggacatttcttgcacatcaccttcttccactagtatcttagtttcgtggcagcctccccctgttgaaaaacagaatggaatcatcactgaatattctattaagtacaccgctgttgatggcgaggacgataagccacacgaaatcttggggatccctagtgataccactaaatatttacttgaacaactcgaaaagtggaccgaatatcgaatcaccgtcaccgcccatactgatgtcggacccggaccggagtccttatcagttctgattcgaaccaacgaagacgtgcccagtgggccaccgagaaaggtcgaagtggaggcagtgaattccacaagcgtcaaagtctcttggcggagtccagtgccaaacaaacaacacggacagattcgcggctaccaggtgcactacgtccgtatggaaaacggagagccaaagggccagcctatgcttaaagatgtgatgctggctgatgcccaatgggagtttgacgatacaactgaacacgatatgatcattagtggtctccagccggagacttcttattctctgaccgtgactgcatataccactaaaggtgatggagcccgttctaagcctaaactcgtcagtactacgggcgccgtacccggtaagcccagacttgttattaaccacactcagatgaacaccgctctgattcagtggcaccccccagtggacaccttcgggccattgcagggctatagactgaagtttggaagaaaagatatggagcctcttactacactggaattctctgagaaggaggaccatttcaccgccactgatatccataagggcgcctcatacgtcttccgactttcagcccgcaataaggtcggttttggggaagagatggttaaagagatctcaatacctgaagaagttcccactggattcccccaaaatctgcattcagaagggacaacttccacctccgtgcagctgagttggcagcctccagttctcgccgagaggaatggaatcatcaccaaatatactttgctctaccgcgatattaacatccctctcctgcccatggagcagctgatagtaccagcagatactaccatgactctgactggcctgaaaccagataccacctatgacgtgaaggtgagagctcatacctctaagggaccaggtccctactcaccaagtgtgcaattccggacgctgcccgtggatcaggtgtttgcaaaaaactttcacgtcaaagctgtgatgaaaaccagcgtcctgctctcgtgggagatcccggaaaattacaactccgcaatgccatttaagattctgtatgacgatggcaaaatggtagaagaggtcgacggccgggcaacccagaaactgattgtcaatctgaaacccgagaaaagctattcatttgttctaacgaaccgcggtaactccgccggaggtcttcagcaccgcgttactgctaagaccgctccggacgtgctgcgtaccaaaccggcgttcatcggcaagacaaaccttgacggaatgattacagtgcagctcccagaggtcccagctaatgaaaatatcaaaggatattacatcattattgtgcccctgaaaaagtctcgagggaagtttatcaagccctgggaatcacctgatgagatggagctggatgaacttctcaaggaaatttctcgcaaaagacggtccatacgctacggcagagaggttgagctgaaaccctacattgccgcccacttcgatgtgctgccaactgagtttactctgggggacgacaagcactatggaggtttcaccaacaaacaactgcagtccggacaggaatacgttttctttgtcttagccgtcatggaacatgccgagagcaagatgtatgccactagtccgtactcagaccctgttgttagtatggatctggacccacagccaatcaccgacgaagaggagggactaatctgggtcgtgggccccgtcttggccgtggtcttcattatctgcattgtgattgccatcctgttatacaagaggaagcgcgccgaatcggactcaagaaaatctagcatccccaacaataaggaaattccctcacatcatccaaccgacccagtcgaattgagacggcttaactttcagacacctggtatggcttctcacccaccgatcccgattctcgaacttgccgaccacattgagcggctgaaagccaacgacaatctgaaattcagccaagagtacgaatcaatcgatcctgggcagcaatttacctgggaacactcgaatcttgaagttaataaaccaaagaaccggtacgcaaatgtgattgcctacgatcactctcgagttctcctaagtgcaatcgaaggcattcccggctccgattatgtgaacgccaactatatcgatggctatcgcaaacaaaacgcatacattgcaacccagggaagccttcctgaaacgttcggagacttttggcggatgatttgggaacagaggagcgccacagtggtgatgatgacaaagctagaagagaggtcacgcgtcaagtgtgaccagtattggcccagccggggcacagaaacccacggattggtacaagtgactctgctggacacagtggagctcgcaacctactgtgttagaacgtttgctctctataagaacggctccagtgaaaagagggaggtgagacagttccagttcacagcctggcctgaccacggtgtgccggagcatcctacaccctttcttgcctttctgcggagggtcaagacttgcaaccctcctgacgctgggcccatggtggtgcactgcagcgccggcgtcggcagaaccgggtgtttcattgtgatcgatgccatgctagaaaggattaaacatgagaagaccgtagatatttatggacacgtcacattgatgcgagcacagcgcaactacatggttcagactgaggatcaatacatcttcatacacgatgccctgctggaggctgtcacctgcggaaacactgaagtaccagccaggaatctgtacgcctatattcagaaactgacacagattgagaccggagagaatgtcactggtatggaactggagtttaaacgcttggcgtcctctaaggcacacacgtctagattcatatccgcaaatctgccgtgcaataaattcaaaaataggcttgtgaacattatgccatatgaatctacccgtgtttgccttcagcccatcagaggcgtggagggaagtgactatatcaatgcgtcttttattgatgggtatcggcagcagaaggcatacattgccacccaggggcctttggccgaaaccacggaagacttctggaggatgctttgggaacacaattctaccattgtggtcatgcttacaaagctgcgtgagatggggagagaaaagtgtcaccaatactggcctgcagaacggagcgcccgctaccaatacttcgtcgtggacccaatggccgaatataacatgccccagtacatcctgagagagtttaaagttaccgatgcgcgggacggacagtctaggacagtccgccagttccaattcaccgattggcccgagcagggagtacccaagtctggggaggggttcattgatttcatcggtcaagtgcataagactaaagagcaatttggccaagacgggcccatctctgttcattgcagtgccggcgtgggtagaacaggtgtgttcattaccctgtccatcgtcctcgaaagaatgagatatgaaggcgtggtggacatctttcagacagtcaagatgttaaggactcagagaccagcgatggtccagacagaggaccagtaccaattctcctatcgtgcagcgctggagtacctgggctctttcgatcattacgcaacgtag

SEQ ID NO: 132600 - DNA, 5739 bp, Artificial Sequence
  derived and/or modified sequence
atggtgcacgtggcccggctgctgctgctgctgctgaccttcttcctgaggacagatgctgagaccccaccccgcttcaccaggacccctgtggaccagacaggagtgtctggaggagtggccagcttcatctgccaggccaccggggacccccggcccaagatcgtgtggaacaagaagggcaagaaggtgagcaaccagagatttgaagtcatcgagtttgatgatggcagcggctctgtgctgcgcatccagcccctgcggaccccaagagatgaggccatctatgaatgtgtggccagcaacaacgtgggggagatctctgtgtccacccggctgactgtgctgcgggaggaccagatcccccggggcttccccaccatcgacatgggcccccagctgaaggtggtggagaggaccaggacagccaccatgctgtgtgccgccagcggcaacccagaccctgagatcacctggttcaaggacttcctgcctgtggacaccagcaacaacaacggccgcatcaagcagctgcggtctgagagcattggaggcacccccatccggggggccctgcagatcgagcagagcgaggagagtgaccagggcaagtatgaatgtgtggccaccaacagcgctggcacccgctacagcgccccagccaacctgtatgtgcgggagctgcgggaggtgcggcgggtgcccccacgcttcagcatcccccccaccaaccacgagatcatgcctgggggctctgtgaacatcacctgtgtggccgtgggcagccccatgccctacgtgaagtggatgctgggcgctgaggacctgaccccagaagatgacatgcccatcggcagaaatgtgctggagctgaatgatgtgcggcagagcgccaactacacctgtgtggccatgagcaccctgggcgtgattgaggccatcgcccagatcaccgtgaaggccctgcccaagcccccaggcacccctgtggtgacagagagcacagccaccagcatcaccctgacctgggacagcggcaaccctgagcctgtgtcctactacatcatccagcacaagcccaagaacagcgaggagctgtacaaggagattgatggagtggccaccacccgctacagcgtggccggcctgagcccctacagcgactatgagttccgggtggtggccgtgaacaacatcggccggggccccccatctgagcctgtgctgacccagaccagcgagcaggcccccagcagcgcccccagagatgtgcaggccaggatgctgagcagcaccaccatcctggtgcagtggaaggagcctgaggagcccaacggccagatccagggctacagagtgtactacaccatggaccccacccagcacgtgaacaactggatgaagcacaacgtggccgacagccagatcaccaccatcggcaacctggtgccccagaagacctacagcgtgaaggtgctggccttcaccagcattggagatggccccctgagcagtgacatccaggtgatcacccagacaggagtgcccggccagcccctgaacttcaaggccgagcctgagagcgagaccagcatcctgctgtcctggaccccacccaggagtgacaccatcgccaactatgagctggtgtacaaggatggagagcacggggaggagcagaggatcaccatcgagcccggcaccagctaccgcctgcagggcctgaagcccaacagcctgtactacttccggctggccgcccggagcccccagggcctgggcgccagcacagctgagatcagcgcccggaccatgcagagcaagcccagcgccccaccccaggacatcagctgcaccagccccagcagcaccagcatcctggtgtcctggcagcccccacctgtggagaagcagaatggcatcatcacagagtacagcatcaagtacacagctgtggatggagaagatgacaagccccatgagatcctgggcatccccagcgacaccaccaagtacctgctggagcagctggagaagtggacagagtaccgcatcaccgtgacagcccacacagatgtgggccctggccctgagagcctgtctgtgctgatccgcaccaatgaagatgtgcccagcggcccccccaggaaggtggaggtggaggccgtgaacagcacctctgtgaaggtgtcctggaggagccctgtgcccaacaagcagcacggccagatccggggctaccaggtgcactacgtgaggatggagaatggagagcccaagggccagcccatgctgaaggatgtgatgctggctgatgcccagtgggagtttgatgacaccacagaacatgacatgatcatcagcggcctgcagcctgagaccagctacagcctgactgtgacagcctacaccaccaagggagatggagcccggagcaagcccaagctggtgtccaccaccggggctgtgcctgggaagccccggctggtgatcaaccacacccagatgaacacagccctgatccagtggcacccccctgtggacaccttcggccccctgcagggctaccgcctgaagtttggaaggaaggacatggagcccctgaccaccctggagttcagcgagaaggaggaccacttcaccgccacagacatccacaagggggccagctatgtgttccggctgagcgccaggaacaaggtgggctttggagaggagatggtgaaggagatcagcatccctgaggaggtgcccaccggcttcccccagaacctgcacagcgagggcaccaccagcacctctgtgcagctgtcctggcagccccctgtgctggccgagagaaatggcatcatcaccaagtacaccctgctgtacagagacatcaacatccccctgctgcccatggagcagctgattgtgcctgctgacaccaccatgaccctgaccggcctgaagccagacaccacctatgatgtgaaggtgcgggcccacaccagcaagggccctggcccctacagccccagcgtgcagttccgcaccctgcctgtggaccaggtgtttgccaagaacttccacgtgaaggctgtgatgaagacctctgtgctgctgtcctgggagatccctgagaactacaacagcgccatgcccttcaagatcctgtatgatgatggcaagatggtggaggaggtggatggccgggccacccagaagctgattgtgaacctgaagccagagaagagctacagctttgtgctgaccaacagaggcaacagcgctgggggcctgcagcaccgggtgacagccaagacagccccagatgtgctgcggaccaagccagccttcatcggcaagaccaacctggatggcatgatcaccgtgcagctgcctgaggtgcctgccaatgaaaacatcaagggctactacatcatcatcgtgcccctgaagaagagccggggcaagttcatcaagccctgggagagcccagatgagatggagctggatgagctgctgaaggagatcagcaggaagagaagaagcatccgctatggccgggaggtggagctgaagccctacatcgccgcccactttgatgtgctgcccacagagttcaccctgggagatgacaagcactatggaggcttcaccaacaagcagctgcagagcggccaggagtatgtgttctttgtgctggccgtgatggagcacgccgagagcaagatgtatgccaccagcccctacagcgaccctgtggtgtccatggacctggacccccagcccatcacagatgaggaggagggcctcatctgggtggtgggccctgtgctggccgtggtgttcatcatctgcatcgtgattgccatcctgctgtacaagaggaagagagctgagagtgacagcaggaagagcagcatccccaacaacaaggagatccccagccaccaccccacagatcctgtggagctgcggcggctgaacttccagaccccaggcatggccagccacccccccatccccatcctggagctggccgaccacatcgagcggctgaaggccaatgacaacctgaagttcagccaggagtatgagagcattgaccccggccagcagttcacctgggagcacagcaacctggaggtgaacaagcccaagaacagatatgccaacgtcatcgcctatgaccacagccgggtgctgctgagcgccatcgagggcatccctggcagtgactatgtgaatgccaactacattgatggctacaggaagcagaatgcctacatcgccacccagggcagcctgcctgagaccttcggggacttctggaggatgatctgggagcagaggtctgccaccgtggtgatgatgaccaagctggaggagaggagccgggtgaagtgtgaccagtactggcccagccggggcacagagacccacggcctggtgcaggtgaccctgctggacacagtggagctggccacctactgtgtgaggacctttgccctgtacaagaatggcagcagcgagaagcgggaggtgcggcagttccagttcaccgcctggccagaccacggcgtgcctgagcaccccacccccttcctggccttcctgcggcgggtgaagacctgcaaccccccagatgctggccccatggtggtgcactgcagcgctggggtgggccgcacaggctgcttcatcgtgattgatgccatgctggagcgcatcaagcatgagaagacagtggacatctacggccacgtgaccctgatgagggcccagaggaactacatggtgcagacagaggaccagtacatcttcatccatgatgccctgctggaggccgtgacctgtggcaacacagaggtgcctgccaggaacctgtatgcctacatccagaagctgacccagattgaaacaggagaaaatgtgacaggcatggagctggagttcaagaggctggccagcagcaaggcccacaccagccgcttcatcagcgccaacctgccctgcaacaagttcaagaaccggctggtgaacatcatgccctatgagagcaccagggtgtgcctgcagcccatccggggcgtggagggcagtgactacatcaatgccagcttcattgatggctaccggcagcagaaggcctacatcgccacccagggccccctggccgagaccacagaggacttctggaggatgctgtgggagcacaacagcaccatcgtggtgatgctgaccaagctgcgggagatgggccgggagaagtgccaccagtactggccagctgagaggtctgcccgctaccagtactttgtggtggaccccatggccgagtacaacatgccccagtacatcctgcgggagttcaaggtgacagatgccagagatggccagagcaggacagtgcggcagttccagttcacagactggccagagcagggcgtgcccaagagcggggagggcttcatcgacttcatcggccaggtgcacaagaccaaggagcagtttggccaggacggccccatctctgtgcactgcagcgctggggtgggccgcactggagtcttcatcaccctgagcatcgtgctggagaggatgagatatgagggcgtggtggacatcttccagacagtgaagatgctgcggacccagaggcctgccatggtgcagacagaggaccagtaccagttctcctacagagctgccctggagtacctgggcagctttgaccactacgccacctag

SEQ ID NO: 132601 - DNA, 5700 bp, Artificial Sequence
  derived and/or modified sequence
atggtgcacgtggcccggctgctgctgctgctgctgaccttcttcctgaggacagatgctgagaccccaccccgcttcaccaggacccctgtggaccagacaggagtgtctggaggagtggccagcttcatctgccaggccaccggggacccccggcccaagatcgtgtggaacaagaagggcaagaaggtgagcaaccagagatttgaagtcatcgagtttgatgatggcagcggctctgtgctgcgcatccagcccctgcggaccccaagagatgaggccatctatgaatgtgtggccagcaacaacgtgggggagatctctgtgtccacccggctgactgtgctgcgggaggaccagatcccccggggcttccccaccatcgacatgggcccccagctgaaggtggtggagaggaccaggacagccaccatgctgtgtgccgccagcggcaacccagaccctgagatcacctggttcaaggacttcctgcctgtggacaccagcaacaacaacggccgcatcaagcagctgcggagcggggccctgcagatcgagcagagcgaggagagtgaccagggcaagtatgaatgtgtggccaccaacagcgctggcacccgctacagcgccccagccaacctgtatgtgcgggtgagaagagtgcccccacgcttcagcatcccccccaccaaccacgagatcatgcctgggggctctgtgaacatcacctgtgtggccgtgggcagccccatgccctacgtgaagtggatgctgggcgctgaggacctgaccccagaagatgacatgcccatcggcagaaatgtgctggagctgaatgatgtgcggcagagcgccaactacacctgtgtggccatgagcaccctgggcgtcatcgaggccatcgcccagatcaccgtgaaggccctgcccaagcccccaggcacccctgtggtgacagagagcacagccaccagcatcaccctgacctgggacagcggcaaccctgagcctgtgtcctactacatcatccagcacaagcccaagaacagcgaggagctgtacaaggagattgatggagtggccaccacccgctacagcgtggccggcctgagcccctacagcgactatgagttccgggtggtggccgtgaacaacatcggccggggcccccccagcgagcctgtgctgacccagaccagcgagcaggcccccagcagcgcccccagagatgtgcaggccaggatgctgagcagcaccaccatcctggtgcagtggaaggagcctgaggagcccaacggccagatccagggctacagagtgtactacaccatggaccccacccagcacgtgaacaactggatgaagcacaacgtggccgacagccagatcaccaccatcggcaacctggtgccccagaagacctacagcgtgaaggtgctggccttcaccagcattggagatggccccctgagcagtgacatccaggtgatcacccagacaggagtgcccggccagcccctgaacttcaaggccgagcctgagagcgagaccagcatcctgctgtcctggaccccacccaggagtgacaccatcgccaactatgagctggtgtacaaggatggagaacatggagaggagcagaggatcaccatcgagcccggcaccagctaccgcctgcagggcctgaagcccaacagcctgtactacttccggctggccgcccggagcccccagggcctgggcgccagcacagctgagatcagcgcccggaccatgcagagcaagcccagcgccccaccccaggacatcagctgcaccagccccagcagcaccagcatcctggtgtcctggcagcccccacctgtggagaagcagaatggcatcatcacagagtacagcatcaagtacacagctgtggatggagaagatgacaagccccatgagatcctgggcatccccagcgacaccaccaagtacctgctggagcagctggagaagtggacagagtaccgcatcaccgtgacagcccacacagatgtgggccctggccctgagagcctgtctgtgctgatccgcaccaatgaagatgtgcccagcggcccccccaggaaggtggaggtggaggccgtgaacagcacctctgtgaaggtgtcctggaggagccctgtgcccaacaagcagcacggccagatccggggctaccaggtgcactacgtgaggatggagaatggagagcccaagggccagcccatgctgaaggatgtgatgctggctgatgcccagtgggagtttgatgacaccacagaacatgacatgatcatcagcggcctgcagcctgagaccagctacagcctgactgtgacagcctacaccaccaagggagatggagcccggagcaagcccaagctggtgtccaccactggagctgtgcctgggaagccccggctggtgatcaaccacacccagatgaacacagccctgatccagtggcacccccctgtggacaccttcggccccctgcagggctaccgcctgaagtttggaaggaaggacatggagcccctgaccaccctggagttcagcgagaaggaggaccacttcaccgccacagacatccacaagggggccagctatgtgttccggctgagcgccaggaacaaggtgggctttggagaggagatggtgaaggagatcagcatccctgaggaggtgcccaccggcttcccccagaacctgcacagcgagggcaccaccagcacctctgtgcagctgtcctggcagccccctgtgctggccgagagaaatggcatcatcaccaagtacaccctgctgtacagagacatcaacatccccctgctgcccatggagcagctgattgtgcctgctgacaccaccatgaccctgaccggcctgaagccagacaccacctatgatgtgaaggtgcgggcccacaccagcaaaggacctggcccctacagccccagcgtgcagttccgcaccctgcctgtggaccaggtgtttgccaagaacttccacgtgaaggctgtgatgaagacctctgtgctgctgtcctgggagatccctgagaactacaacagcgccatgcccttcaagatcctgtatgatgatggcaagatggtggaggaggtggatggccgggccacccagaagctgattgtgaacctgaagccagagaagagctacagctttgtgctgaccaacagaggcaacagcgctgggggcctgcagcaccgggtgacagccaagacagccccagatgtgctgcggaccaagccagccttcatcggcaagaccaacctggatggcatgatcaccgtgcagctgcctgaggtgcctgccaatgaaaacatcaagggctactacatcatcatcgtgcccctgaagaagagccggggcaagttcatcaagccctgggagagcccagatgagatggagctggatgagctgctgaaggagatcagcaggaagaggaggagcatccgctatggccgggaggtggagctgaagccctacatcgccgcccactttgatgtgctgcccacagagttcaccctgggagatgacaagcactacggcggcttcaccaacaagcagctgcagagcggccaggagtatgtgttctttgtgctggccgtgatggagcacgccgagagcaagatgtatgccaccagcccctacagcgaccctgtggtgtccatggacctggacccccagcccatcacagatgaggaggagggcctcatctgggtggtgggccctgtgctggccgtggtgttcatcatctgcatcgtcatcgccatcctgctgtacaagaggaagagagctgagagtgacagcaggaagagcagcatccccaacaacaaggagatccccagccaccaccccacagatcctgtggagctgcggcggctgaacttccagaccccaggcatggccagccacccccccatccccatcctggagctggccgaccacatcgagcggctgaaggccaatgacaacctgaagttcagccaggagtatgagagcattgatcctggccagcagttcacctgggagcacagcaacctggaggtgaacaagcccaagaacagatatgccaacgtgattgcctatgaccacagccgggtgctgctgagcgccatcgagggcatccctggcagtgactatgtgaatgccaactacattgatggctacaggaagcagaatgcctacatcgccacccagggcagcctgcctgagacctttggagacttctggaggatgatctgggagcagaggtctgccaccgtggtgatgatgaccaagctggaggagaggagccgggtgaagtgtgaccagtactggcccagccggggcacagagacccacggcctggtgcaggtgaccctgctggacacagtggagctggccacctactgtgtgaggacctttgccctgtacaagaatggcagcagcgagaagcgggaggtgcggcagttccagttcaccgcctggccagaccatggagtgcctgagcaccccacccccttcctggccttcctgcggcgggtgaagacctgcaaccccccagatgctggccccatggtggtgcactgcagcgctggggtgggccgcacaggctgcttcatcgtgattgatgccatgctggagcgcatcaagcatgagaagacagtggacatctacggccacgtgaccctgatgagggcccagaggaactacatggtgcagacagaggaccagtacatcttcatccatgatgccctgctggaggccgtgacctgtggcaacacagaggtgcctgccaggaacctgtatgcctacatccagaagctgacccagatcgagaccggggagaatgtgacaggcatggagctggagttcaagaggctggccagcagcaaggcccacaccagccgcttcatcagcgccaacctgccctgcaacaagttcaagaaccggctggtgaacatcatgccctatgagagcaccagggtgtgcctgcagcccatccggggcgtggagggcagtgactacatcaatgccagcttcattgatggctaccggcagcagaaggcctacatcgccacccagggccccctggccgagaccacagaggacttctggaggatgctgtgggagcacaacagcaccatcgtggtgatgctgaccaagctgcgggagatgggccgggagaagtgccaccagtactggccagctgagaggtctgcccgctaccagtactttgtggtggaccccatggccgagtacaacatgccccagtacatcctgcgggagttcaaggtgacagatgccagagatggccagagcaggacagtgcggcagttccagttcacagactggccagagcagggcgtgcccaagtctggagagggcttcatcgacttcatcggccaggtgcacaagaccaaggagcagtttggccaggacggccccatctctgtgcactgcagcgctggggtgggccgcactggagtcttcatcaccctgagcatcgtgctggagaggatgagatatgaaggagtggtggacatcttccagacagtgaagatgctgcggacccagaggcctgccatggtgcagacagaggaccagtaccagttctcctaccgggccgccctggagtacctgggcagctttgaccactacgccacctag

SEQ ID NO: 132602 - DNA, 5739 bp, Artificial Sequence
  derived and/or modified sequence
atggtgcacgtggcccggctgctgctgctgctgctgaccttcttcctacgaaccgatgcggagactccacctcggttcaccagaacacccgtcgaccagaccggagtgtccgggggggttgcaagctttatttgccaggcaacaggggatccaagacctaagattgtgtggaataagaaagggaaaaaggtttccaatcagcggttcgaggtaatcgagtttgacgacggaagcgggtccgtactccggattcagcctctgaggaccccacgggacgaggctatttatgagtgcgtggccagtaataacgtcggggagatctctgtgagcaccaggcttaccgtgctgagggaggaccagatacctagagggtttcctaccattgacatgggccctcaactgaaagttgttgaacgtaccagaacagccactatgctgtgtgccgcatccggcaaccccgaccctgagataacttggtttaaagactttctgccagtggatacttctaataataatggacgaataaagcagttgagatccgaatcgatcggtggcacccctattcgcggagcactgcagatcgaacaatccgaagaaagtgatcaaggtaagtatgaatgtgttgccactaatagcgccggaacaagatacagcgcaccagcgaatttgtatgtgcgtgaactgcgcgaggttcgtagagtgcctccccgcttctcaatcccccccacaaaccacgaaatcatgccgggaggcagcgtcaacataacgtgcgtggccgtcgggagtccaatgccatatgttaagtggatgttgggggctgaagatctgacgccagaggacgacatgccgattgggcgcaatgttctcgagcttaacgacgtgaggcagtcagcaaactatacatgcgtcgctatgagcaccttgggtgtcatcgaagctatcgcccaaataacagtgaaagctctgccaaagccacccggcacccccgtcgttaccgagagtactgcaacctccataacacttacctgggacagtggaaaccccgaaccagtgtcatactatatcatacagcacaagcccaaaaattccgaagagctgtataaggagatcgatggagtcgcaactacccgttatagcgtggcaggattatctccttactccgattacgagtttagggtcgtggcggtgaacaacattggccgcgggcccccgagtgagcccgtgctgacccaaaccagtgaacaggcaccgagctccgccccgagagacgtgcaggccaggatgctctcttccactaccattctggtgcaatggaaggagcccgaagaaccgaacggtcagattcaaggctatcgggtatattacaccatggaccctactcagcatgtgaataattggatgaagcataacgtagccgactctcaaataaccactatcggaaacctggttcctcagaaaacatatagtgtgaaggtactagcctttacatcaataggggatggacccctcagctctgatatccaggttattacccagacaggggtaccaggacagcctcttaatttcaaggccgagcccgagagcgaaacatctatacttttatcctggaccccccctcggtctgatactatcgcaaactacgaactcgtgtacaaagacggcgagcacggggaggaacagcggatcaccatagagccgggaacatcctacaggctgcagggacttaagcctaattccctttattactttcggcttgcagcacggagtccacagggattgggtgcaagcacagccgagatttctgctaggaccatgcagtccaagcctagcgctccaccccaggacatatcctgcaccagtccgtcatcaaccagcattttagtatcgtggcaacctcctccagtcgaaaagcagaatggtatcatcactgagtacagcatcaaatacactgccgttgacggcgaagacgacaaacctcacgaaatcctgggaatcccctcggatacaactaagtacctgctggaacagctggagaaatggaccgagtaccgaattacagtgacagcccacaccgatgtgggccccggccccgaatcattatccgtcctcattcgaacgaacgaagacgtgcctagtggacctccccggaaggtggaggtggaagccgttaacagcacctcagttaaagtgtcgtggcgctcccccgttccaaataaacagcacggccagattcgcgggtatcaggtccattacgtacggatggagaatggcgaacccaagggtcagccaatgctgaaggatgtgatgctagcagacgctcagtgggagtttgacgatacaacagaacacgacatgataatctccggcttgcagccagaaacgtcctactccctgacagtgacagcatacaccacgaagggcgacggcgcaaggagtaaacccaagctcgtttctacaaccggggccgtcccagggaagccccgcctggtaattaatcatactcagatgaacactgccttgattcaatggcatccacctgtagacacctttgggccactccagggttatcgcctgaagttcggccggaaggacatggaaccgttaacaacattggaattttccgagaaggaagatcatttcaccgcaaccgatattcataagggggctagctacgtgtttaggctgtctgcaaggaacaaagtggggtttggtgaagagatggtgaaagaaattagtatccccgaggaagtcccaacaggatttccacaaaatctgcactcagagggaaccactagcacctcagttcagttgagctggcagcctcctgtcctcgccgaacggaatggtatcataacaaaatacaccctgctgtacagagatataaacataccactcctgcccatggagcagcttattgtgccagcggacacaactatgactctgaccggactgaaacccgataccacttatgacgtgaaggtccgtgcccataccagcaaggggcccggcccttatagccccagcgtccagttccgcaccttgcctgttgaccaagtgttcgccaaaaatttccacgtgaaggccgtgatgaagacctccgtcttattgtcgtgggaaatccctgagaactacaattccgccatgcctttcaaaatcctgtacgatgacggaaaaatggttgaagaagtggatggtagagctactcagaagttgattgttaacctgaaaccggagaagtcctactcttttgtgttaacgaacagagggaactctgcaggagggcttcagcaccgggtgaccgcgaagaccgcaccggacgtactaagaaccaagcccgctttcataggcaagacaaatcttgatgggatgattacagtgcaactcccagaagtgccggccaacgagaatattaaaggatattatatcatcattgtcccacttaagaagagccgcggcaagttcataaagccgtgggagtcccccgatgagatggagctcgatgaactcctaaaggagatctcacggaaacgcaggtctatccggtacgggagagaggtagaactgaaaccatacattgccgcccactttgatgttttgccaacggagtttactttgggtgacgacaagcactatggaggattcactaataagcagctccagagcggccaagaatacgtttttttcgtcttggctgtcatggagcatgctgagtcaaaaatgtacgctacatcaccttattccgacccggtggtgtcaatggatctcgatcctcaacccattacagatgaagaggagggcttgatttgggtggtgggtccagtgttagccgttgtgtttattatttgtatcgtgattgccatcctgctttataagcgcaagagggccgagtctgactctaggaagagtagcatcccaaataataaggagattcccagtcatcatccaactgaccctgtcgaactgcgcaggctgaactttcagacacctggaatggcctcgcatcctccgattccaatcctagagttggcagaccacattgagcgtctcaaagccaatgataacttaaagttctcacaggaatacgagtcgatcgatcctggccagcagtttacatgggagcacagcaatttggaggtcaacaaaccaaagaaccggtacgcaaacgtaattgcttatgatcactctcgcgtcctactgagcgccatcgaaggtataccgggatctgactacgtcaacgccaactacatcgacggctaccgcaagcaaaatgcatacatcgccacccagggatcactcccggagacatttggcgacttctggaggatgatctgggagcaacgctctgctaccgtggtgatgatgacaaagctggaggagcggtcccgggtgaaatgcgaccagtactggccctcgcgaggaacagagacgcacggcctcgttcaggttaccctcctggatactgtggagctggccacatattgcgtcaggaccttcgcgctctacaagaatggaagttctgagaaaagggaggtgcgccagtttcagttcaccgcttggcccgatcacggagtgcccgagcaccccacgcccttcttggctttcctgagaagagtcaaaacatgcaatcctccagatgctggcccgatggtcgtccactgcagcgcaggcgtgggcagaactggctgctttatagtgatagatgccatgctggagaggattaaacatgaaaaaactgttgacatttatggacatgtaaccctgatgagggctcagaggaattatatggtacaaactgaagaccagtatatttttatacatgatgctctccttgaagccgttacctgtgggaataccgaggttccagctaggaacctgtatgcctatatccaaaagttaacccaaatcgagacgggcgagaacgttacaggtatggagctggaatttaagcggctggccagtagtaaagcccatacctcgcggtttatctcagccaacctgccgtgtaacaagtttaaaaatagactcgtcaacataatgccatatgaatccaccagggtttgccttcagcccatcaggggagtcgaagggtctgattacattaatgcctccttcattgacggctaccgacagcagaaggcctacattgccacccagggacccctggctgaaactacagaggatttctggaggatgctttgggagcataactcgactattgtcgtcatgttgaccaaactgcgcgagatgggacgtgaaaagtgccaccagtactggcccgccgagaggtccgcgaggtaccagtacttcgtggtggaccccatggcggagtacaatatgcctcagtacattctgcgcgaatttaaggttactgacgctcgagacggacagagtaggacagtgcgccagtttcagtttacagattggcctgagcagggcgtccctaaatctggggagggcttcatcgactttattgggcaggttcacaaaaccaaggagcagttcggccaggacggccccatatccgttcattgttccgccggggtcgggcgaacaggagtctttattacactgtctatcgtactcgagcgcatgcggtatgagggagtggtggatatcttccagacagttaaaatgctgcgaacccaaaggccagctatggtgcaaaccgaggatcaatatcagttttcgtaccgcgccgcccttgaatatctgggcagtttcgaccactacgctacttag

SEQ ID NO: 132603 - DNA, 5700 bp, Artificial Sequence
  derived and/or modified sequence
atggtgcacgtggcccggctgctgctgctgctgctgaccttcttcctgcgaacagacgccgagactccaccccgatttacacgcacccccgtagatcagactggggttagcggtggcgtggctagcttcatatgtcaggcaacgggcgaccctagaccaaaaatcgtgtggaacaagaaaggcaaaaaagtttctaatcaaaggttcgaggtaattgagttcgatgatgggagcgggagcgtactccgcatccaaccactgagaaccccacgagatgaagccatttacgaatgcgtggcaagtaacaatgtgggggaaatcagtgtgtcaacgaggctaactgtgctgagggaggatcaaatcccaagaggctttccgactatcgatatggggcctcaactgaaagtagtcgaaagaacccggactgcaaccatgctgtgcgctgccagcgggaatccagaccccgagatcacttggttcaaggattttcttcccgtggatacgagcaacaacaatggaaggatcaagcagcttaggagtggcgcgcttcaaattgagcagagcgaagaaagcgatcagggtaagtacgagtgcgtggcgacaaacagcgcaggcacccggtattctgctcccgccaacctctatgtcagggtgaggcgagtgccacctagatttagtatacctccgacaaatcacgaaattatgcccggtgggtccgtaaatattacctgtgtggcagtcggctctccaatgccctacgtgaaatggatgctgggcgcggaggacctcaccccagaggatgatatgcctatcggacggaatgttctcgaattaaacgacgtgcgacagtccgccaactacacttgcgtggcaatgagcactctgggggtcatcgaggcgatagctcagattacggttaaagctctccccaagcctccaggcacaccggtggtgacagagagcactgccacctcaattacactgacatgggactcaggcaatcccgagcccgtgtcgtattacattatccagcataagcccaagaacagcgaagagctgtataaggaaatcgatggcgttgccaccacgcgctactccgtggccgggctctccccctactccgattacgaattcagagtcgtagccgtgaacaatattggtcgcggcccaccaagtgagcctgtgcttacccaaacgtcggagcaggccccctcttccgccccccgcgacgtgcaggcccggatgctgtcttcaacaacaatcctggtgcagtggaaagaaccagaggagcctaacggccagattcaaggctaccgcgtctactacactatggatccaacgcagcatgtaaacaactggatgaaacacaatgtcgcagattctcagatcacaactataggcaaccttgtgccgcagaaaacttacagcgtgaaagtcctggcctttacctcaattggggacggtcctctgtcttccgatatccaggtaatcactcagacaggggtgcctggacagcctctcaacttcaaagctgaacccgagagtgaaacttctattctgctgtcatggacacccccacgctctgacacaatcgcaaactacgagctcgtgtacaaggatggcgaacacggagaggagcagagaatcacaattgaaccaggcacgtcatataggctccagggcctgaagcctaacagcctgtactactttaggttagcggcccggtccccacaaggcctgggcgcttccacagccgaaatcagtgctcgtaccatgcaaagcaagccttctgcccctccccaggatatcagttgcacgagtcctagcagcacctctattttggtgtcatggcaacctccgccagttgaaaagcagaacggcatcataacagagtatagcatcaaatacactgctgtggacggcgaggacgacaagccacacgaaatcctcgggatcccatctgatactacgaagtaccttcttgaacagcttgagaagtggaccgaatataggattacagtgactgcccacactgatgtgggtcctggccccgagtccctgtcagtgctgatccgaacaaatgaagacgttcctagcgggccaccccgcaaggtggaggtggaagccgtcaattctaccagcgtgaaggtatcctggcgctcgcccgtccctaataagcagcacggccagattagaggttatcaggtgcattatgtgagaatggaaaacggggaaccgaagggacagcctatgttaaaagacgttatgttggctgatgcacagtgggagttcgacgacaccacagaacatgatatgatcattagcggactgcagcccgagacttcttatagtctcacagtgaccgcgtataccacaaaaggcgatggcgcaagatctaagccaaagctcgtgtccacaactggagctgtccctgggaaaccccggcttgttattaaccatacacagatgaataccgcccttatccagtggcatccccccgtggatacattcggccccctgcagggttatagattgaaattcggcaggaaagatatggagcccctgacaaccctcgagtttagcgaaaaggaggaccatttcactgctaccgacatccacaagggtgccagctacgtgttcaggttgagtgctcggaataaagtaggattcggggaggagatggtcaaggagatttccattcctgaagaagtgccgactggtttccctcagaatctgcactccgagggaaccaccagcacttctgtccagctgagctggcagcctcctgttctggcagagcggaacggaatcattaccaagtacacccttttataccgggacattaatatccctttgttgcccatggaacaactgatcgtgccggcagataccactatgaccctgacagggttgaagcccgatacaacttacgatgtaaaagtcagagcccatacaagcaaaggccccggaccatacagcccctctgtccaatttcgaacactgccagtggatcaagtgtttgctaagaatttccacgttaaggccgtcatgaaaacttcggtcctcctgtcatgggaaatacccgaaaattacaactccgcgatgcccttcaaaatactgtatgatgacggtaaaatggtcgaggaggtggacggcagggctacacagaagctcattgtcaatctaaaacctgagaaatcttacagtttcgttcttactaaccgggggaactccgccggtgggctgcagcatagagtcacggccaaaaccgcgcccgacgtgcttcggacgaaaccagctttcatcggaaaaaccaatctggatgggatgattacggtacagctgcccgaggtcccagctaatgaaaacataaaaggatattatattataatcgtacctctcaaaaagtcaagaggaaagtttatcaagccctgggagagccctgacgaaatggaactggacgagttgctaaaggagatttcccgaaagaggcgaagcattcggtacggtagagaggttgagttgaagccttacattgcagctcactttgatgtgttgcccacagaattcacgttaggagatgacaagcattacggtggatttactaataaacagctccagagtggtcaggagtacgtgttctttgtgttagccgtgatggagcatgcggaatcgaagatgtacgccacttccccctacagcgatcctgtggtgagcatggatttagacccacaaccaatcaccgacgaagaggagggattgatttgggtggtgggccccgtcctggccgtcgtgttcatcatctgtatcgttattgccattcttctgtacaaacgtaaaagagccgagtcagacagtcggaaatcctctattcctaataacaaggagattcctagccaccaccctacggatccggtggagctgcgccgtctcaacttccaaacacctggcatggctagccaccctcccattcctattctagaactggctgaccacatagagcggctcaaggcgaatgacaatctcaaattttcacaagaatacgaatccatagatccaggccagcagttcacctgggaacactctaatctcgaggtgaacaaaccaaaaaacaggtacgccaatgttatcgcatatgatcattctcgcgttctcttgtctgctattgaggggattccaggctcggattacgtgaatgcaaactacattgacggttatcggaaacagaacgcatacatcgccacccaaggatctttgccggagacctttggtgatttctggcggatgatttgggaacagcggtcagccaccgtggtcatgatgaccaagctcgaggaacgatccagagttaagtgtgatcagtactggccgtctaggggcaccgagacacatgggctggttcaggttaccctgctggatacagtggaactggccacctattgcgtgcggacgtttgcattgtacaagaacggatcctccgagaagagggaagtgcggcaattccagtttactgcttggccggatcacggggtgcctgaacaccccaccccgttcctggctttcctgcggagggtgaaaacctgcaatccaccagacgcaggcccaatggtggtgcactgctccgccggtgtgggaagaactggctgctttattgtgattgatgctatgcttgagaggatcaaacacgagaagacggttgacatttacggtcatgtgactctcatgcgagcgcagagaaattacatggttcagactgaggaccagtatatcttcatccacgatgctctgttggaagcagtgacctgtggtaacaccgaagtgcccgcacggaacctctatgcctatatacaaaaacttacacagattgagactggcgaaaacgtaactggcatggaattggagttcaagcgacttgcaagctcaaaggctcatacatccagatttatctccgccaacctcccttgcaacaaatttaaaaataggctggtaaacataatgccgtatgagtccacgcgagtctgtctccagcctatccggggagtcgaggggagtgactacatcaacgcgtccttcatcgatggctataggcaacagaaagcgtacatcgcaacgcaaggccctttggccgaaaccacggaggatttttggagaatgctctgggaacacaactccaccattgtggttatgctcactaaactgcgtgagatgggcagggaaaagtgccatcaatactggccagccgaacgatcagcccgctaccagtacttcgtcgtggacccaatggctgagtataatatgccccaatacatcctccgggagttcaaggtgaccgatgcccgggacggtcaaagtaggaccgtacgccaatttcaatttacggattggcccgaacagggggtccctaagtccggagagggttttatcgattttatcggacaggtgcacaagactaaggaacaattcggacaggacgggcccatcagcgtccactgcagcgcaggtgtcggccggaccggtgtcttcattaccctgagcattgtactcgagagaatgcgctatgagggggtcgttgacatttttcaaaccgtgaagatgttacgcacgcagagacccgctatggttcaaactgaagatcaataccaattttcttaccgggctgccctggagtatctgggatcctttgaccattatgccacttag

SEQ ID NO: 132604 - DNA, 5739 bp, Artificial Sequence
  derived and/or modified sequence
atggtgcacgtggcccggctgctgctgctgctgctgaccttcttcctgagaaccgacgccgagacaccccctagattcacccgcacaccagtggaccagacgggcgtcagtgggggtgtggcctctttcatctgtcaagcaacgggcgaccctcggcctaagatcgtgtggaacaaaaaaggaaagaaggtgtcgaatcagaggtttgaggtcatcgagtttgatgacggaagtggctcagttctgcgtatccagcccctgaggaccccacgcgacgaagccatatacgagtgtgtggcctccaataacgtgggggaaattagtgtgtctacccgcctgacagtgttgcgcgaagaccagataccaaggggtttccctacaattgacatgggtccgcagcttaaggtcgttgaacgaactaggactgccaccatgttgtgtgccgcgtccggcaacccggatcccgaaatcacatggttcaaggattttttgccggtggacacttcaaacaacaatggtcgcatcaaacagctcagatcagagtcaataggaggcactccaataagaggggcactccagattgaacaatccgaggagagtgatcaggggaagtatgagtgcgttgcgacgaattccgctggaacgcggtactcagcccccgccaacctctatgtgcgggaactccgagaggtccgccgggtgcctccacgtttcagcatccccccgaccaaccacgagattatgccaggaggatctgtaaatatcacttgtgtggctgttgggtcacccatgccctatgtgaaatggatgctcggagcagaggacctgaccccagaggatgatatgccaatcggaaggaacgttcttgagcttaatgatgtgcggcagtctgctaattacacttgtgtggccatgagcaccctgggggtgatagaggcaattgcccaaattactgtcaaggccttgcccaagcccccaggtacccctgttgttacggaaagcaccgccacgtcaatcacactgacatgggatagcggaaatcccgaaccagtttcctattacattatccagcacaagccaaaaaatagtgaggaactgtataaggagatagatggggttgctaccacaaggtattctgttgccgggctgtccccttactcggactatgagttcagggtcgtcgcggtgaataacataggacgggggcctccctccgaaccggtcctcactcaaacgtccgaacaggccccgtcatctgctcctcgcgacgtgcaggcccggatgctgagctcgacaaccatcctggtgcagtggaaggaaccagaggaacctaatgggcagattcagggatacagggtttactatacaatggatcctactcagcacgtgaacaactggatgaaacacaatgtggccgactcccagatcaccactatcggcaacttagtgccacaaaagacatattccgtgaaagtgcttgcatttacatctatcggcgatggtccactgtcttcagacatccaggttatcacacagacaggggtgcccggtcaacctctcaacttcaaagcagagcctgagtcagagactagcatcctcctttcttggacaccccctagatcggatactatagccaactatgagctcgtgtacaaggatggcgaacatggcgaggagcagcgcattactatcgaaccaggtacctcctacagactgcagggcctcaagcctaacagcctgtattacttccgcctggccgctagatccccccagggtctgggtgctagcactgccgaaataagcgcccgaaccatgcaatctaaaccatcagctcctcctcaagatatctcctgcacaagcccttcaagcacatctattttagtctcttggcagccacctcctgtggagaagcaaaatgggatcatcaccgaatattcaatcaaatacactgcagttgacggcgaggatgacaagcctcatgaaattttgggtatcccttctgacaccactaaatacctgctggaacaacttgagaaatggaccgagtatcggataactgtcacggctcatactgacgtgggtcctggtccagaatccctgagtgtgctcattcgcaccaatgaagacgtgccaagcgggcctccccgcaaggtggaggtggaggcagtgaactctacctcggtgaaagtttcctggagatcgcctgtccctaacaaacagcacggacagatcaggggctaccaggtgcattacgttcgcatggagaatggtgaacctaagggtcagcctatgctgaaagacgtgatgttggcagatgcacaatgggagttcgacgacacaaccgagcacgatatgataatcagcggactgcagccagagacatcctatagtctcacagtcactgcttataccaccaagggggatggtgctaggtccaaaccaaagcttgtgtcaactacgggggccgtcccaggcaagccccgtctggttattaaccacactcaaatgaacaccgcgcttattcaatggcacccaccagtagacacgttcggcccactgcagggctaccggctgaagttcggccggaaagacatggaacccctgactaccttggaattttcagagaaggaggatcacttcacagctaccgacattcacaagggcgcatcttacgtgttccggctaagtgcccggaataaggtggggtttggggaagaaatggtcaaggagattagtatcccagaggaggtgcccactggcttcccccagaatcttcacagtgaggggaccacgagcacttcggttcaactttcgtggcaacccccggtgttggccgagagaaatggtatcatcacaaagtatacgcttttatatagggatatcaacattccgttgttacccatggagcaactaattgtgcccgcagacaccactatgaccctgacaggtctcaagccagacaccacttatgatgtaaaagtaagggcacatacttccaaaggaccgggtccctattccccatccgtccagtttcgaactctccccgtggatcaagtattcgccaaaaatttccatgttaaggcggtgatgaaaacaagcgtcctgctcagttgggaaatcccggaaaactacaactcagctatgccgtttaagatactttatgacgacggcaagatggttgaagaagtcgatggacgcgctacccagaagctgatcgtgaatttgaaacccgagaaatcatacagtttcgtgctaaccaatcgaggcaactcggctggtggactgcaacaccgagtaacagccaaaaccgctccagacgtgctgcgaaccaagccagcattcatcgggaaaactaacctggatggaatgatcacagtgcagctgcccgaagtccccgctaacgagaatataaagggctactatatcatcattgtgcccctcaagaagtccaggggtaagttcattaagccatgggagagtcccgatgaaatggagttggacgagctgctgaaggagatttcacggaaacgaaggtctattagatatgggcgcgaagttgagctgaagccttacattgcggctcactttgacgtgctgcccaccgaattcacattgggagatgacaaacactatggaggcttcactaacaagcagcttcagagcgggcaagagtacgttttttttgtgctggccgtgatggaacacgcagagagcaagatgtatgccacttcaccttactcagaccccgtggtttctatggaccttgatccgcagcccatcactgatgaagaagaaggcctcatatgggtggtggggcccgtcctcgccgtcgtattcatcatatgcatcgtaatagccatactcctatataaacggaaaagagctgaaagcgactccaggaagtccagcattcccaacaataaagagatcccgagccaccaccctaccgatccggttgagctacggaggctgaattttcaaacacctggcatggcaagccacccacctatccccattctggagctggcagatcatatagaaagactgaaggcgaacgacaacctcaagtttagccaggagtatgaaagtattgatcccggtcagcagttcacgtgggagcactccaatctggaggtaaataagccaaaaaacagatacgcaaatgtgatcgcatatgaccattccagggtgctgctctctgctatcgagggaatccccggctcggactacgtgaatgccaattacatcgacgggtacaggaagcagaacgcgtacatcgcgacacagggttcgctgcctgagacatttggagacttctggaggatgatctgggagcagcgttctgccaccgttgtgatgatgaccaagctcgaggaacgaagccgggtaaagtgtgaccagtattggcctagcagaggcaccgagacccatgggctggtgcaggtcacgcttctcgataccgtcgagctcgcaacttactgcgttcgcacgtttgcactctataagaatgggagctcggagaaaagagaagtcagacagtttcagttcactgcatggccggatcacggcgtccctgagcaccctaccccatttttggcctttcttaggcgcgtcaaaacttgcaatcccccggatgcaggtcctatggtcgtgcattgttcagcaggagtgggacggaccggctgctttattgtaatagacgccatgcttgagcggataaagcatgagaagaccgtggacatttatgggcatgtcaccctgatgagggcacaaagaaattatatggtgcagaccgaggaccaatatatctttattcacgacgctctgctagaggcagtcacttgtggtaacactgaggtcccagcccgaaatttgtacgcttatattcagaagctgacccagattgagactggcgagaatgtgactggcatggagctggaatttaagagactggccagttcgaaggcccacacttcacgctttatctcagcaaaccttccctgcaataagtttaagaatcggctcgtgaacataatgccatatgagagcacgcgagtttgcttgcagcctatccgaggtgtcgaagggagcgactacatcaatgcctcttttattgatgggtatagacagcagaaggcatacatcgccacccaaggaccactcgccgaaacgaccgaggacttttggcgaatgctgtgggaacataattcaactattgtcgtgatgttgactaagcttcgtgagatgggaagggagaaatgccaccaatactggcctgcagagcgctcagcacggtatcagtattttgtggttgatcctatggcagagtataacatgccacagtatattctccgggagttcaaagttaccgacgccagggacggacagagccgaacggtccgacagtttcagttcacagactggccggaacagggggtaccaaagtcaggtgagggcttcatcgatttcatcggacaggtgcacaaaaccaaagagcagtttgggcaggatggcccaatatcagtccactgctccgctggagtggggcgcactggtgttttcataactttatctatcgtgctagagcgcatgaggtacgaaggcgtggtagacatctttcagacggtcaagatgctgcgaacccaaaggcccgctatggttcagacagaagaccagtaccagtttagctacagagctgccctcgaatatctcgggtcatttgaccactacgcgacgtag

SEQ ID NO: 132605 - DNA, 5739 bp, Artificial Sequence
  derived and/or modified sequence
atggtgcacgtggcccggctgctgctgctgctgctgaccttcttcctacgaacggatgccgaaaccccacctcgcttcactcgcactcctgtcgatcaaactggagtgtccggaggcgtagcgtccttcatatgtcaggctaccggcgatcctaggccaaagatagtgtggaataagaaaggtaaaaaggtttccaatcaacgctttgaggtgatcgaattcgacgatgggagcggcagcgtgctgaggatccagccactccggactccccgtgatgaggccatttacgagtgtgtggctagcaacaatgtgggagaaattagcgtttccacgaggctgactgtcctgagagaggaccagataccacgtggcttcccaaccatcgatatgggcccacaacttaaagtggtggaaaggacccgtacagctaccatgctgtgtgccgcgtcgggcaaccccgatcccgagatcacctggttcaaggactttcttccggtggatacttcaaataacaacggacgcattaagcagctgagatctgagtccatcggcggcactcccatcagaggtgccctccagattgaacagtctgaggagtccgatcagggtaaatatgagtgcgtcgctacaaattccgcaggaacacggtacagcgcgcccgccaacttatacgtgcgagagctaagggaagtgcgcagggtacctcctagattttctattcccccaaccaaccacgaaattatgcctgggggcagcgtgaacatcacgtgtgtggccgttggctctcctatgccctacgtgaaatggatgttgggagcagaagatctgactcccgaagacgacatgcccattgggcggaacgtacttgaactcaatgatgtgcgccagtcggccaactacacctgtgtggccatgagcaccctgggcgttatagaggcgatcgcccagataaccgtgaaggccctgcctaaaccccctgggaccccagtggtgactgaatctacagcgacttccattacactgacttgggactctggcaatcccgagccagtgtcctattacatcatacagcacaaaccaaaaaacagcgaagagctgtacaaggaaatcgatggagtggccacaacgcgctacagcgtggccggtctctccccatattccgattatgaattccgcgtggtggctgtcaacaacatagggcggggaccaccgagcgagcccgtgctgacccagacttctgagcaagccccctcctccgctccgcgcgacgtccaggctcgcatgctctcaagtactacaattcttgtacaatggaaggagcctgaggagcccaacggacaaatccaaggctaccgggtctactacactatggatcccactcagcacgttaataactggatgaagcacaatgtagccgattcccagatcaccaccataggaaacctggttccccagaagacttactctgtgaaggttctcgccttcacttcgatcggagatggaccactcagctctgacatccaggtgattacccaaaccggggttcctgggcaacctctgaactttaaggctgaaccagaaagcgagacatccatcttgctctcatggactccgccacgaagcgacaccatcgcgaattacgagttagtgtataaagatggtgaacacggcgaggagcagcggatcaccatcgaacccggaacctcttacagactgcaaggactcaaacccaacagcctgtattatttccgactggccgcacgctctccccagggacttggcgcttctactgctgagatttctgcaaggactatgcagagtaagccgtctgcccccccccaggacataagctgtacatctccttcatcgacgagcatcctcgtctcttggcagccccctccggttgaaaagcagaacggcatcattactgaatactctattaagtataccgccgttgacggcgaagacgataagccacacgagatcctcgggataccttctgacaccacaaaataccttttagagcaactggagaaatggaccgagtacaggatcacagttacggcccacactgacgtgggccctggccccgagtccctgtccgtcttgatcagaacgaatgaggatgttcctagtggaccacctcgcaaggttgaggttgaggcagtaaacagtacaagcgtcaaagtgtcgtggagaagccctgttccgaataaacagcacggtcagattcgggggtaccaggtgcactatgttcggatggagaacggtgaaccaaagggccaaccgatgctgaaggacgttatgctggccgacgcacaatgggagttcgacgacacaactgagcacgacatgattatcagtggccttcaaccggaaacttcatactcattgaccgtgacagcatatacgaccaaaggtgacggggctagatccaagcccaaactagtgtctactactggcgcagtgccaggcaaaccacgtctggttatcaaccacacccagatgaacacagctcttattcagtggcatcccccggtggacacatttggccccctccaagggtatcgactaaagttcgggcgaaaggatatggaacccttaactactctggaattctcggaaaaagaggatcacttcacagccaccgacatccacaagggagcctcttacgtcttcaggctttccgctcgtaacaaggttggcttcggcgaagaaatggtcaaagagatttcaattcctgaggaggtgcctacagggttcccgcagaacttacatagcgaaggcactacaagcacaagcgtacagctctcttggcagccccccgtgctcgccgaacggaacggcattattacgaagtacaccctattgtatcgggatatcaatatcccgcttctgcccatggaacagctcatcgttcccgctgacactactatgactttgactggactcaagcccgatactacgtacgatgtcaaggtcagggcccacacctcaaaaggccccggaccatattccccatcagtgcagtttcgtaccctgcctgttgatcaagtgttcgcaaagaactttcacgtcaaggccgtcatgaagactagcgttctcctctcttgggagatccccgagaactacaactcggccatgcccttcaagatcctgtacgacgacggtaaaatggtggaggaggtggacggccgagctacccaaaagctcattgtgaatctaaagcctgagaaaagctatagctttgtgttgactaatcgcggcaacagcgcaggtggactccaacatcgagtgaccgccaagactgcgcccgacgtgctccgcacgaagcctgccttcattggcaagaccaacctggatgggatgataacggtgcaattgccagaagtcccagccaacgagaatataaaagggtactatatcataattgtaccgcttaaaaaatctaggggcaaattcatcaagccctgggagagccccgatgaaatggaactagatgagctcctaaaagagattagtcggaaaagaagaagtatccgctacggtcgggaggttgaactcaaaccatatatcgcggcacattttgatgtgctacccaccgagttcaccctcggggacgataaacactatggaggcttcaccaacaagcagctgcaatcgggccaggaatacgtgtttttcgtgctcgccgtgatggaacacgcagagtcgaagatgtacgccacctctccttactccgatcccgtagtgtctatggacctcgacccccagccaataaccgacgaggaggagggcttaatatgggttgttgggccagtcctggccgtggtctttatcatttgtatcgtgattgctatcctgctgtacaagcggaaacgtgccgagtcagactcaagaaaaagttccatccccaataataaagagatccctagccaccatcccacagaccccgtggagctgcgtcgattaaacttccaaacccctggaatggcttcccatccgcctattccgatcttagaactggccgatcacatcgagagactgaaagccaatgataatttgaagttctcccaggaatatgagtcaatcgaccctggacagcagtttacctgggaacactcaaatcttgaggtgaacaaaccgaaaaaccggtatgctaacgttatagcttacgatcactccagagtgctcctgagcgccatcgaaggaatacctggaagcgactacgtgaatgctaactatatagacggatacaggaagcagaacgcgtatatcgcaacccaaggcagtttacctgagacatttggggatttttggagaatgatttgggaacagcggagcgccaccgtggtgatgatgaccaagctggaagagcgttccagagttaagtgtgaccaatattggccttcccggggaaccgaaacccatggcctggtgcaagtcaccctgctcgacacggtggagctggctacctattgcgttcgcacttttgctctgtacaagaatgggtcttccgagaaaagagaagtgagacaattccagtttactgcttggcccgatcacggcgtccctgaacacccaacccctttcctcgcctttctcagacgtgtgaagacatgtaacccgcccgatgctgggccaatggtggttcactgctctgccggggtggggcgcacggggtgttttatcgtcatcgatgccatgctggagagaataaagcacgagaagactgtggatatctatgggcatgtcactctgatgcgggcccaacgcaactatatggtccaaaccgaggatcagtatatttttatccatgacgctctgctcgaagccgttacatgcgggaacacagaagtgccagcacgcaatttgtatgcctacatccagaaactgacgcaaatcgaaaccggagagaacgtgacaggaatggagttagagttcaagaggctcgccagcagtaaggcacatacatccaggttcatttctgccaaccttccttgcaataagttcaagaaccgccttgtcaacataatgccttatgagtcaaccagagtgtgcctccagcctatcagaggagtggaggggtctgattatatcaatgcttccttcatcgatggttaccgccagcaaaaggcctatattgccactcagggacccctggctgaaacaaccgaggacttttggaggatgctgtgggaacataactcgactattgtggttatgctgaccaagctgcgggaaatgggcagagaaaaatgccatcagtactggcccgccgagcggtctgctaggtaccaatactttgttgtcgaccctatggccgagtacaacatgccccagtatattctccgggagtttaaggtgacagatgcccgcgatggtcagtcacggactgtacggcagttccaatttaccgattggccggagcagggggtccctaaatccggagaagggttcattgattttatcggccaggtacacaaaaccaaggagcaattcggtcaggatgggcccatttctgtgcactgctcagcaggggtcgggagaacaggggtgttcatcaccctttcaatcgtcttagagcggatgcgctacgagggcgtggtagatatctttcagaccgtcaaaatgctgcgtacacagcgccctgccatggtgcaaacagaggaccagtaccaattcagttacagggccgctcttgagtatctcgggtcatttgaccactacgccacctag

SEQ ID NO: 132606 - DNA, 5738 bp, Artificial Sequence
  derived and/or modified sequence
atggtgcatgtcgcgcgacttttactgctactcctcacattcttcctgcggactgacgctgaaactcctccgcgatttacacggacaccagtggatcagaccggagtgtcaggaggcgtggcaagctttatctgccaggctaccggcgaccctcggccaaaaatagtgtggaacaagaaggggaagaaagtttccaatcagagattcgaagtcattgaattcgacgacggaagcggctctgtactccgcatccagccgttgagaactcccagagatgaagccatctatgaatgcgtggcctcaaacaatgttggggagataagcgtgtcaactcggcttacggtgctgagagaggaccaaatacctcgcggttttccaaccatcgacatgggccctcaattgaaggttgtcgagaggacgagaactgccaccatgttgtgcgctgcgtctggtaatcctgatccagagatcacttggtttaaggactttttgccagtggatacatccaacaacaatggtagaatcaaacagcttagatccgagagtatcggcggaaccccaatccggggtgccctccaaatagaacagagtgaagaatccgaccaggggaaatacgagtgtgtggccactaactcagccggaactcggtatagcgcgccagccaatctgtacgtgcgggaattgcgggaggtaagaagagtgccccctaggtttagcattccacctactaatcatgaaattatgcccggagggagcgttaatatcacatgtgttgcagtaggcagccccatgccctacgtgaaatggatgcttggagctgaggatctgaccccagaggacgatatgcctattgggagaaacgtacttgagcttaatgacgtgaggcagagcgctaattatacctgtgttgcgatgtcgactctgggggtgatagaggcaattgctcagataacagtgaaggctctgcctaagcctcctggcacaccggttgtgacggagagcactgcaacatcgataacattaacttgggatagcgggaatccagagcccgtatcctattatattatccagcacaaacctaaaaacagtgaggagctctacaaagagatcgacggcgtggctactacgagatactcagtggccggtttgtccccctactcagattatgaattccgtgtggtggcggtgaacaacattggtagaggaccaccatcagagccagtacttactcagactagcgagcaggcccctagcagcgcaccacgggacgtgcaggccagaatgctgagctccacaacgatcctcgtgcaatggaaggagcctgaagaacccaatgggcagatccagggctacagagtctattataccatggacccgactcagcatgtgaataactggatgaagcataatgttgccgacagtcagataaccaccatagggaatctggtacctcagaagacatatagcgtcaaagtgctcgcctttacctcaatcggcgacgggccactgtcctcagacatacaggttatcactcagaccggcgtgcccggtcagcccttaaacttcaaggccgaaccagagagcgaaacaagtatcttactgagttggacccctccccgatccgataccatcgcaaattatgaacttgtgtacaaagacggggagcatggcgaggaacaacgcattacgattgaacctggcacgtcttaccggcttcaaggtctgaagcccaactccttatattatttcaggctggctgctcggagccctcagggacttggcgctagcactgccgaaattagtgcgcgaaccatgcaaagcaagcccagcgcccctcctcaggacattagctgcaccagcccgagctctacttcaatccttgtgtcatggcagccccctccagtggaaaagcagaacggaataatcacggagtactcaattaagtacaccgcagtggatggcgaagacgataagccccacgagattttgggcataccaagcgataccactaaatacttgttggaacagttggaaaaatggaccgaatatagaatcaccgtgacagcccacactgatgtcgggcctgggccagaatctctctccgttctgattcggacaaatgaagacgtgccttctggcccacctcggaaggtggaagtcgaggccgtgaacagcacctctgtaaaagtgtcatggcggagccctgtgccgaataagcagcatgggcaaattcggggatatcaggtgcattatgtgcgcatggaaaacggcgaaccaaaaggacagccgatgttgaaggacgtgatgctagccgacgcacagtgggagttcgacgataccactgagcatgacatgatcatctccggactccaaccagaaacgtcttatagcctgacggtgaccgcctacaccactaagggagacggggcaagatcgaagcccaagttggtgtctacaacaggagcggtcccaggcaaacctcgcctcgtgatcaaccatacacagatgaataccgctttgatccagtggcacccacccgtggacacctttggacccctgcagggctataggctgaaatttggacgcaaggatatggagccactgacgacactggagttcagcgaaaaagaagatcatttcaccgccacggacatacacaaaggcgcatcctacgtgttcaggctgagcgcacgtaacaaggtgggtttcggcgaagaaatggtgaaggagatttccatcccggaggaagtgcctactggttttccccagaatctacactccgaaggcactactagcacctcagttcagttaagctggcagcctcctgtactcgctgaacgcaacgggatcatcactaagtatacgctcttgtatcgagacataaacatcccactccttcctatggagcagttgatagtaccagcagacacaacaatgacacttacgggattaaagccagacactacgtatgacgtgaaggtgcgcgctcacacgagcaaagggccaggtccatattctccctctgtgcaatttaggacattgccggtcgaccaggtgttcgctaagaatttccacgtgaaggccgtaatgaaaacatctgtgttgctgtcatgggagatccctgaaaattataactctgccatgccgttcaaaattctttacgatgatgggaagatggtggaggaggttgatggcagggccacccagaaactgattgttaacttgaagccagagaaatcatactcatttgtactgaccaatcgcggaaactccgccggaggtctgcagcatagagtcaccgctaaaaccgctcccgacgttctgcggaccaagccagcgtttatagggaagaccaatctagatggcatgatcaccgtccaacttcccgaagtgccagctaacgagaacatcaagggttactacataatcatcgtgcctctgaaaaaatctcggggtaaatttatcaagccctgggaatccccagatgagatggagctggacgagctgttaaaggagatctccagaaaacggaggagcatccggtacggtcgggaggttgagttgaagccatacatagcagcacatttcgatgtgctgccaactgagttcaccctgggggacgacaaacattatggaggatttacgaacaagcagctgcagtcggggcaggaatacgtgttttttgtcctggctgtcatggaacacgctgagagcaaaatgtacgccacaagcccttactcagaccctgtggttagcatggatctcgaccctcagcccatcaccgacgaggaagaaggcctcatttgggtcgtggggcctgtcctggcagtggtgtttataatctgtatcgtgattgccattctgctttacaagagaaagcgcgctgaatctgactctcgcaagtcctcaattcccaacaataaagagatcccatcacaccatcccacagatcctgttgagttaagaagattgaacttccagactcctggaatggcaagccacccccctattcccattctggagttagcagatcacatcgagcgtttgaaggcaaacgacaacctcaagttcagccaggagtatgagtccatagatcccggtcagcagtttacctgggagcattcaaacctcgaggtgaataagcctaagaaccgttacgccaatgtcattgcgtatgatcatagccgggtgctcctgagcgccattgaagggattcccggatcggactatgtgaatgccaactacattgatgggtacagaaagcaaaacgcctatatcgcaacacaggggtctcttcccgagacatttggcgacttctggcggatgatatgggaacagaggagcgccactgttgtgatgatgacaaaattggaagagcggagtagagtgaagtgcgaccagtattggccctcccgagggacggagacccatgggctcgtgcaggtgaccctgcttgacactgttgaactagcaacctactgtgttaggactttcgccctgtacaaaaacggcagcagcgagaagcgggaggtgcgccagtttcagttcaccgcttggccggaccatggcgttccagagcacccaactccctttctggcattcctcaggagagtgaaaacatgtaatcctcctgacgccggtcccatggtggtccactgctccgccggagtcggcaggaccggttgttttatcgtgatcgatgccatgttggagagaattaaacatgaaaagaccgtggacatttacggacatgtcaccctgatgagagcacagcgtaactacatggtgcaaacagaggaccagtatatctttatccatgacgctctattggaggcagttacctgtggcaatacagaggtaccagccaggaatttgtacgcctacatccaaaagctgactcaaatcgaaacaggggaaaacgtgacaggaatggagttggaatttaaacgattagcgagttccaaggcacataccagccgttttatcagtgctaatctgccctgcaataaattcaagaataggctggttaacataatgccctatgaatccacccgggtgtgcctgcagccaatacgcggagttgaaggctccgattacatcaacgcaagttttatcgacgggtatcggcagcagaaggcctacatcgcaacccagggccctctggctgagacaactgaggacttctggcggatgctatgggagcacaatagcacaatcgtcgtgatgctgactaaattgcgagaaatgggcagggaaaagtgtcatcagtattggcctgctgagcgatcggcacggtatcagtactttgtggtggacccaatggcagagtacaatatgccccagtatattctgagggaattcaaagtaactgatgcacgggatggccagtcccgcacagtgcgacagtttcaatttacagactggccagaacaaggcgtgcctaagtccggagagggtttcattgattttatcggtcaggtgcacaagaccaaagagcagttcggtcaagacggcccaatctctgtccattgctccgcaggcgtagggcgaactggagtctttattactcttagcatcgtactggaacgaatgcggtacgaaggcgtggtagacatttttcagactgtcaaaatgctgagaacccagaggcccgcaatggtgcagacagaggaccagtaccagttttcatacagggccgcattggaatacttaggcagttttgatcactatgccactta

SEQ ID NO: 132607 - DNA, 5699 bp, Artificial Sequence
  derived and/or modified sequence
atggtgcatgtggcacggctcctgctccttctgttgaccttctttctgcgcaccgacgccgagaccccgccaaggttcacaagaacccccgtggaccagaccggcgtgagcggaggagtcgcaagctttatttgtcaggctacaggcgacccgaggcccaaaattgtgtggaataagaaaggcaaaaaggtgtcaaaccaacgtttcgaggtgattgaattcgacgatggcagcggaagtgtgctgcgcatccagcccctgaggacgccacgagacgaggctatttacgagtgcgtcgcctcaaacaacgttggcgaaatctccgtctctaccagattgaccgtgctcagggaagaccagatccctagaggttttccgactatagatatgggtccacagctaaaggtggtggaaaggactcgaacagccactatgctgtgcgctgccagtggaaacccggacccggagatcacatggttcaaggactttctgccagtcgatacctccaataataacggtaggattaaacagctgcgcagcggcgcactccagattgagcagtctgaagagtctgaccagggcaagtatgaatgcgtggccacaaattccgcgggtacacggtatagcgcacctgctaatctttacgtcagagtgcggagggtcccaccccgattctctattcctccgaccaaccatgagattatgcccggaggaagcgttaatatcacatgtgtagccgttggctccccaatgccttacgtaaagtggatgttgggagctgaagatctgacccctgaggatgacatgcctatcggaagaaatgtgctcgaactcaatgacgttaggcaatctgcaaactatacctgtgtggccatgagcacactgggcgtcatcgaagcgattgctcagatcacagtcaaagctctccctaagccgcctgggacccctgtcgtgactgaatccacagccactagcatcacactgacatgggatagtggcaatccagaaccagtcagttactacatcatccaacacaaacccaagaactctgaggagctgtataaggagattgacggcgtggcgactacgagatatagcgtggctggcctcagtccttatagcgactatgaatttagggtcgtggccgtgaacaatattggacggggaccgccaagcgagccagtactcacacagacatccgaacaagccccttcttctgcccctcgggacgttcaggcaagaatgctcagctcaactacgatcctagttcagtggaaggagcccgaagaaccaaatggacagatacaaggatacagagtgtactataccatggatcctacgcagcacgtgaataactggatgaaacataacgtggcggactctcagatcactactattggcaatctcgtgccacagaaaacatattccgtgaaggtactggcatttaccagtatcggagacggacctctgtccagtgacattcaggttattacccagaccggagtgccgggacagcctctaaacttcaaagcggaacccgaaagcgagacctctatactgttaagctggaccccccctcgatctgacactatcgccaattacgagttggtttataaagacggagagcacggtgaggaacagcgcatcacaattgagcccggaactagttacagactccaggggttaaagccaaatagcctttactacttcagactcgccgctaggagtccccaagggttgggggcatccactgcggagatatccgccaggactatgcagagtaaaccttcagccccaccccaggacatctcttgcacttctccaagcagtacaagcatactcgtttcctggcaaccacctccagttgaaaaacagaatggcattattacggagtattccatcaagtataccgccgttgacggggaagatgacaaacctcacgagattttaggaatccctagtgatacgactaagtatctgctggaacaactggaaaaatggactgaatatcgcatcacggttacagcacatactgacgtgggacccggacccgagagcctgtccgttctcatccggaccaacgaagatgtgccctccggtcctccacgcaaagtggaggtggaggctgtcaattccacgtccgtgaaggtatcctggagatctccagtgcctaacaagcaacatggccagattcgcggataccaggtgcattatgttagaatggaaaatggagagccgaagggtcagcctatgctgaaggacgtgatgcttgcagacgcacagtgggaatttgatgatacaactgaacacgacatgataatttcaggactgcaacccgaaacatcttatagccttaccgtgactgcctacacaaccaaaggtgatggtgcccgttccaagcccaaacttgtgagtacaaccggggctgtcccaggcaaaccaagactggttattaatcacactcagatgaatacagctcttattcaatggcaccccccagtggacacttttggacctctgcaggggtacagactaaagtttggtcgaaaagacatggaacctcttacaactttagaattcagtgagaaggaggatcacttcaccgcaaccgacatacacaaaggagcttcgtatgtattcaggttgagcgctagaaacaaagtgggtttcggggaagaaatggtcaaggaaataagcattccggaggaggtccctaccgggtttcctcagaatctgcactccgaaggcacaaccagtaccagtgtccagctgagctggcagcccccagttcttgcagagaggaacggcataattacaaaatatacgttgttgtatagggacatcaacatcccactgctacccatggaacagttgatcgtgcctgcagacaccactatgaccctaactggattaaaacccgacaccacctatgacgtgaaggtccgggctcacacctctaagggacctggcccatattcaccaagcgtgcagttcaggacactgccagtagatcaagtgtttgccaagaattttcacgtgaaagcagtgatgaaaacctccgtgttactgtcttgggaaattccagaaaattataattctgcaatgccctttaagatcctgtatgatgatggcaagatggttgaagaagtagatggccgagccacccagaaactaattgtcaacctgaagccagagaaatcttactcctttgtgcttacgaataggggcaattcagcgggagggcttcagcatagggtgaccgctaagaccgcaccggacgtcttgcggactaaacccgcattcataggcaagacaaacctggacggcatgattaccgtccagctccccgaggtgcctgcaaatgagaatattaaggggtactacataataatcgtgcccctgaaaaagtcccgaggaaaatttataaagccttgggaaagtcctgatgaaatggaactcgatgaactgcttaaggaaatctcccgtaagagaaggagcattcggtatggtcgagaagtggagttgaagccttacattgcagctcacttcgatgttctgcctacagagttcactctcggcgatgataaacattatggtggttttacgaacaaacagctccaatctgggcaggagtacgtcttcttcgtgctggcagtcatggaacatgccgagagcaaaatgtatgcgactagcccttacagcgacccggtggtgagcatggacctcgaccctcagccaattaccgacgaggaggagggcctaatctgggtcgttggccctgtgctggctgtcgtgttcattatttgcatcgttatagccattttactgtacaagagaaagagggctgagtccgattctcggaagtcgagtatcccaaataacaaagaaatcccaagtcaccatcctaccgatcctgtcgaactcaggcggttaaactttcagacacctggtatggcctcgcatcccccaatcccaatcctcgagttagcagatcatatagagcgcctgaaggccaacgataatttaaagttcagtcaagagtacgagtccattgaccctggtcagcagtttacttgggagcactctaatctggaggttaacaagccgaaaaaccggtatgcgaatgtgatagcatatgaccacagccgagtgctccttagcgcaatcgaagggattcccggatccgactatgtgaacgctaactatatcgacggctatcggaaacaaaatgcgtatatcgctacacagggctcgttaccagagactttcggggatttctggagaatgatttgggaacagaggtcagctactgtggtgatgatgacaaaactcgaagaaagaagccgggtgaagtgcgaccaatactggccatcgcggggtaccgagacacacggccttgtgcaagtgacgctcctcgacaccgtggagctggctacctattgcgtgcgaacttttgccctatacaagaatgggtcatctgagaagagggaggtccgacagtttcagttcaccgcctggcccgaccacggggtgccggagcaccccactccatttctggcgtttctgcgcagggtcaagacctgtaatccccctgacgctggacccatggttgtgcattgttcggctggtgtggggagaactggctgcttcattgtgatcgatgccatgcttgaaaggatcaagcatgaaaagactgtagacatctacggccacgttaccctgatgagagcccagcgcaattacatggtgcagactgaggaccaatatatatttatccacgacgccttactcgaggcggtaacatgcggcaacacggaggtgcctgctagaaatttgtatgcctacattcagaaattaactcagatcgaaacaggagagaatgtaacaggcatggagctggagtttaagcgccttgcctcctcaaaggcccacaccagccggttcatcagtgccaatctgccatgcaataagttcaagaaccggctggtcaacatcatgccctatgaatcgactagagtttgtctgcagcctatacggggtgtcgaggggagcgactacattaacgccagttttatagatggataccgccaacagaaggcatacatagcaacccagggcccacttgccgagacgactgaggatttttggcgaatgttatgggagcacaattccacgatcgtggtgatgctaaccaagctacgtgaaatggggcgagagaaatgccaccagtattggcctgctgagaggtcagcccgataccagtacttcgttgtcgaccccatggccgagtacaatatgccccagtacattcttcgcgagtttaaggttacagatgcccgagatgggcaatccagaactgtgagacagttccagttcaccgattggcccgagcagggcgtgccaaagagcggcgaagggttcattgattttatcgggcaagtgcacaagactaaggaacagtttggccaggacggcccaattagtgttcattgtagcgctggggtgggcaggacaggagtgttcattacccttagcatagtgctggagaggatgcggtatgagggagtcgtggatatttttcagacggtcaagatgctccgaactcaaaggccagcgatggttcaaaccgaggatcagtatcaattcagctatagggcagccttagagtacttggggagtttcgatcattatgctacata

SEQ ID NO: 132608 - DNA, 5738 bp, Artificial Sequence
  derived and/or modified sequence
atggtccacgtagcgagacttctgctgctgcttcttaccttctttctacggactgatgccgagactcctcccagattcacacgaacaccggttgaccaaaccggcgtatccggaggtgtcgccagtttcatctgccaggcaactggcgatcctagacccaagatcgtgtggaacaaaaagggtaagaaagtctcgaaccagcgattcgaagtgatcgagttcgatgacggttcagggtccgttctgcgcatccagcccctccgtacacccagggatgaggctatatacgaatgtgttgccagcaacaacgtcggggagatcagcgtctccacgagattgactgtactgagggaggatcagattccacggggtttcccaacaatagacatggggcctcagcttaaggttgttgagagaacaaggaccgccaccatgttatgcgctgccagcggaaatcctgaccccgagattacatggtttaaagactttcttcccgtggatacttcgaataataatgggcgtataaagcagctgagatctgagagcattgggggtactccaatccggggtgctctgcagattgagcagtcagaagaaagtgatcaaggtaaatatgaatgtgtggcgacaaattctgcaggcacgcggtactccgcccctgcaaatttatatgtgagggagttgcgggaggtacggagagtccccccacgcttctctattcctccaacaaaccacgagatcatgcctggagggtccgtaaacatcacctgcgttgcagtgggatctccaatgccatacgttaagtggatgcttggagctgaagatctgacacccgaggatgatatgccaataggccgtaatgtgttggagctcaatgatgtccggcagtctgccaattacacatgcgtggcaatgagcacactgggagtcatcgaagccattgctcagattaccgtgaaggctctgccaaagccccctggtacacctgtggtgaccgaatcaaccgcgacgagcattacgctcacatgggactctgggaatccagagcccgtctcttattatatcattcagcacaagcctaaaaattccgaggaactttacaaagagatcgatggcgtcgctactactagatacagcgtagcgggactctcaccttacagcgactacgaattccgggtggtcgcagtgaacaacatcggcagaggaccaccttcagagccagtgcttacacaaacttcagaacaggctccgagctccgcaccacgtgatgtacaagcgaggatgctgagcagcaccacaatcctcgtacagtggaaggagccagaagaacctaatggtcaaattcaagggtacagagtgtactacactatggatccaactcagcatgtgaacaattggatgaaacataatgtggccgattctcaaatcactactatagggaacttggtgccccagaagacctattccgtgaaagtcctcgcattcaccagtatcggggatgggcctctgtcatctgacattcaggtcatcacccaaacaggggtgcccggacagcctttaaattttaaggccgagcccgaaagcgaaaccagcatccttctgagctggactcctccacggtccgatactatagctaactacgagctcgtctataaggacggtgagcatggcgaagagcagagaatcacaattgaaccaggtactagttacaggctgcaaggcctgaagcccaattctctgtactactttcgcttggctgcccgaagcccgcagggcctgggcgctagtactgctgaaattagtgcgcgaacaatgcagtcaaaaccgtctgctcccccacaggacatcagttgtacctcgcccagctcaacgagtattctcgtcagttggcagccccctccagtcgaaaaacagaatggtattatcacagagtactctataaaatacacggctgtcgacggagaagatgacaaacctcatgagatattgggcattccatctgatactactaagtacctgttggaacaacttgagaaatggactgaatacaggattaccgtaaccgcccacaccgatgtgggcccagggcctgaatcactgagcgttttgatccggacaaacgaggatgtgcctagcggccctcccagaaaggtggaggtggaagcagtaaacagtacgtctgtgaaggtgtcctggcgctccccggtgcccaataagcagcacggccagatccggggatatcaggtgcactacgtgagaatggagaatggcgagccaaagggtcaaccaatgctgaaagacgtaatgctggcagacgcacaatgggaatttgacgacacgacagaacacgatatgattatatcggggctgcagcccgagactagttatagtcttacagttactgcctacacaacaaaaggggatggagcaagaagtaagccgaagcttgtatctacgacgggagcggtaccaggcaaacctaggctcgtcattaaccatacccagatgaacacggcactcatacagtggcacccacctgtggacacatttggcccattgcaagggtatcgcctgaaattcggaagaaaggatatggaaccacttacaactttagaattttctgaaaaggaagatcactttactgccacagatattcacaaaggagctagctacgtgttccgcctcagcgcaaggaacaaagtgggattcggggaagaaatggtaaaggaaatctccattcctgaagaggtcccaaccggctttccacagaatctgcatagcgagggtaccaccagcacatcagtgcaactgtcttggcaaccgcctgtcctggccgaacgaaacgggatcatcaccaagtacacactcctataccgagatatcaatatccctctcctgccaatggagcagctgatcgtgccagcggacaccacaatgactctgaccggactgaaacctgacaccacttacgatgtgaaagtacgagctcacacttctaaaggccctggtccatatagtccctccgtgcagttcagaaccctccccgtcgatcaggtgttcgcgaaaaactttcacgtgaaggccgtgatgaaaacctcagtgctgctaagttgggaaatccccgagaactacaattccgccatgccctttaaaatcctgtacgacgatggaaagatggtcgaagaagtggacgggagggcaacacagaaactcattgtcaatctcaaacctgagaaaagctattctttcgtgcttacaaatcggggaaacagcgccggagggctccagcaccgagtcaccgccaaaacagcgccagatgtcctgcgtactaaaccagccttcatcggtaaaactaatttggacggcatgattactgtgcaactgcctgaggttcccgctaatgaaaatatcaaaggctattacatcatcatcgtgcctcttaagaagtctaggggcaagttcattaagccttgggagtcccccgatgagatggagttagacgagctgcttaaagaaatcagccggaagcgaaggtccatccgctacgggcgagaagtagagctcaagccttacattgcagcccactttgacgtcctccccaccgaattcactctgggcgacgataagcactatgggggattcacaaataaacagctgcaatccggccaggagtatgtcttcttcgtgctggccgtgatggaacatgctgagtccaaaatgtatgccacatccccttattccgacccagtagtgtccatggacctggatccccagcctattaccgacgaagaagagggacttatctgggttgtggggccagtgctcgcggtggtatttattatatgcatcgtgattgctatcctgctgtacaagagaaagagggccgagagtgattcacgcaaaagttctatcccaaacaacaaagagattcctagtcaccatcccacagacccggtagagctcaggcgactgaatttccaaactcctgggatggcctcccatccaccaatcccgattctggagctagcagatcatatagagcgactcaaagcgaacgacaacctaaaattttcacaggagtacgagtctatagacccaggccagcagttcacttgggagcatagcaaccttgaggttaacaaaccaaagaataggtacgccaacgtgattgcgtacgatcatagcagggtgctactcagcgccattgaaggaattccagggtccgactatgtgaatgcaaattatattgatgggtacagaaagcagaatgcttatatagccacccagggatctctgccggagacatttggagacttctggaggatgatatgggagcagcggtccgccacagttgtcatgatgaccaaactcgaagaacgctcgagggtgaaatgtgaccaatattggccatccagggggaccgaaactcatggcctcgtacaggtcaccttactggacaccgttgagctggctacttactgcgttaggacttttgcactgtacaaaaatggctcctccgaaaaaagagaggttcgtcaatttcagtttactgcttggcccgaccacggcgttcctgaacaccctacgccctttttagccttccttcgtagggtgaaaacctgtaatccccctgacgccggacccatggtggtgcactgctccgccggagttggcaggaccggctgcttcatcgttatcgacgcaatgctcgagcgtataaaacacgagaaaacggtcgatatctatggtcacgtcactctgatgagggcacagagaaactatatggttcagaccgaagatcagtacatatttatccatgacgctctgctggaggccgtcacttgtggcaacacggaggtgcctgctagaaatttgtatgcatacattcaaaaattgacacagattgagacaggagagaatgttacaggcatggagttggagtttaagcggctggccagttccaaagcgcacacgtctagatttataagtgccaatttaccttgcaacaaattcaagaatagactggtgaatattatgccttacgagagcacgcgagtgtgtctgcagcctatcaggggcgtggaaggttcagattacattaacgcaagcttcatcgacgggtatcggcagcagaaggcatacattgccacccaaggtcccctggctgagaccaccgaggatttctggcggatgctgtgggagcacaatagcacaatagtcgtcatgctgactaagctgagggaaatggggagggagaaatgtcatcagtactggcctgccgagcggagcgccagataccaatatttcgtcgtagatcctatggccgagtacaatatgcctcagtatatcctgcgggagttcaaagtaactgacgccagagacggtcagagtcgcactgttcggcagttccagtttactgactggccagagcagggcgtgcctaagagcggcgaaggctttatcgatttcataggccaggtacataaaaccaaagagcagttcggccaagatgggccaatttcggtacattgctcggccggagtaggccgtacaggggtatttatcactttgtccatcgtgcttgagcgcatgaggtacgagggagtcgtcgacatctttcaaaccgtgaagatgctgcgtacccagcgtcccgctatggtgcaaacagaggatcaatatcaattttcctatcgggctgccctggagtacttgggctcgttcgaccactatgcgactta

SEQ ID NO: 132609 - DNA, 5738 bp, Artificial Sequence
  derived and/or modified sequence
atggttcatgttgctcgcctgctattattgctgctcacgttctttttgcgaactgatgctgagacaccacctcggttcacccggaccccagtggaccaaaccggtgtctcaggcggagtggcgtcctttatttgccaagctaccggggatcccagacctaagattgtatggaacaaaaaaggaaagaaggtgagtaaccaaaggttcgaagtaatagagtttgatgatggctccggaagcgtattgagaatccagccgctgcgcactccaagggacgaagccatttacgagtgcgtggcgtccaacaatgtgggtgagatctcagtgagcaccagattgaccgtgttgcgagaagaccagatccctcgcggatttcctacaattgatatggggccacaacttaaagtggtcgagcgcacacggactgccaccatgttgtgcgctgcctctggtaaccccgatcctgagatcacctggttcaaggacttccttccagtcgacacctcaaataacaacggacgcataaagcaattaagatctgagtcaattggtggcaccccaattcgcggagccctgcagatagaacagtcagaggagtccgaccaggggaaatatgagtgtgtggcgactaacagcgccggaactagatactccgcccctgcaaatttatacgttcgggagctgcgtgaggtaaggagggtacctccgaggtttagcattccaccaaccaatcacgaaattatgcctggaggttccgttaatataacctgtgtggcagtcggttcgccaatgccatacgtgaaatggatgctcggagccgaagacctgactccagaggacgatatgccgatcggccgtaacgttctggagctgaatgacgttcgccagtccgctaattacacatgtgtagctatgtcaaccctgggagtgatcgaggccattgcacagatcactgtgaaggctttgcctaaaccaccgggaacaccagtagtgacggagagcaccgcaacgagcatcactctgacctgggactccggcaatcccgagccagtgtcctattatatcatccagcataagcctaagaacagcgaagagttgtacaaggagatcgatggtgttgcaactacccgctactccgtcgcaggactctccccttatagtgactacgagttccgagtcgtggccgtgaacaacattgggcgaggccctcccagcgagccagtccttactcagaccagcgagcaggccccttctagtgccccacgtgacgtccaggcacggatgctttcatccactaccatcctggtgcaatggaaggagcccgaagagcctaacgggcagatacaagggtatagggtgtattatacaatggatcccacccagcatgtcaataactggatgaagcataacgtggccgactcccagatcacgactattgggaacttggtgccacagaaaacatactccgttaaggtcttagccttcacatccattggtgacggccctctatcgagtgacattcaggtcattacccaaacaggagtgcccggacagcccctgaacttcaaggctgagcccgagtccgagactagcatcctgctgtcttggacacctcccaggtctgacactattgctaactacgagctcgtgtataaggatggagagcacggggaagaacaaagaatcactatagaaccagggacaagctaccggctgcagggactgaaacctaactctctgtattattttaggctcgctgccaggagtcctcagggtttgggagccagcactgccgaaatctccgcccgaaccatgcaatcgaaacccagtgcccctccacaggacatttcctgcacctcaccctcttccacctccatcctggtcagctggcagcctccaccagtggaaaaacagaatggaataattactgagtactccataaagtacacagctgtagacggcgaagatgataaacctcacgagatccttggaataccctccgataccaccaaatatcttctagaacaactggaaaagtggactgagtacaggataaccgtgactgctcacacagatgtggggcctggtccagagagtttgagtgtactcatcagaacgaacgaggacgtgcccagtggcccaccacggaaagtcgaggtcgaggccgtcaacagcacatctgtgaaggtgtcttggcggtccccagtccccaacaagcagcatggccagattcgagggtaccaggtccactacgttcgcatggagaacggggaacctaaaggtcagcctatgctgaaagatgtgatgctcgcagatgcccagtgggagttcgacgataccaccgaacacgacatgatcatctccgggctgcagcccgagacaagttactcactcacagtgacagcctacacgacaaagggggatggcgcaaggtcaaagcctaagctggtgagcacaaccggcgctgttccagggaagcccagactcgtcattaatcatactcagatgaataccgcccttatacagtggcacccacctgttgatacctttggcccactccaaggatatcgcttgaaattcggacggaaagacatggagcccttaacaaccctggaattttccgagaaggaggatcatttcacggccaccgatatacacaagggggcaagttacgttttcaggttgagtgccagaaacaaggtgggttttggtgaagagatggtgaaagaaatcagtatacctgaggaagtgcctaccgggtttcctcagaacctgcattccgaagggacgacatcaaccagcgtacaattatcatggcagccacccgtgttggccgaaaggaatggtatcattaccaagtacaccctcctgtaccgggacataaacatacccctcctgcccatggaacaactgatcgtcccagctgacaccacaatgaccctcactggactgaaacccgacactacctacgacgtcaaggttagagctcacacctctaagggccctggcccatatagcccttctgtgcagttccgtacactgccagtcgaccaggtatttgcgaaaaattttcatgtgaaagccgtgatgaaaacctcagtcctgctctcctgggaaattccagagaattataattcagctatgccatttaagatactatatgacgacggaaagatggtggaggaggtggacggccgagccacccagaagttgatcgttaacctgaagcccgagaagtcttattcctttgtcctcaccaataggggcaactccgcgggagggcttcagcaccgcgttaccgcgaagactgcgcctgacgttctgcggacgaagcccgcatttatcggaaaaactaatctggacgggatgattactgtgcagctgcctgaggtcccagccaacgagaatattaaaggttattacatcatcatcgtgccccttaaaaaaagccgcggaaaattcattaagccttgggagagccctgatgaaatggaactggatgaactccttaaggagatcagccgcaaaagacgatctattaggtatggcagggaggtggaactcaagccatacatcgctgcacacttcgatgtgctgcccaccgagttcacattaggggacgacaaacattacgggggttttacaaacaaacagttgcagagcgggcaggagtatgtgttctttgtgcttgccgtcatggagcatgcagaaagtaaaatgtatgcaacatctccatactctgatcccgtggtcagcatggatctggatcctcagccaatcacagatgaagaagaggggttaatctgggtcgtggggccagttctggccgtcgtattcattatctgtattgtgattgcaatacttctctacaaacggaagcgagccgaatctgacagccggaagagctcaataccgaataacaaggaaatcccctcccaccaccctaccgatcctgtggaactgcggaggctgaattttcagactcctggcatggccagccacccccctatccctatcctggaactggcagaccatattgagcgactgaaggctaatgataacctgaagttttcgcaagagtatgaaagtattgaccctggacagcagtttacctgggaacattccaacctcgaagttaacaagccgaaaaaccgatacgccaatgtcattgcctatgatcatagccgagtactgctttctgcaatcgaaggaataccgggaagtgattatgttaatgcaaactatatagatggttaccgaaagcagaatgcctatattgcgacgcagggctctcttcctgaaacctttggagacttttggaggatgatctgggaacagcgatccgcgacagtcgttatgatgacaaagctggaagaacgatctagagtgaagtgtgaccagtactggccctcgcgcggtacagagacacatggcttggtgcaggtgacactcctggacactgtcgagctggcgacctactgcgtgcggacgtttgccttatataaaaacggcagcagtgagaagagggaggtccgccaattccagtttacagcatggcctgaccatggtgttccagagcacccaacaccttttcttgctttcctccggcgagtcaagacatgtaaccctccagacgctggccctatggttgtacactgctctgccggagtggggagaacggggtgctttattgttattgacgcgatgttggaacgtataaaacacgaaaagaccgttgatatttatggtcacgtgaccctgatgcgcgctcagcgcaactatatggttcagactgaggatcaatacattttcattcacgatgcccttctggaggccgtcacctgcggcaatactgaagtgccagccagaaacctgtacgcttacattcaaaagctgacccagatcgagaccggagagaatgtcaccggtatggaactcgaattcaagaggctggctagttctaaagctcatacctctcgctttatttcggccaatctgccttgcaacaaatttaagaacagacttgtgaatattatgccctatgagtcgacccgcgtgtgtctccagccaatacgcggagttgaggggtcagattatatcaacgccagcttcatcgacggctaccggcaacagaaggcctacatcgcaacacaaggtcctctggccgaaaccacagaagatttttggagaatgctgtgggaacataatagtacgatcgtcgtgatgctaaccaaactgcgggaaatgggcagggagaaatgccaccaatactggcctgccgaaaggtctgcacgttaccaatacttcgtggtcgatcccatggccgagtacaacatgccccaatatattctgcgagagttcaaagtaaccgacgccagagacgggcagagcagaaccgtacgacagtttcagttcacagactggccagaacagggtgttcctaagagcggagaaggatttatagactttattggccaggtgcataagacgaaggagcagtttgggcaggacggaccaatttccgtccattgttccgccggagtcgggcgaacgggcgtgttcataacgctttctatagtgttagaacggatgaggtatgagggcgtggtggacatttttcagacggtgaaaatgctgagaacccagcggcctgcaatggtgcagacagaagaccagtaccagtttagctatcgagcagcccttgaatacctcggttccttcgatcattacgctaccta

SEQ ID NO: 132610 - DNA, 9472 bp, Artificial Sequence
  derived and/or modified sequence
caggctctgaaagtgttccagctgaaatttcagatcggacagactcgctgcggctccggaggcagtgattccaagctgctcgcgcacgctgctgccaagctgcaggatggtgcacgtagccaggctgctgctgctgctcctcactttcttcctccgcacggatgctgagacacctccaaggtttacacgaacacccgttgatcagacaggggtctctggcggagttgcctctttcatctgccaagctacgggagacccaagacctaaaattgtctggaacaaaaaaggaaagaaagtcagcaatcagagatttgaggtaatagagtttgacgatgggtctggatcagttctcagaatacaacccttacggactccgagggatgaggccatttatgaatgtgtggcctcaaataatgtgggagaaataagtgtatccaccagactcacagttttgcgggaagatcaaattcccaggggcttccctaccattgacatgggcccacagttgaaggtggttgagcgtactcgcacggccaccatgctttgtgcagccagtggtaatccggatccagaaatcacttggtttaaagatttcttacctgtggacacaagcaacaacaatggtcgtattaagcagttacgatcagaatctattggtggtacaccaataagaggagcccttcagattgagcagagtgaagagtctgaccaaggaaaatatgagtgtgttgccaccaacagcgcgggcactcgctattccgctcctgccaatttatatgtcagagagctgcgagaagttcgccgtgtcccaccaagattctctatcccacccactaatcatgaaatcatgccaggcggaagcgttaatatcacctgtgtggccgtggggtcaccaatgccttatgtaaagtggatgttgggggcagaagatctgacacctgaagatgatatgccaataggaagaaatgtgctagaactgaatgatgtaagacagtcagcaaattacacctgtgttgctatgtcaacactgggtgtcattgaagcaatagcacagatcactgtcaaagccttacccaaacctccaggaactcctgtagtgaccgagagcacagctacaagcatcacactgacgtgggactctgggaaccctgagcctgtttcttattacataattcagcataaacctaaaaactctgaggaactttacaaagaaattgatggggtggcgaccacacgctacagtgtcgctggactaagtccctactcggattatgaattcagggttgttgctgtcaataacattgggcgggggcctcccagcgaacctgtgctaacacaaacctcagagcaagcaccatccagtgccccgagggatgtccaggcacgaatgttgagttcgaccaccattttggtacagtggaaggaacctgaagagccaaatggacagatccaaggatatagagtttattatacaatggatcccactcaacatgtcaacaactggatgaaacacaatgtagctgacagccaaatcactactattggcaacttagtgccccagaaaacatattctgtcaaagtcctggcttttacctcaattggagatggtcccctttcaagtgacatacaagtcatcactcagacaggagtaccagggcagccactaaacttcaaagcagaacctgagtctgaaacaagtattttgctctcttggacacctccacgttcagataccattgccaactatgaactggtctacaaagatggggagcatggagaggagcaacgaattaccattgagccagggacatcatataggctgcaaggactgaaaccaaacagcttatactatttccgtctggctgcacgctcccctcaaggcctgggtgcttctactgcagaaatatcagctagaaccatgcagtcaaagccgtcagctcctcctcaagacattagttgcaccagcccaagttccactagtattttggtaagttggcaacctccaccagtggaaaaacagaatggcattatcactgaatactccatcaagtacactgcagtggatggggaagatgacaagcctcacgagattttgggaattccttcggacactaccaaataccttttggaacagctggaaaaatggactgaataccggatcactgtgacagcccatacagatgtcggccctggccctgagagcttgtccgtgttgattcgaaccaatgaagatgttcctagtggtcctcctcgcaaagtcgaggtagaggctgtcaactcaacatctgttaaagtctcatggcgctcacccgtgcccaataaacagcatggccagataagaggatatcaggtgcattatgtgaggatggaaaatggtgagcccaagggccagcccatgctgaaagatgtcatgctggctgatgcacagtgggaatttgatgatactactgaacatgacatgatcatttctgggctccagcctgaaacttcctactccctcaccgtcacagcctacacaaccaaaggagatggtgctcgcagcaagcccaaactggtgtccaccactggggcagttccagggaaacctcggcttgtgattaaccacactcagatgaatactgctcttattcagtggcaccctccggtggacacatttggacctcttcagggctaccgtctaaaatttggccgcaaggatatggagccacttactactcttgagttctctgaaaaagaagatcactttacagctacagacatccacaagggagcatcatacgtcttcaggctctcagccagaaacaaagtgggctttggggaggagatggtgaaggagatttccattccagaagaagtaccaactggattccctcaaaaccttcactcagaaggcaccacttcaacctccgtccagttatcttggcaaccacctgtcctggcagagagaaatggcattatcaccaagtatacccttctttatagggatatcaacatcccccttctcccgatggagcagcttattgttccagctgacaccactatgacactcactggcttaaaaccagataccacatacgatgtaaaagtacgtgctcatacgagcaaagggcccgggccatatagtcccagtgtccagttcaggacactgcctgtggatcaagtgtttgcaaaaaattttcatgtcaaagcagtaatgaagacttccgtgttgctgtcttgggagattccagagaattataactccgccatgcctttcaaaattctttatgatgatgggaaaatggtagaagaagtggatggccgagccacacagaagttaattgtcaacctgaagcctgagaaatcatattcatttgtgctgacaaatcgtggaaacagtgctggtgggctgcagcacagggtcacggcaaagactgcaccagatgtattacgtaccaagcctgccttcattgggaagaccaacttggatggcatgattactgtgcaactgcctgaagtacctgcaaatgagaatataaaaggttactacataataattgtgcctttgaagaaatctcgcgggaaatttatcaagccatgggagagtccagatgaaatggaattagatgagctgcttaaggagatatctaggaagcgcagaagcatccgttatgggagagaagttgaattaaagccatatattgccgctcactttgatgtccttcccactgagttcaccctgggggatgacaagcattatggtggatttacaaacaagcaactccaaagtggtcaagaatatgtcttctttgtgttagcagtaatggaacatgcagagtctaagatgtatgcaaccagcccttactccgaccccgtggtgtcaatggatctggatccgcagccaatcacggatgaagaagaaggcttgatctgggttgtaggtcctgtccttgcagtggtctttatcatctgcattgtcattgctattcttctttataaaaggaagagggcagagtccgactctagaaaaagcagcataccgaacaataaggagatcccttcacaccacccaacagaccctgtagaactgaggcgccttaactttcaaacaccgggtatggctagccatcctccaatacccatcttggaacttgcagaccacattgaaagattgaaagcaaatgacaacttgaagttttcccaggaatatgagtcaattgaccctggccagcagttcacttgggaacattcaaacttggaagtaaacaaaccaaagaatagatacgcgaatgtaatcgcatatgatcattcccgggttctcctatcagctatagaagggatcccaggaagtgactatgtgaatgccaactacatagatgggtataggaagcaaaatgcctatattgcaacacagggatctctccccgaaacatttggggacttttggagaatgatatgggaacaacggagtgccacagttgtcatgatgacaaaactagaagaaagatcaagggtgaagtgtgaccagtattggcctagcagaggcacagaaacccacggactcgttcaagtaacgctgcttgatactgtggagctggccacatattgtgttcgaacatttgcactttacaagaatggttcaagtgagaagagagaagtgagacaattccagttcaccgcctggcctgatcatggtgttccagaacaccctacaccttttctagctttcttacgtagagtcaaaacctgtaaccctcccgatgctggtccgatggttgtgcactgcagtgcgggagttggccggactggttgcttcatcgtcatagatgccatgttagaaagaataaagcatgaaaaaactgtagatatttatggccatgtaactttaatgagagcccagaggaactatatggttcaaacagaagaccaatacatctttatccatgatgcactgttagaagcagtgacttgtggaaataccgaagtgccagctagaaacttgtatgcctacattcagaagctgacacaaatagaaacgggagagaatgtcacaggaatggagctcgaatttaagcgtctagccagctcaaaagctcacacctcaaggtttatcagtgccaatcttccatgtaataaattcaaaaatcgccttgttaatattatgccatatgaatccacaagggtatgcctgcagcctatccgtggagtagaaggatctgattacatcaatgccagttttattgatggatacagacaacagaaagcctacatcgctacccaggggcccttggcagagaccactgaagacttctggcggatgctctgggaacacaattccaccatagttgtgatgctcaccaagctgcgtgaaatgggcagagagaaatgtcaccaatactggccagcagaacggtctgcaagataccagtactttgttgtagatcccatggctgagtacaacatgccacagtatatcctaagggaattcaaggtcacagatgccagggacggccagtcccgaacagtaaggcagttccagttcactgactggccagagcaaggagtgccaaagtccggagaaggatttattgacttcatcggccaagtccataaaacaaaagaacagtttggccaagatggacccatttcagtccattgcagcgcgggcgttggaagaactggagtcttcataacgctaagcattgttttggaaagaatgagatatgaaggagttgtagatatcttccagactgtcaaaatgttaagaacacaacgaccagctatggtacagacagaggatcaatatcagttttcctatcgtgccgcactagagtacctgggcagctttgaccactatgcaacgtagaaacccctgacccattctggatttttactacaggcccttcaatatccatggagtctcttctgagccatacagggcacttgagaagtccttcttaacttctagctaacaactacttagtgggactattacacacaaaacaaattaaaaacaaattattccaggtggaccaagaattcacagtttaataatctaacctgaaaaataatgaagagaatcctgactgatgaggcatctgaaggattttatttacagatacctcaaggattcaaaatcaagggaagaagaaatcacagcaaagaaccaccatcttattcaggattgcttgaaaggtgcaaggagaaattgccagaatgctgcagttcagcacaagatatgtgctggtgtggcttctcacaatgaaacggactctgctttgacatcgccccttcccaccatactgctcataataacattttagggggaaaggggagggaatgtttaaaaagaaagtccttgatttagttttttagtattgtaaagatactgctgacctgtgcttcatttctaactgtgtaaacttttttttaacaaaatgtatcattcgataaagtgaattttaaaaaagttacataactcttcatttttttatttccaaatcgtaggtttttttaagctgtagaactgttatctgtaatatcttgctgtagaaatatcaaatcatttgaaaatttgcacatttttgtgcaaaactcaatctacagtatcagtctcgtcagatatattaattttacacttcagttttgattggtgagaaagtacccattctcttcaaataatcaaagataattattattttgttttgtttttggaatcaacagggaggcgcaaagtataaagttgctgctaacatatatacatatatatccatattttataagggtgtctatgtatatatagacagtgtgtccacacaaaaaatagatacagttatcagtcagtcagttcttccatgatttagtttttttaaacgtagaaaagctattgtaaacatctctttccatttattcttaattttttgacatattggtatttctttaaagggaaatgaggaatgcacatcagtgattgattgtcaaacctcaccccctgatttcctacctaatctacccccacctaaccaatcaatcacatccacaaattgttttgtttgtttgttagtcaggcttccaacaaagttcaatatttctaacactctagtgcaataaaaattattattaaatagctaagaggtgtgcatgtgggaaaggtcagtgcatatccctttaggaggggagaatgttgtaatatatcagctatcgagttgtttaaaaaaagtgtattcaatcgtatattgtctatagtatgtgctatgaaatttgcatttatgatatgtaacaggggcaaagccaaattcatgttactctgttcagtcagaaacattttgtggcatacagcattcctgggaagtgctgtactttgtttcgttttggttttagttttgcatttagagtgccttataattgatgcctattttaatagcatttctttttagcttttggttcgtatttccattcactgttcgtatctgttactttctattaaagcattatctgtttaccacatgtacaaaaactctttgaataatatgcattcctagttttcagccaagtcggggatgttagtgattgtaccagcccaaagcacttggataatcagggcccttcttccttttataatcaatcatcaacatcagaaaaagctacttgttttatttatattcccttccaaatccgctctggaacatgcagtaactgcaccaaacttattttagtaacaaatatcattggcaactttggaatatatttgatattccattaggatttttctaaaaggggaaataaactatatatatatatgtatcttacccccaattcttccaacagaatttctataggaagccatggatgatggcataagtttgccacatattacatgattttaaataatcctcaaaatacccaaggaactcttaaagagttttggtatgagtatactactttggtttaattttagcttcatggatgttctgcatggaaggatttttgttttccacattttcccattgctagcagagtgaaatccaagagaccaaacatttgcaagcattgtatttgagcacttttgtaaaaaacaaagaaaaagaaaaaaaagaaaatatatataatactaaaaaaaagtatctagaaggctacctcagaatgagactctctaacctacatcagaaccagagaagaatgtgcactatgtgggtctgttatcattattttcttttagtttgtatctttttggagatttatccaagtgccagattactcagtgctataattttcttttagttaaacaaagggggtcagacagacattgcatcatccagacatgccttgttggacatgtagaatccgatggagcactgcacaccagaatgattggccaatgagcagcttctctccctgaaacaataactgcccatttggcaaagggaaagatgacaataatcagaagaagaaaatgaatgggatgcataccatagacgaacgaggcggagactattgcgggaatcttactgttcaggagctgttcctagaactaactcccttactgtcattgatgtgcattccactctgtgcttttctgtacaaccattcaagttttaatttcccaggtgaaccatctttatctgccattaccacaagctttcaagtttccagttattttcatcatcataaccagtacggtgctattatttacctatgtacgtgtagttatgtataattttgtaattagttacaatggtaaaaaaaatcaaaatatataaaaagtgatttgtacagaactttattttagctcttttttaaaaatgatttgcatggttagaaaacggcgaggacagccaggggagggaagggcctctagggaactttgcactttctatacctttgtactatgcactgccctattgattctacacccaataatgatattacttgaacccatctgtaagaaactgcttcggaaattcatttgtgtgtatgtaaataacacaacatagaaacaggaagggaaaaaagtctgcagtaatgcacgtattttttttctttcctgtttattttcggttttgctttaagtccttttatttttaattccctttttgtttttctttttgggttttggttccttttgggtttatgggtgccctgatactccagcagagatcagaaggctacagatccattctatccatccgttatgtggctttgccatcccagcttggagtgtctttacaaagataataacagttgtgttctttgctctcgttttggatgcatagactgaaaaattaaaacaaataacttgtaaaatggcttgttaaaaaatacaattacctctaattagtagtacgcgtaaatgttttacagaatgaaaggcgtgctttttattttcttacttcgttacattggtggcgaaagaagtctgtatgaaaatcagttctttgctgacacaagttccatttgttacaaatgaattctaataaaaatgtcagtgttatgc

SEQ ID NO: 132611 - DNA, 9430 bp, Artificial Sequence
  derived and/or modified sequence
gctctgaaagtgttccagctgaaatttcagatcggacagactcgctgcggctccggaggcagtgattccaagctgctcgcgcacgctgctgccaagctgcaggatggtgcacgtagccaggctgctgctgctgctcctcactttcttcctccgcacggatgctgagacacctccaaggtttacacgaacacccgttgatcagacaggggtctctggcggagttgcctctttcatctgccaagctacgggagacccaagacctaaaattgtctggaacaaaaaaggaaagaaagtcagcaatcagagatttgaggtaatagagtttgacgatgggtctggatcagttctcagaatacaacccttacggactccgagggatgaggccatttatgaatgtgtggcctcaaataatgtgggagaaataagtgtatccaccagactcacagttttgcgggaagatcaaattcccaggggcttccctaccattgacatgggcccacagttgaaggtggttgagcgtactcgcacggccaccatgctttgtgcagccagtggtaatccggatccagaaatcacttggtttaaagatttcttacctgtggacacaagcaacaacaatggtcgtattaagcagttacgatcaggagcccttcagattgagcagagtgaagagtctgaccaaggaaaatatgagtgtgttgccaccaacagcgcgggcactcgctattccgctcctgccaatttatatgtcagagttcgccgtgtcccaccaagattctctatcccacccactaatcatgaaatcatgccaggcggaagcgttaatatcacctgtgtggccgtggggtcaccaatgccttatgtaaagtggatgttgggggcagaagatctgacacctgaagatgatatgccaataggaagaaatgtgctagaactgaatgatgtaagacagtcagcaaattacacctgtgttgctatgtcaacactgggtgtcattgaagcaatagcacagatcactgtcaaagccttacccaaacctccaggaactcctgtagtgaccgagagcacagctacaagcatcacactgacgtgggactctgggaaccctgagcctgtttcttattacataattcagcataaacctaaaaactctgaggaactttacaaagaaattgatggggtggcgaccacacgctacagtgtcgctggactaagtccctactcggattatgaattcagggttgttgctgtcaataacattgggcgggggcctcccagcgaacctgtgctaacacaaacctcagagcaagcaccatccagtgccccgagggatgtccaggcacgaatgttgagttcgaccaccattttggtacagtggaaggaacctgaagagccaaatggacagatccaaggatatagagtttattatacaatggatcccactcaacatgtcaacaactggatgaaacacaatgtagctgacagccaaatcactactattggcaacttagtgccccagaaaacatattctgtcaaagtcctggcttttacctcaattggagatggtcccctttcaagtgacatacaagtcatcactcagacaggagtaccagggcagccactaaacttcaaagcagaacctgagtctgaaacaagtattttgctctcttggacacctccacgttcagataccattgccaactatgaactggtctacaaagatggggagcatggagaggagcaacgaattaccattgagccagggacatcatataggctgcaaggactgaaaccaaacagcttatactatttccgtctggctgcacgctcccctcaaggcctgggtgcttctactgcagaaatatcagctagaaccatgcagtcaaagccgtcagctcctcctcaagacattagttgcaccagcccaagttccactagtattttggtaagttggcaacctccaccagtggaaaaacagaatggcattatcactgaatactccatcaagtacactgcagtggatggggaagatgacaagcctcacgagattttgggaattccttcggacactaccaaataccttttggaacagctggaaaaatggactgaataccggatcactgtgacagcccatacagatgtcggccctggccctgagagcttgtccgtgttgattcgaaccaatgaagatgttcctagtggtcctcctcgcaaagtcgaggtagaggctgtcaactcaacatctgttaaagtctcatggcgctcacccgtgcccaataaacagcatggccagataagaggatatcaggtgcattatgtgaggatggaaaatggtgagcccaagggccagcccatgctgaaagatgtcatgctggctgatgcacagtgggaatttgatgatactactgaacatgacatgatcatttctgggctccagcctgaaacttcctactccctcaccgtcacagcctacacaaccaaaggagatggtgctcgcagcaagcccaaactggtgtccaccactggggcagttccagggaaacctcggcttgtgattaaccacactcagatgaatactgctcttattcagtggcaccctccggtggacacatttggacctcttcagggctaccgtctaaaatttggccgcaaggatatggagccacttactactcttgagttctctgaaaaagaagatcactttacagctacagacatccacaagggagcatcatacgtcttcaggctctcagccagaaacaaagtgggctttggggaggagatggtgaaggagatttccattccagaagaagtaccaactggattccctcaaaaccttcactcagaaggcaccacttcaacctccgtccagttatcttggcaaccacctgtcctggcagagagaaatggcattatcaccaagtatacccttctttatagggatatcaacatcccccttctcccgatggagcagcttattgttccagctgacaccactatgacactcactggcttaaaaccagataccacatacgatgtaaaagtacgtgctcatacgagcaaagggcccgggccatatagtcccagtgtccagttcaggacactgcctgtggatcaagtgtttgcaaaaaattttcatgtcaaagcagtaatgaagacttccgtgttgctgtcttgggagattccagagaattataactccgccatgcctttcaaaattctttatgatgatgggaaaatggtagaagaagtggatggccgagccacacagaagttaattgtcaacctgaagcctgagaaatcatattcatttgtgctgacaaatcgtggaaacagtgctggtgggctgcagcacagggtcacggcaaagactgcaccagatgtattacgtaccaagcctgccttcattgggaagaccaacttggatggcatgattactgtgcaactgcctgaagtacctgcaaatgagaatataaaaggttactacataataattgtgcctttgaagaaatctcgcgggaaatttatcaagccatgggagagtccagatgaaatggaattagatgagctgcttaaggagatatctaggaagcgcagaagcatccgttatgggagagaagttgaattaaagccatatattgccgctcactttgatgtccttcccactgagttcaccctgggggatgacaagcattatggtggatttacaaacaagcaactccaaagtggtcaagaatatgtcttctttgtgttagcagtaatggaacatgcagagtctaagatgtatgcaaccagcccttactccgaccccgtggtgtcaatggatctggatccgcagccaatcacggatgaagaagaaggcttgatctgggttgtaggtcctgtccttgcagtggtctttatcatctgcattgtcattgctattcttctttataaaaggaagagggcagagtccgactctagaaaaagcagcataccgaacaataaggagatcccttcacaccacccaacagaccctgtagaactgaggcgccttaactttcaaacaccgggtatggctagccatcctccaatacccatcttggaacttgcagaccacattgaaagattgaaagcaaatgacaacttgaagttttcccaggaatatgagtcaattgaccctggccagcagttcacttgggaacattcaaacttggaagtaaacaaaccaaagaatagatacgcgaatgtaatcgcatatgatcattcccgggttctcctatcagctatagaagggatcccaggaagtgactatgtgaatgccaactacatagatgggtataggaagcaaaatgcctatattgcaacacagggatctctccccgaaacatttggggacttttggagaatgatatgggaacaacggagtgccacagttgtcatgatgacaaaactagaagaaagatcaagggtgaagtgtgaccagtattggcctagcagaggcacagaaacccacggactcgttcaagtaacgctgcttgatactgtggagctggccacatattgtgttcgaacatttgcactttacaagaatggttcaagtgagaagagagaagtgagacaattccagttcaccgcctggcctgatcatggtgttccagaacaccctacaccttttctagctttcttacgtagagtcaaaacctgtaaccctcccgatgctggtccgatggttgtgcactgcagtgcgggagttggccggactggttgcttcatcgtcatagatgccatgttagaaagaataaagcatgaaaaaactgtagatatttatggccatgtaactttaatgagagcccagaggaactatatggttcaaacagaagaccaatacatctttatccatgatgcactgttagaagcagtgacttgtggaaataccgaagtgccagctagaaacttgtatgcctacattcagaagctgacacaaatagaaacgggagagaatgtcacaggaatggagctcgaatttaagcgtctagccagctcaaaagctcacacctcaaggtttatcagtgccaatcttccatgtaataaattcaaaaatcgccttgttaatattatgccatatgaatccacaagggtatgcctgcagcctatccgtggagtagaaggatctgattacatcaatgccagttttattgatggatacagacaacagaaagcctacatcgctacccaggggcccttggcagagaccactgaagacttctggcggatgctctgggaacacaattccaccatagttgtgatgctcaccaagctgcgtgaaatgggcagagagaaatgtcaccaatactggccagcagaacggtctgcaagataccagtactttgttgtagatcccatggctgagtacaacatgccacagtatatcctaagggaattcaaggtcacagatgccagggacggccagtcccgaacagtaaggcagttccagttcactgactggccagagcaaggagtgccaaagtccggagaaggatttattgacttcatcggccaagtccataaaacaaaagaacagtttggccaagatggacccatttcagtccattgcagcgcgggcgttggaagaactggagtcttcataacgctaagcattgttttggaaagaatgagatatgaaggagttgtagatatcttccagactgtcaaaatgttaagaacacaacgaccagctatggtacagacagaggatcaatatcagttttcctatcgtgccgcactagagtacctgggcagctttgaccactatgcaacgtagaaacccctgacccattctggatttttactacaggcccttcaatatccatggagtctcttctgagccatacagggcacttgagaagtccttcttaacttctagctaacaactacttagtgggactattacacacaaaacaaattaaaaacaaattattccaggtggaccaagaattcacagtttaataatctaacctgaaaaataatgaagagaatcctgactgatgaggcatctgaaggattttatttacagatacctcaaggattcaaaatcaagggaagaagaaatcacagcaaagaaccaccatcttattcaggattgcttgaaaggtgcaaggagaaattgccagaatgctgcagttcagcacaagatatgtgctggtgtggcttctcacaatgaaacggactctgctttgacatcgccccttcccaccatactgctcataataacattttagggggaaaggggagggaatgtttaaaaagaaagtccttgatttagttttttagtattgtaaagatactgctgacctgtgcttcatttctaactgtgtaaacttttttttaacaaaatgtatcattcgataaagtgaattttaaaaaagttacataactcttcatttttttatttccaaatcgtaggtttttttaagctgtagaactgttatctgtaatatcttgctgtagaaatatcaaatcatttgaaaatttgcacatttttgtgcaaaactcaatctacagtatcagtctcgtcagatatattaattttacacttcagttttgattggtgagaaagtacccattctcttcaaataatcaaagataattattattttgttttgtttttggaatcaacagggaggcgcaaagtataaagttgctgctaacatatatacatatatatccatattttataagggtgtctatgtatatatagacagtgtgtccacacaaaaaatagatacagttatcagtcagtcagttcttccatgatttagtttttttaaacgtagaaaagctattgtaaacatctctttccatttattcttaattttttgacatattggtatttctttaaagggaaatgaggaatgcacatcagtgattgattgtcaaacctcaccccctgatttcctacctaatctacccccacctaaccaatcaatcacatccacaaattgttttgtttgtttgttagtcaggcttccaacaaagttcaatatttctaacactctagtgcaataaaaattattattaaatagctaagaggtgtgcatgtgggaaaggtcagtgcatatccctttaggaggggagaatgttgtaatatatcagctatcgagttgtttaaaaaaagtgtattcaatcgtatattgtctatagtatgtgctatgaaatttgcatttatgatatgtaacaggggcaaagccaaattcatgttactctgttcagtcagaaacattttgtggcatacagcattcctgggaagtgctgtactttgtttcgttttggttttagttttgcatttagagtgccttataattgatgcctattttaatagcatttctttttagcttttggttcgtatttccattcactgttcgtatctgttactttctattaaagcattatctgtttaccacatgtacaaaaactctttgaataatatgcattcctagttttcagccaagtcggggatgttagtgattgtaccagcccaaagcacttggataatcagggcccttcttccttttataatcaatcatcaacatcagaaaaagctacttgttttatttatattcccttccaaatccgctctggaacatgcagtaactgcaccaaacttattttagtaacaaatatcattggcaactttggaatatatttgatattccattaggatttttctaaaaggggaaataaactatatatatatatgtatcttacccccaattcttccaacagaatttctataggaagccatggatgatggcataagtttgccacatattacatgattttaaataatcctcaaaatacccaaggaactcttaaagagttttggtatgagtatactactttggtttaattttagcttcatggatgttctgcatggaaggatttttgttttccacattttcccattgctagcagagtgaaatccaagagaccaaacatttgcaagcattgtatttgagcacttttgtaaaaaacaaagaaaaagaaaaaaaagaaaatatatataatactaaaaaaaagtatctagaaggctacctcagaatgagactctctaacctacatcagaaccagagaagaatgtgcactatgtgggtctgttatcattattttcttttagtttgtatctttttggagatttatccaagtgccagattactcagtgctataattttcttttagttaaacaaagggggtcagacagacattgcatcatccagacatgccttgttggacatgtagaatccgatggagcactgcacaccagaatgattggccaatgagcagcttctctccctgaaacaataactgcccatttggcaaagggaaagatgacaataatcagaagaagaaaatgaatgggatgcataccatagacgaacgaggcggagactattgcgggaatcttactgttcaggagctgttcctagaactaactcccttactgtcattgatgtgcattccactctgtgcttttctgtacaaccattcaagttttaatttcccaggtgaaccatctttatctgccattaccacaagctttcaagtttccagttattttcatcatcataaccagtacggtgctattatttacctatgtacgtgtagttatgtataattttgtaattagttacaatggtaaaaaaaatcaaaatatataaaaagtgatttgtacagaactttattttagctcttttttaaaaatgatttgcatggttagaaaacggcgaggacagccaggggagggaagggcctctagggaactttgcactttctatacctttgtactatgcactgccctattgattctacacccaataatgatattacttgaacccatctgtaagaaactgcttcggaaattcatttgtgtgtatgtaaataacacaacatagaaacaggaagggaaaaaagtctgcagtaatgcacgtattttttttctttcctgtttattttcggttttgctttaagtccttttatttttaattccctttttgtttttctttttgggttttggttccttttgggtttatgggtgccctgatactccagcagagatcagaaggctacagatccattctatccatccgttatgtggctttgccatcccagcttggagtgtctttacaaagataataacagttgtgttctttgctctcgttttggatgcatagactgaaaaattaaaacaaataacttgtaaaatggcttgttaaaaaatacaattacctctaattagtagtacgcgtaaatgttttacagaatgaaaggcgtgctttttattttcttacttcgttacattggtggcgaaagaagtctgtatgaaaatcagttctttgctgacacaagttccatttgttacaaatgaattctaataaaaatgtcagtgttatgc

SEQ ID NO: 132612 - DNA, 10123 bp, Artificial Sequence
  derived and/or modified sequence
gcagtttattctgggcctgtgtggaatagaaagacaattctttatttgactggtaggaaagaaaagagaagactcctcagggtttccaaggaggactggagcggctgctttattaatgtaaaataatggatctagcccaatgtcctcatttttgcaggtgaagaagtgaagaatcaaggaagtaaaggacctgtctcaaagtcacacaactaggaaatcttgaggagtctgatacttttcatcctccagctataaaatcatcttgtagggggaagctgtacattggtggaaaataaaaggcaagcagttcctggcccgtgatattccagttagaggtgtctgactgacagcatgttggcaccgagggaagcgatgggcttcggctccaggtttctgtcctgagaccacagcagaatgtgccttggacaaaggcttggactccttgatcttctggtaacttcaaaaatctggtctcagggtggtgaactttttcttcgaattcctaacctgtgagcttacgatgatggtgcctgtccattaactgaacaactgtggttttgaacttcttgaggccagggactgtgtctgaaaacaccgacggtggctaactcaagggagacgtctggtgaacacccgtgggatctaaagaacaagctctgaaagtgttccagctgaaatttcagatcggacagactcgctgcggctccggaggcagtgattccaagctgctcgcgcacgctgctgccaagctgcaggatggtgcacgtagccaggctgctgctgctgctcctcactttcttcctccgcacggatgctgagacacctccaaggtttacacgaacacccgttgatcagacaggggtctctggcggagttgcctctttcatctgccaagctacgggagacccaagacctaaaattgtctggaacaaaaaaggaaagaaagtcagcaatcagagatttgaggtaatagagtttgacgatgggtctggatcagttctcagaatacaacccttacggactccgagggatgaggccatttatgaatgtgtggcctcaaataatgtgggagaaataagtgtatccaccagactcacagttttgcgggaagatcaaattcccaggggcttccctaccattgacatgggcccacagttgaaggtggttgagcgtactcgcacggccaccatgctttgtgcagccagtggtaatccggatccagaaatcacttggtttaaagatttcttacctgtggacacaagcaacaacaatggtcgtattaagcagttacgatcagaatctattggtggtacaccaataagaggagcccttcagattgagcagagtgaagagtctgaccaaggaaaatatgagtgtgttgccaccaacagcgcgggcactcgctattccgctcctgccaatttatatgtcagagagctgcgagaagttcgccgtgtcccaccaagattctctatcccacccactaatcatgaaatcatgccaggcggaagcgttaatatcacctgtgtggccgtggggtcaccaatgccttatgtaaagtggatgttgggggcagaagatctgacacctgaagatgatatgccaataggaagaaatgtgctagaactgaatgatgtaagacagtcagcaaattacacctgtgttgctatgtcaacactgggtgtcattgaagcaatagcacagatcactgtcaaagccttacccaaacctccaggaactcctgtagtgaccgagagcacagctacaagcatcacactgacgtgggactctgggaaccctgagcctgtttcttattacataattcagcataaacctaaaaactctgaggaactttacaaagaaattgatggggtggcgaccacacgctacagtgtcgctggactaagtccctactcggattatgaattcagggttgttgctgtcaataacattgggcgggggcctcccagcgaacctgtgctaacacaaacctcagagcaagcaccatccagtgccccgagggatgtccaggcacgaatgttgagttcgaccaccattttggtacagtggaaggaacctgaagagccaaatggacagatccaaggatatagagtttattatacaatggatcccactcaacatgtcaacaactggatgaaacacaatgtagctgacagccaaatcactactattggcaacttagtgccccagaaaacatattctgtcaaagtcctggcttttacctcaattggagatggtcccctttcaagtgacatacaagtcatcactcagacaggagtaccagggcagccactaaacttcaaagcagaacctgagtctgaaacaagtattttgctctcttggacacctccacgttcagataccattgccaactatgaactggtctacaaagatggggagcatggagaggagcaacgaattaccattgagccagggacatcatataggctgcaaggactgaaaccaaacagcttatactatttccgtctggctgcacgctcccctcaaggcctgggtgcttctactgcagaaatatcagctagaaccatgcagtcaaagccgtcagctcctcctcaagacattagttgcaccagcccaagttccactagtattttggtaagttggcaacctccaccagtggaaaaacagaatggcattatcactgaatactccatcaagtacactgcagtggatggggaagatgacaagcctcacgagattttgggaattccttcggacactaccaaataccttttggaacagctggaaaaatggactgaataccggatcactgtgacagcccatacagatgtcggccctggccctgagagcttgtccgtgttgattcgaaccaatgaagatgttcctagtggtcctcctcgcaaagtcgaggtagaggctgtcaactcaacatctgttaaagtctcatggcgctcacccgtgcccaataaacagcatggccagataagaggatatcaggtgcattatgtgaggatggaaaatggtgagcccaagggccagcccatgctgaaagatgtcatgctggctgatgcacagtgggaatttgatgatactactgaacatgacatgatcatttctgggctccagcctgaaacttcctactccctcaccgtcacagcctacacaaccaaaggagatggtgctcgcagcaagcccaaactggtgtccaccactggggcagttccagggaaacctcggcttgtgattaaccacactcagatgaatactgctcttattcagtggcaccctccggtggacacatttggacctcttcagggctaccgtctaaaatttggccgcaaggatatggagccacttactactcttgagttctctgaaaaagaagatcactttacagctacagacatccacaagggagcatcatacgtcttcaggctctcagccagaaacaaagtgggctttggggaggagatggtgaaggagatttccattccagaagaagtaccaactggattccctcaaaaccttcactcagaaggcaccacttcaacctccgtccagttatcttggcaaccacctgtcctggcagagagaaatggcattatcaccaagtatacccttctttatagggatatcaacatcccccttctcccgatggagcagcttattgttccagctgacaccactatgacactcactggcttaaaaccagataccacatacgatgtaaaagtacgtgctcatacgagcaaagggcccgggccatatagtcccagtgtccagttcaggacactgcctgtggatcaagtgtttgcaaaaaattttcatgtcaaagcagtaatgaagacttccgtgttgctgtcttgggagattccagagaattataactccgccatgcctttcaaaattctttatgatgatgggaaaatggtagaagaagtggatggccgagccacacagaagttaattgtcaacctgaagcctgagaaatcatattcatttgtgctgacaaatcgtggaaacagtgctggtgggctgcagcacagggtcacggcaaagactgcaccagatgtattacgtaccaagcctgccttcattgggaagaccaacttggatggcatgattactgtgcaactgcctgaagtacctgcaaatgagaatataaaaggttactacataataattgtgcctttgaagaaatctcgcgggaaatttatcaagccatgggagagtccagatgaaatggaattagatgagctgcttaaggagatatctaggaagcgcagaagcatccgttatgggagagaagttgaattaaagccatatattgccgctcactttgatgtccttcccactgagttcaccctgggggatgacaagcattatggtggatttacaaacaagcaactccaaagtggtcaagaatatgtcttctttgtgttagcagtaatggaacatgcagagtctaagatgtatgcaaccagcccttactccgaccccgtggtgtcaatggatctggatccgcagccaatcacggatgaagaagaaggcttgatctgggttgtaggtcctgtccttgcagtggtctttatcatctgcattgtcattgctattcttctttataaaaggaagagggcagagtccgactctagaaaaagcagcataccgaacaataaggagatcccttcacaccacccaacagaccctgtagaactgaggcgccttaactttcaaacaccgggtatggctagccatcctccaatacccatcttggaacttgcagaccacattgaaagattgaaagcaaatgacaacttgaagttttcccaggaatatgagtcaattgaccctggccagcagttcacttgggaacattcaaacttggaagtaaacaaaccaaagaatagatacgcgaatgtaatcgcatatgatcattcccgggttctcctatcagctatagaagggatcccaggaagtgactatgtgaatgccaactacatagatgggtataggaagcaaaatgcctatattgcaacacagggatctctccccgaaacatttggggacttttggagaatgatatgggaacaacggagtgccacagttgtcatgatgacaaaactagaagaaagatcaagggtgaagtgtgaccagtattggcctagcagaggcacagaaacccacggactcgttcaagtaacgctgcttgatactgtggagctggccacatattgtgttcgaacatttgcactttacaagaatggttcaagtgagaagagagaagtgagacaattccagttcaccgcctggcctgatcatggtgttccagaacaccctacaccttttctagctttcttacgtagagtcaaaacctgtaaccctcccgatgctggtccgatggttgtgcactgcagtgcgggagttggccggactggttgcttcatcgtcatagatgccatgttagaaagaataaagcatgaaaaaactgtagatatttatggccatgtaactttaatgagagcccagaggaactatatggttcaaacagaagaccaatacatctttatccatgatgcactgttagaagcagtgacttgtggaaataccgaagtgccagctagaaacttgtatgcctacattcagaagctgacacaaatagaaacgggagagaatgtcacaggaatggagctcgaatttaagcgtctagccagctcaaaagctcacacctcaaggtttatcagtgccaatcttccatgtaataaattcaaaaatcgccttgttaatattatgccatatgaatccacaagggtatgcctgcagcctatccgtggagtagaaggatctgattacatcaatgccagttttattgatggatacagacaacagaaagcctacatcgctacccaggggcccttggcagagaccactgaagacttctggcggatgctctgggaacacaattccaccatagttgtgatgctcaccaagctgcgtgaaatgggcagagagaaatgtcaccaatactggccagcagaacggtctgcaagataccagtactttgttgtagatcccatggctgagtacaacatgccacagtatatcctaagggaattcaaggtcacagatgccagggacggccagtcccgaacagtaaggcagttccagttcactgactggccagagcaaggagtgccaaagtccggagaaggatttattgacttcatcggccaagtccataaaacaaaagaacagtttggccaagatggacccatttcagtccattgcagcgcgggcgttggaagaactggagtcttcataacgctaagcattgttttggaaagaatgagatatgaaggagttgtagatatcttccagactgtcaaaatgttaagaacacaacgaccagctatggtacagacagaggatcaatatcagttttcctatcgtgccgcactagagtacctgggcagctttgaccactatgcaacgtagaaacccctgacccattctggatttttactacaggcccttcaatatccatggagtctcttctgagccatacagggcacttgagaagtccttcttaacttctagctaacaactacttagtgggactattacacacaaaacaaattaaaaacaaattattccaggtggaccaagaattcacagtttaataatctaacctgaaaaataatgaagagaatcctgactgatgaggcatctgaaggattttatttacagatacctcaaggattcaaaatcaagggaagaagaaatcacagcaaagaaccaccatcttattcaggattgcttgaaaggtgcaaggagaaattgccagaatgctgcagttcagcacaagatatgtgctggtgtggcttctcacaatgaaacggactctgctttgacatcgccccttcccaccatactgctcataataacattttagggggaaaggggagggaatgtttaaaaagaaagtccttgatttagttttttagtattgtaaagatactgctgacctgtgcttcatttctaactgtgtaaacttttttttaacaaaatgtatcattcgataaagtgaattttaaaaaagttacataactcttcatttttttatttccaaatcgtaggtttttttaagctgtagaactgttatctgtaatatcttgctgtagaaatatcaaatcatttgaaaatttgcacatttttgtgcaaaactcaatctacagtatcagtctcgtcagatatattaattttacacttcagttttgattggtgagaaagtacccattctcttcaaataatcaaagataattattattttgttttgtttttggaatcaacagggaggcgcaaagtataaagttgctgctaacatatatacatatatatccatattttataagggtgtctatgtatatatagacagtgtgtccacacaaaaaatagatacagttatcagtcagtcagttcttccatgatttagtttttttaaacgtagaaaagctattgtaaacatctctttccatttattcttaattttttgacatattggtatttctttaaagggaaatgaggaatgcacatcagtgattgattgtcaaacctcaccccctgatttcctacctaatctacccccacctaaccaatcaatcacatccacaaattgttttgtttgtttgttagtcaggcttccaacaaagttcaatatttctaacactctagtgcaataaaaattattattaaatagctaagaggtgtgcatgtgggaaaggtcagtgcatatccctttaggaggggagaatgttgtaatatatcagctatcgagttgtttaaaaaaagtgtattcaatcgtatattgtctatagtatgtgctatgaaatttgcatttatgatatgtaacaggggcaaagccaaattcatgttactctgttcagtcagaaacattttgtggcatacagcattcctgggaagtgctgtactttgtttcgttttggttttagttttgcatttagagtgccttataattgatgcctattttaatagcatttctttttagcttttggttcgtatttccattcactgttcgtatctgttactttctattaaagcattatctgtttaccacatgtacaaaaactctttgaataatatgcattcctagttttcagccaagtcggggatgttagtgattgtaccagcccaaagcacttggataatcagggcccttcttccttttataatcaatcatcaacatcagaaaaagctacttgttttatttatattcccttccaaatccgctctggaacatgcagtaactgcaccaaacttattttagtaacaaatatcattggcaactttggaatatatttgatattccattaggatttttctaaaaggggaaataaactatatatatatatgtatcttacccccaattcttccaacagaatttctataggaagccatggatgatggcataagtttgccacatattacatgattttaaataatcctcaaaatacccaaggaactcttaaagagttttggtatgagtatactactttggtttaattttagcttcatggatgttctgcatggaaggatttttgttttccacattttcccattgctagcagagtgaaatccaagagaccaaacatttgcaagcattgtatttgagcacttttgtaaaaaacaaagaaaaagaaaaaaaagaaaatatatataatactaaaaaaaagtatctagaaggctacctcagaatgagactctctaacctacatcagaaccagagaagaatgtgcactatgtgggtctgttatcattattttcttttagtttgtatctttttggagatttatccaagtgccagattactcagtgctataattttcttttagttaaacaaagggggtcagacagacattgcatcatccagacatgccttgttggacatgtagaatccgatggagcactgcacaccagaatgattggccaatgagcagcttctctccctgaaacaataactgcccatttggcaaagggaaagatgacaataatcagaagaagaaaatgaatgggatgcataccatagacgaacgaggcggagactattgcgggaatcttactgttcaggagctgttcctagaactaactcccttactgtcattgatgtgcattccactctgtgcttttctgtacaaccattcaagttttaatttcccaggtgaaccatctttatctgccattaccacaagctttcaagtttccagttattttcatcatcataaccagtacggtgctattatttacctatgtacgtgtagttatgtataattttgtaattagttacaatggtaaaaaaaatcaaaatatataaaaagtgatttgtacagaactttattttagctcttttttaaaaatgatttgcatggttagaaaacggcgaggacagccaggggagggaagggcctctagggaactttgcactttctatacctttgtactatgcactgccctattgattctacacccaataatgatattacttgaacccatctgtaagaaactgcttcggaaattcatttgtgtgtatgtaaataacacaacatagaaacaggaagggaaaaaagtctgcagtaatgcacgtattttttttctttcctgtttattttcggttttgctttaagtccttttatttttaattccctttttgtttttctttttgggttttggttccttttgggtttatgggtgccctgatactccagcagagatcagaaggctacagatccattctatccatccgttatgtggctttgccatcccagcttggagtgtctttacaaagataataacagttgtgttctttgctctcgttttggatgcatagactgaaaaattaaaacaaataacttgtaaaatggcttgttaaaaaatacaattacctctaattagtagtacgcgtaaatgttttacagaatgaaaggcgtgctttttattttcttacttcgttacattggtggcgaaagaagtctgtatgaaaatcagttctttgctgacacaagttccatttgttacaaatgaattctaataaaaatgtcagtgttatgca

SEQ ID NO: 132613 - DNA, 6210 bp, Artificial Sequence
  derived and/or modified sequence
caggctctgaaagtgttccagctgaaatttcagatcggacagactcgctgcggctccggaggcagtgattccaagctgctcgcgcacgctgctgccaagctgcaggatggtgcacgtagccaggctgctgctgctgctcctcactttcttcctccgcacggatgctgagacacctccaaggtttacacgaacacccgttgatcagacaggggtctctggcggagttgcctctttcatctgccaagctacgggagacccaagacctaaaattgtctggaacaaaaaaggaaagaaagtcagcaatcagagatttgaggtaatagagtttgacgatgggtctggatcagttctcagaatacaacccttacggactccgagggatgaggccatttatgaatgtgtggcctcaaataatgtgggagaaataagtgtatccaccagactcacagttttgcgggaagatcaaattcccaggggcttccctaccattgacatgggcccacagttgaaggtggttgagcgtactcgcacggccaccatgctttgtgcagccagtggtaatccggatccagaaatcacttggtttaaagatttcttacctgtggacacaagcaacaacaatggtcgtattaagcagttacgatcagaatctattggtggtacaccaataagaggagcccttcagattgagcagagtgaagagtctgaccaaggaaaatatgagtgtgttgccaccaacagcgcgggcactcgctattccgctcctgccaatttatatgtcagagagctgcgagaagttcgccgtgtcccaccaagattctctatcccacccactaatcatgaaatcatgccaggcggaagcgttaatatcacctgtgtggccgtggggtcaccaatgccttatgtaaagtggatgttgggggcagaagatctgacacctgaagatgatatgccaataggaagaaatgtgctagaactgaatgatgtaagacagtcagcaaattacacctgtgttgctatgtcaacactgggtgtcattgaagcaatagcacagatcactgtcaaagccttacccaaacctccaggaactcctgtagtgaccgagagcacagctacaagcatcacactgacgtgggactctgggaaccctgagcctgtttcttattacataattcagcataaacctaaaaactctgaggaactttacaaagaaattgatggggtggcgaccacacgctacagtgtcgctggactaagtccctactcggattatgaattcagggttgttgctgtcaataacattgggcgggggcctcccagcgaacctgtgctaacacaaacctcagagcaagcaccatccagtgccccgagggatgtccaggcacgaatgttgagttcgaccaccattttggtacagtggaaggaacctgaagagccaaatggacagatccaaggatatagagtttattatacaatggatcccactcaacatgtcaacaactggatgaaacacaatgtagctgacagccaaatcactactattggcaacttagtgccccagaaaacatattctgtcaaagtcctggcttttacctcaattggagatggtcccctttcaagtgacatacaagtcatcactcagacaggagtaccagggcagccactaaacttcaaagcagaacctgagtctgaaacaagtattttgctctcttggacacctccacgttcagataccattgccaactatgaactggtctacaaagatggggagcatggagaggagcaacgaattaccattgagccagggacatcatataggctgcaaggactgaaaccaaacagcttatactatttccgtctggctgcacgctcccctcaaggcctgggtgcttctactgcagaaatatcagctagaaccatgcagtcaaagccgtcagctcctcctcaagacattagttgcaccagcccaagttccactagtattttggtaagttggcaacctccaccagtggaaaaacagaatggcattatcactgaatactccatcaagtacactgcagtggatggggaagatgacaagcctcacgagattttgggaattccttcggacactaccaaataccttttggaacagctggaaaaatggactgaataccggatcactgtgacagcccatacagatgtcggccctggccctgagagcttgtccgtgttgattcgaaccaatgaagatgttcctagtggtcctcctcgcaaagtcgaggtagaggctgtcaactcaacatctgttaaagtctcatggcgctcacccgtgcccaataaacagcatggccagataagaggatatcaggtgcattatgtgaggatggaaaatggtgagcccaagggccagcccatgctgaaagatgtcatgctggctgatgcacagtgggaatttgatgatactactgaacatgacatgatcatttctgggctccagcctgaaacttcctactccctcaccgtcacagcctacacaaccaaaggagatggtgctcgcagcaagcccaaactggtgtccaccactggggcagttccagggaaacctcggcttgtgattaaccacactcagatgaatactgctcttattcagtggcaccctccggtggacacatttggacctcttcagggctaccgtctaaaatttggccgcaaggatatggagccacttactactcttgagttctctgaaaaagaagatcactttacagctacagacatccacaagggagcatcatacgtcttcaggctctcagccagaaacaaagtgggctttggggaggagatggtgaaggagatttccattccagaagaagtaccaactggattccctcaaaaccttcactcagaaggcaccacttcaacctccgtccagttatcttggcaaccacctgtcctggcagagagaaatggcattatcaccaagtatacccttctttatagggatatcaacatcccccttctcccgatggagcagcttattgttccagctgacaccactatgacactcactggcttaaaaccagataccacatacgatgtaaaagtacgtgctcatacgagcaaagggcccgggccatatagtcccagtgtccagttcaggacactgcctgtggatcaagtgtttgcaaaaaattttcatgtcaaagcagtaatgaagacttccgtgttgctgtcttgggagattccagagaattataactccgccatgcctttcaaaattctttatgatgatgggaaaatggtagaagaagtggatggccgagccacacagaagttaattgtcaacctgaagcctgagaaatcatattcatttgtgctgacaaatcgtggaaacagtgctggtgggctgcagcacagggtcacggcaaagactgcaccagatgtattacgtaccaagcctgccttcattgggaagaccaacttggatggcatgattactgtgcaactgcctgaagtacctgcaaatgagaatataaaaggttactacataataattgtgcctttgaagaaatctcgcgggaaatttatcaagccatgggagagtccagatgaaatggaattagatgagctgcttaaggagatatctaggaagcgcagaagcatccgttatgggagagaagttgaattaaagccatatattgccgctcactttgatgtccttcccactgagttcaccctgggggatgacaagcattatggtggatttacaaacaagcaactccaaagtggtcaagaatatgtcttctttgtgttagcagtaatggaacatgcagagtctaagatgtatgcaaccagcccttactccgaccccgtggtgtcaatggatctggatccgcagccaatcacggatgaagaagaaggcttgatctgggttgtaggtcctgtccttgcagtggtctttatcatctgcattgtcattgctattcttctttataaaaggaagagggcagagtccgactctagaaaaagcagcataccgaacaataaggagatcccttcacaccacccaacagaccctgtagaactgaggcgccttaactttcaaacaccgggtatggctagccatcctccaatacccatcttggaacttgcagaccacattgaaagattgaaagcaaatgacaacttgaagttttcccaggaatatgagtcaattgaccctggccagcagttcacttgggaacattcaaacttggaagtaaacaaaccaaagaatagatacgcgaatgtaatcgcatatgatcattcccgggttctcctatcagctatagaagggatcccaggaagtgactatgtgaatgccaactacatagatgggtataggaagcaaaatgcctatattgcaacacagggatctctccccgaaacatttggggacttttggagaatgatatgggaacaacggagtgccacagttgtcatgatgacaaaactagaagaaagatcaagggtgaagtgtgaccagtattggcctagcagaggcacagaaacccacggactcgttcaagtaacgctgcttgatactgtggagctggccacatattgtgttcgaacatttgcactttacaagaatggttcaagtgagaagagagaagtgagacaattccagttcaccgcctggcctgatcatggtgttccagaacaccctacaccttttctagctttcttacgtagagtcaaaacctgtaaccctcccgatgctggtccgatggttgtgcactgcagtgcgggagttggccggactggttgcttcatcgtcatagatgccatgttagaaagaataaagcatgaaaaaactgtagatatttatggccatgtaactttaatgagagcccagaggaactatatggttcaaacagaagaccaatacatctttatccatgatgcactgttagaagcagtgacttgtggaaataccgaagtgccagctagaaacttgtatgcctacattcagaagctgacacaaatagaaacgggagagaatgtcacaggaatggagctcgaatttaagcgtctagccagctcaaaagctcacacctcaaggtttatcagtgccaatcttccatgtaataaattcaaaaatcgccttgttaatattatgccatatgaatccacaagggtatgcctgcagcctatccgtggagtagaaggatctgattacatcaatgccagttttattgatggatacagacaacagaaagcctacatcgctacccaggggcccttggcagagaccactgaagacttctggcggatgctctgggaacacaattccaccatagttgtgatgctcaccaagctgcgtgaaatgggcagagagaaatgtcaccaatactggccagcagaacggtctgcaagataccagtactttgttgtagatcccatggctgagtacaacatgccacagtatatcctaagggaattcaaggtcacagatgccagggacggccagtcccgaacagtaaggcagttccagttcactgactggccagagcaaggagtgccaaagtccggagaaggatttattgacttcatcggccaagtccataaaacaaaagaacagtttggccaagatggacccatttcagtccattgcagcgcgggcgttggaagaactggagtcttcataacgctaagcattgttttggaaagaatgagatatgaaggagttgtagatatcttccagactgtcaaaatgttaagaacacaacgaccagctatggtacagacagaggatcaatatcagttttcctatcgtgccgcactagagtacctgggcagctttgaccactatgcaacgtagaaacccctgacccattctggatttttactacaggcccttcaatatccatggagtctcttctgagccatacagggcacttgagaagtccttcttaacttctagctaacaactacttagtgggactattacacacaaaacaaattaaaaacaaattattccaggtggaccaaggactctgctttgacatcgccccttcccaccatactgctcataataacattttagggggaaaggggagggaatgtttaaaaagaaagtccttgatttagttttttagtattgtaaagatactgctgacctgtgcttcatttctaactgtgtaaacttttttttaacaaaatgtatcattcgataaagtgaatttt

SEQ ID NO: 132614 - DNA, 5739 bp, Artificial Sequence
  derived and/or modified sequence
atggtgcacgtggccagactgctgctgctgctgctgaccttcttcctgagaaccgacgccgagaccccccccagattcaccagaacccccgtggaccagaccggcgtgagcggcggcgtggccagcttcatctgccaggccaccggcgaccccagacccaagatcgtgtggaacaagaagggcaagaaggtgagcaaccagagattcgaggtgatcgagttcgacgacggcagcggcagcgtgctgagaatccagcccctgagaacccccagagacgaggccatctacgagtgcgtggccagcaacaacgtgggcgagatcagcgtgagcaccagactgaccgtgctgagagaggaccagatccccagaggcttccccaccatcgacatgggcccccagctgaaggtggtggagagaaccagaaccgccaccatgctgtgcgccgccagcggcaaccccgaccccgagatcacctggttcaaggacttcctgcccgtggacaccagcaacaacaacggcagaatcaagcagctgagaagcgagagcatcggcggcacccccatcagaggcgccctgcagatcgagcagagcgaggagagcgaccagggcaagtacgagtgcgtggccaccaacagcgccggcaccagatacagcgcccccgccaacctgtacgtgagagagctgagagaggtgagaagagtgccccccagattcagcatcccccccaccaaccacgagatcatgcccggcggcagcgtgaacatcacctgcgtggccgtgggcagccccatgccctacgtgaagtggatgctgggcgccgaggacctgacccccgaggacgacatgcccatcggcagaaacgtgctggagctgaacgacgtgagacagagcgccaactacacctgcgtggccatgagcaccctgggcgtgatcgaggccatcgcccagatcaccgtgaaggccctgcccaagccccccggcacccccgtggtgaccgagagcaccgccaccagcatcaccctgacctgggacagcggcaaccccgagcccgtgagctactacatcatccagcacaagcccaagaacagcgaggagctgtacaaggagatcgacggcgtggccaccaccagatacagcgtggccggcctgagcccctacagcgactacgagttcagagtggtggccgtgaacaacatcggcagaggcccccccagcgagcccgtgctgacccagaccagcgagcaggcccccagcagcgcccccagagacgtgcaggccagaatgctgagcagcaccaccatcctggtgcagtggaaggagcccgaggagcccaacggccagatccagggctacagagtgtactacaccatggaccccacccagcacgtgaacaactggatgaagcacaacgtggccgacagccagatcaccaccatcggcaacctggtgccccagaagacctacagcgtgaaggtgctggccttcaccagcatcggcgacggccccctgagcagcgacatccaggtgatcacccagaccggcgtgcccggccagcccctgaacttcaaggccgagcccgagagcgagaccagcatcctgctgagctggaccccccccagaagcgacaccatcgccaactacgagctggtgtacaaggacggcgagcacggcgaggagcagagaatcaccatcgagcccggcaccagctacagactgcagggcctgaagcccaacagcctgtactacttcagactggccgccagaagcccccagggcctgggcgccagcaccgccgagatcagcgccagaaccatgcagagcaagcccagcgcccccccccaggacatcagctgcaccagccccagcagcaccagcatcctggtgagctggcagcccccccccgtggagaagcagaacggcatcatcaccgagtacagcatcaagtacaccgccgtggacggcgaggacgacaagccccacgagatcctgggcatccccagcgacaccaccaagtacctgctggagcagctggagaagtggaccgagtacagaatcaccgtgaccgcccacaccgacgtgggccccggccccgagagcctgagcgtgctgatcagaaccaacgaggacgtgcccagcggcccccccagaaaggtggaggtggaggccgtgaacagcaccagcgtgaaggtgagctggagaagccccgtgcccaacaagcagcacggccagatcagaggctaccaggtgcactacgtgagaatggagaacggcgagcccaagggccagcccatgctgaaggacgtgatgctggccgacgcccagtgggagttcgacgacaccaccgagcacgacatgatcatcagcggcctgcagcccgagaccagctacagcctgaccgtgaccgcctacaccaccaagggcgacggcgccagaagcaagcccaagctggtgagcaccaccggcgccgtgcccggcaagcccagactggtgatcaaccacacccagatgaacaccgccctgatccagtggcacccccccgtggacaccttcggccccctgcagggctacagactgaagttcggcagaaaggacatggagcccctgaccaccctggagttcagcgagaaggaggaccacttcaccgccaccgacatccacaagggcgccagctacgtgttcagactgagcgccagaaacaaggtgggcttcggcgaggagatggtgaaggagatcagcatccccgaggaggtgcccaccggcttcccccagaacctgcacagcgagggcaccaccagcaccagcgtgcagctgagctggcagccccccgtgctggccgagagaaacggcatcatcaccaagtacaccctgctgtacagagacatcaacatccccctgctgcccatggagcagctgatcgtgcccgccgacaccaccatgaccctgaccggcctgaagcccgacaccacctacgacgtgaaggtgagagcccacaccagcaagggccccggcccctacagccccagcgtgcagttcagaaccctgcccgtggaccaggtgttcgccaagaacttccacgtgaaggccgtgatgaagaccagcgtgctgctgagctgggagatccccgagaactacaacagcgccatgcccttcaagatcctgtacgacgacggcaagatggtggaggaggtggacggcagagccacccagaagctgatcgtgaacctgaagcccgagaagagctacagcttcgtgctgaccaacagaggcaacagcgccggcggcctgcagcacagagtgaccgccaagaccgcccccgacgtgctgagaaccaagcccgccttcatcggcaagaccaacctggacggcatgatcaccgtgcagctgcccgaggtgcccgccaacgagaacatcaagggctactacatcatcatcgtgcccctgaagaagagcagaggcaagttcatcaagccctgggagagccccgacgagatggagctggacgagctgctgaaggagatcagcagaaagagaagaagcatcagatacggcagagaggtggagctgaagccctacatcgccgcccacttcgacgtgctgcccaccgagttcaccctgggcgacgacaagcactacggcggcttcaccaacaagcagctgcagagcggccaggagtacgtgttcttcgtgctggccgtgatggagcacgccgagagcaagatgtacgccaccagcccctacagcgaccccgtggtgagcatggacctggacccccagcccatcaccgacgaggaggagggcctgatctgggtggtgggccccgtgctggccgtggtgttcatcatctgcatcgtgatcgccatcctgctgtacaagagaaagagagccgagagcgacagcagaaagagcagcatccccaacaacaaggagatccccagccaccaccccaccgaccccgtggagctgagaagactgaacttccagacccccggcatggccagccacccccccatccccatcctggagctggccgaccacatcgagagactgaaggccaacgacaacctgaagttcagccaggagtacgagagcatcgaccccggccagcagttcacctgggagcacagcaacctggaggtgaacaagcccaagaacagatacgccaacgtgatcgcctacgaccacagcagagtgctgctgagcgccatcgagggcatccccggcagcgactacgtgaacgccaactacatcgacggctacagaaagcagaacgcctacatcgccacccagggcagcctgcccgagaccttcggcgacttctggagaatgatctgggagcagagaagcgccaccgtggtgatgatgaccaagctggaggagagaagcagagtgaagtgcgaccagtactggcccagcagaggcaccgagacccacggcctggtgcaggtgaccctgctggacaccgtggagctggccacctactgcgtgagaaccttcgccctgtacaagaacggcagcagcgagaagagagaggtgagacagttccagttcaccgcctggcccgaccacggcgtgcccgagcaccccacccccttcctggccttcctgagaagagtgaagacctgcaacccccccgacgccggccccatggtggtgcactgcagcgccggcgtgggcagaaccggctgcttcatcgtgatcgacgccatgctggagagaatcaagcacgagaagaccgtggacatctacggccacgtgaccctgatgagagcccagagaaactacatggtgcagaccgaggaccagtacatcttcatccacgacgccctgctggaggccgtgacctgcggcaacaccgaggtgcccgccagaaacctgtacgcctacatccagaagctgacccagatcgagaccggcgagaacgtgaccggcatggagctggagttcaagagactggccagcagcaaggcccacaccagcagattcatcagcgccaacctgccctgcaacaagttcaagaacagactggtgaacatcatgccctacgagagcaccagagtgtgcctgcagcccatcagaggcgtggagggcagcgactacatcaacgccagcttcatcgacggctacagacagcagaaggcctacatcgccacccagggccccctggccgagaccaccgaggacttctggagaatgctgtgggagcacaacagcaccatcgtggtgatgctgaccaagctgagagagatgggcagagagaagtgccaccagtactggcccgccgagagaagcgccagataccagtacttcgtggtggaccccatggccgagtacaacatgccccagtacatcctgagagagttcaaggtgaccgacgccagagacggccagagcagaaccgtgagacagttccagttcaccgactggcccgagcagggcgtgcccaagagcggcgagggcttcatcgacttcatcggccaggtgcacaagaccaaggagcagttcggccaggacggccccatcagcgtgcactgcagcgccggcgtgggcagaaccggcgtgttcatcaccctgagcatcgtgctggagagaatgagatacgagggcgtggtggacatcttccagaccgtgaagatgctgagaacccagagacccgccatggtgcagaccgaggaccagtaccagttcagctacagagccgccctggagtacctgggcagcttcgaccactacgccacctag

SEQ ID NO: 132615 - DNA, 5700 bp, Artificial Sequence
  derived and/or modified sequence
atggtgcacgtggccagactgctgctgctgctgctgaccttcttcctgagaaccgacgccgagaccccccccagattcaccagaacccccgtggaccagaccggcgtgagcggcggcgtggccagcttcatctgccaggccaccggcgaccccagacccaagatcgtgtggaacaagaagggcaagaaggtgagcaaccagagattcgaggtgatcgagttcgacgacggcagcggcagcgtgctgagaatccagcccctgagaacccccagagacgaggccatctacgagtgcgtggccagcaacaacgtgggcgagatcagcgtgagcaccagactgaccgtgctgagagaggaccagatccccagaggcttccccaccatcgacatgggcccccagctgaaggtggtggagagaaccagaaccgccaccatgctgtgcgccgccagcggcaaccccgaccccgagatcacctggttcaaggacttcctgcccgtggacaccagcaacaacaacggcagaatcaagcagctgagaagcggcgccctgcagatcgagcagagcgaggagagcgaccagggcaagtacgagtgcgtggccaccaacagcgccggcaccagatacagcgcccccgccaacctgtacgtgagagtgagaagagtgccccccagattcagcatcccccccaccaaccacgagatcatgcccggcggcagcgtgaacatcacctgcgtggccgtgggcagccccatgccctacgtgaagtggatgctgggcgccgaggacctgacccccgaggacgacatgcccatcggcagaaacgtgctggagctgaacgacgtgagacagagcgccaactacacctgcgtggccatgagcaccctgggcgtgatcgaggccatcgcccagatcaccgtgaaggccctgcccaagccccccggcacccccgtggtgaccgagagcaccgccaccagcatcaccctgacctgggacagcggcaaccccgagcccgtgagctactacatcatccagcacaagcccaagaacagcgaggagctgtacaaggagatcgacggcgtggccaccaccagatacagcgtggccggcctgagcccctacagcgactacgagttcagagtggtggccgtgaacaacatcggcagaggcccccccagcgagcccgtgctgacccagaccagcgagcaggcccccagcagcgcccccagagacgtgcaggccagaatgctgagcagcaccaccatcctggtgcagtggaaggagcccgaggagcccaacggccagatccagggctacagagtgtactacaccatggaccccacccagcacgtgaacaactggatgaagcacaacgtggccgacagccagatcaccaccatcggcaacctggtgccccagaagacctacagcgtgaaggtgctggccttcaccagcatcggcgacggccccctgagcagcgacatccaggtgatcacccagaccggcgtgcccggccagcccctgaacttcaaggccgagcccgagagcgagaccagcatcctgctgagctggaccccccccagaagcgacaccatcgccaactacgagctggtgtacaaggacggcgagcacggcgaggagcagagaatcaccatcgagcccggcaccagctacagactgcagggcctgaagcccaacagcctgtactacttcagactggccgccagaagcccccagggcctgggcgccagcaccgccgagatcagcgccagaaccatgcagagcaagcccagcgcccccccccaggacatcagctgcaccagccccagcagcaccagcatcctggtgagctggcagcccccccccgtggagaagcagaacggcatcatcaccgagtacagcatcaagtacaccgccgtggacggcgaggacgacaagccccacgagatcctgggcatccccagcgacaccaccaagtacctgctggagcagctggagaagtggaccgagtacagaatcaccgtgaccgcccacaccgacgtgggccccggccccgagagcctgagcgtgctgatcagaaccaacgaggacgtgcccagcggcccccccagaaaggtggaggtggaggccgtgaacagcaccagcgtgaaggtgagctggagaagccccgtgcccaacaagcagcacggccagatcagaggctaccaggtgcactacgtgagaatggagaacggcgagcccaagggccagcccatgctgaaggacgtgatgctggccgacgcccagtgggagttcgacgacaccaccgagcacgacatgatcatcagcggcctgcagcccgagaccagctacagcctgaccgtgaccgcctacaccaccaagggcgacggcgccagaagcaagcccaagctggtgagcaccaccggcgccgtgcccggcaagcccagactggtgatcaaccacacccagatgaacaccgccctgatccagtggcacccccccgtggacaccttcggccccctgcagggctacagactgaagttcggcagaaaggacatggagcccctgaccaccctggagttcagcgagaaggaggaccacttcaccgccaccgacatccacaagggcgccagctacgtgttcagactgagcgccagaaacaaggtgggcttcggcgaggagatggtgaaggagatcagcatccccgaggaggtgcccaccggcttcccccagaacctgcacagcgagggcaccaccagcaccagcgtgcagctgagctggcagccccccgtgctggccgagagaaacggcatcatcaccaagtacaccctgctgtacagagacatcaacatccccctgctgcccatggagcagctgatcgtgcccgccgacaccaccatgaccctgaccggcctgaagcccgacaccacctacgacgtgaaggtgagagcccacaccagcaagggccccggcccctacagccccagcgtgcagttcagaaccctgcccgtggaccaggtgttcgccaagaacttccacgtgaaggccgtgatgaagaccagcgtgctgctgagctgggagatccccgagaactacaacagcgccatgcccttcaagatcctgtacgacgacggcaagatggtggaggaggtggacggcagagccacccagaagctgatcgtgaacctgaagcccgagaagagctacagcttcgtgctgaccaacagaggcaacagcgccggcggcctgcagcacagagtgaccgccaagaccgcccccgacgtgctgagaaccaagcccgccttcatcggcaagaccaacctggacggcatgatcaccgtgcagctgcccgaggtgcccgccaacgagaacatcaagggctactacatcatcatcgtgcccctgaagaagagcagaggcaagttcatcaagccctgggagagccccgacgagatggagctggacgagctgctgaaggagatcagcagaaagagaagaagcatcagatacggcagagaggtggagctgaagccctacatcgccgcccacttcgacgtgctgcccaccgagttcaccctgggcgacgacaagcactacggcggcttcaccaacaagcagctgcagagcggccaggagtacgtgttcttcgtgctggccgtgatggagcacgccgagagcaagatgtacgccaccagcccctacagcgaccccgtggtgagcatggacctggacccccagcccatcaccgacgaggaggagggcctgatctgggtggtgggccccgtgctggccgtggtgttcatcatctgcatcgtgatcgccatcctgctgtacaagagaaagagagccgagagcgacagcagaaagagcagcatccccaacaacaaggagatccccagccaccaccccaccgaccccgtggagctgagaagactgaacttccagacccccggcatggccagccacccccccatccccatcctggagctggccgaccacatcgagagactgaaggccaacgacaacctgaagttcagccaggagtacgagagcatcgaccccggccagcagttcacctgggagcacagcaacctggaggtgaacaagcccaagaacagatacgccaacgtgatcgcctacgaccacagcagagtgctgctgagcgccatcgagggcatccccggcagcgactacgtgaacgccaactacatcgacggctacagaaagcagaacgcctacatcgccacccagggcagcctgcccgagaccttcggcgacttctggagaatgatctgggagcagagaagcgccaccgtggtgatgatgaccaagctggaggagagaagcagagtgaagtgcgaccagtactggcccagcagaggcaccgagacccacggcctggtgcaggtgaccctgctggacaccgtggagctggccacctactgcgtgagaaccttcgccctgtacaagaacggcagcagcgagaagagagaggtgagacagttccagttcaccgcctggcccgaccacggcgtgcccgagcaccccacccccttcctggccttcctgagaagagtgaagacctgcaacccccccgacgccggccccatggtggtgcactgcagcgccggcgtgggcagaaccggctgcttcatcgtgatcgacgccatgctggagagaatcaagcacgagaagaccgtggacatctacggccacgtgaccctgatgagagcccagagaaactacatggtgcagaccgaggaccagtacatcttcatccacgacgccctgctggaggccgtgacctgcggcaacaccgaggtgcccgccagaaacctgtacgcctacatccagaagctgacccagatcgagaccggcgagaacgtgaccggcatggagctggagttcaagagactggccagcagcaaggcccacaccagcagattcatcagcgccaacctgccctgcaacaagttcaagaacagactggtgaacatcatgccctacgagagcaccagagtgtgcctgcagcccatcagaggcgtggagggcagcgactacatcaacgccagcttcatcgacggctacagacagcagaaggcctacatcgccacccagggccccctggccgagaccaccgaggacttctggagaatgctgtgggagcacaacagcaccatcgtggtgatgctgaccaagctgagagagatgggcagagagaagtgccaccagtactggcccgccgagagaagcgccagataccagtacttcgtggtggaccccatggccgagtacaacatgccccagtacatcctgagagagttcaaggtgaccgacgccagagacggccagagcagaaccgtgagacagttccagttcaccgactggcccgagcagggcgtgcccaagagcggcgagggcttcatcgacttcatcggccaggtgcacaagaccaaggagcagttcggccaggacggccccatcagcgtgcactgcagcgccggcgtgggcagaaccggcgtgttcatcaccctgagcatcgtgctggagagaatgagatacgagggcgtggtggacatcttccagaccgtgaagatgctgagaacccagagacccgccatggtgcagaccgaggaccagtaccagttcagctacagagccgccctggagtacctgggcagcttcgaccactacgccacctag

SEQ ID NO: 132616 - protein, 1445 aa, Artificial Sequence
  derived and/or modified sequence
MRRLLEPCWWILFLKITSSVLHYVVCFPALTEGYVGALHENRHGSAVQIRRRKASGDPYWAYSGAYGPEHWVTSSVSCGGRHQSPIDILDQYARVGEEYQELQLDGFDNESSNKTWMKNTGKTVAILLKDDYFVSGAGLPGRFKAEKVEFHWGHSNGSAGSEHSINGRRFPVEMQIFFYNPDDFDSFQTAISENRIIGAMAIFFQVSPRDNSALDPIIHGLKGVVHHEKETFLDPFVLRDLLPASLGSYYRYTGSLTTPPCSEIVEWIVFRRPVPISYHQLEAFYSIFTTEQQDHVKSVEYLRNNFRPQQRLHDRVVSKSAVRDSWNHDMTDFLENPLGTEASKVCSSPPIHMKVQPLNQTALQVSWSQPETIYHPPIMNYMISYSWTKNEDEKEKTFTKDSDKDLKATISHVSPDSLYLFRVQAVCRNDMRSDFSQTMLFQANTTRIFQGTRIVKTGVPTASPASSADMAPISSGSSTWTSSGIPFSFVSMATGMGPSSSGSQATVASVVTSTLLAGLGFGGGGISSFPSTVWPTRLPTAASASKQAARPVLATTEALASPGPDGDSSPTKDGEGTEEGEKDEKSESEDGEREHEEDGEKDSEKKEKSGVTHAAEERNQTEPSPTPSSPNRTAEGGHQTIPGHEQDHTAVPTDQTGGRRDAGPGLDPDMVTSTQVPPTATEEQYAGSDPKRPEMPSKKPMSRGDRFSEDSRFITVNPAEKNTSGMISRPAPGRMEWIIPLIVVSALTFVCLILLIAVLVYWRGCNKIKSKGFPRRFREVPSSGERGEKGSRKCFQTAHFYVEDSSSPRVVPNESIPIIPIPDDMEAIPVKQFVKHIGELYSNNQHGFSEDFEEVQRCTADMNITAEHSNHPENKHKNRYINILAYDHSRVKLRPLPGKDSKHSDYINANYVDGYNKAKAYIATQGPLKSTFEDFWRMIWEQNTGIIVMITNLVEKGRRKCDQYWPTENSEEYGNIIVTLKSTKIHACYTVRRFSIRNTKVKKGQKGNPKGRQNERVVIQYHYTQWPDMGVPEYALPVLTFVRRSSAARMPETGPVLVHCSAGVGRTGTYIVIDSMLQQIKDKSTVNVLGFLKHIRTQRNYLVQTEEQYIFIHDALLEAILGKETEVSSNQLHSYVNSILIPGVGGKTRLEKQFKLVTQCNAKYVECFSAQKECNKEKNRNSSVVPSERARVGLAPLPGMKGTDYINASYIMGYYRSNEFIITQHPLPHTTKDFWRMIWDHNAQIIVMLPDNQSLAEDEFVYWPSREESMNCEAFTVTLISKDRLCLSNEEQIIIHDFILEATQDDYVLEVRHFQCPKWPNPDAPISSTFELINVIKEEALTRDGPTIVHDEYGAVSAGMLCALTTLSQQLENENAVDVFQVAKMINLMRPGVFTDIEQYQFIYKAMLSLVSTKENGNGPMTVDKNGAVLIADESDPAESMESLV

SEQ ID NO: 132617 - DNA, 4338 bp, Artificial Sequence
  derived and/or modified sequence
atgcgccggcttcttgagccatgttggtggatcctgtttctaaagattacaagctcagtactccactacgtcgtgtgtttcccagccctgactgagggctatgtgggagccttgcacgagaatcggcatggctctgccgttcagataagacgtaggaaagctagtggagacccctattgggcttattcaggcgcctacggacctgaacactgggtgaccagtagcgtgtcgtgcggcgggagacaccagtcacctatcgatatccttgatcagtacgcacgagtgggagaggagtatcaggagctgcagcttgatggttttgataacgaaagctctaataaaacctggatgaagaataccggaaagaccgttgcgattctcctgaaggatgactattttgtttccggagctgggctacctggtcgtttcaaagctgaaaaggtggaattccactggggccatagcaacggctcggccggtagtgaacatagtataaacgggcgtcggttcccagtggagatgcagatattcttctataatccggatgactttgattcctttcagaccgccatctccgagaataggatcattggagcaatggctatcttcttccaggtatcaccccgagacaatagcgcactggaccctataattcacggactcaagggagtggtgcaccacgaaaaggagacattccttgacccgttcgtgctgcgagatctactccccgcatccttagggagttactacagatacacaggaagtcttaccacaccaccatgctctgagatagtggagtggatcgtgttcagaagacctgtgcccatcagttaccatcaactggaggcattttattctatctttacaacagaacagcaggatcatgtgaagtccgtggaatacctgaggaataattttcgaccacaacaaagactgcatgatagagtggtgagtaagtccgcagtgcgcgactcttggaaccacgacatgaccgacttcctcgaaaaccccctgggaaccgaagccagcaaggtgtgctcatcaccacctatacacatgaaagtgcaacccctgaaccagaccgctcttcaggtgtcttggagccaacccgagacgatataccatcccccaatcatgaactacatgatcagttactcctggactaagaacgaagacgaaaaggagaagacctttaccaaagacagcgacaaggacttgaaggcgactatttcacacgtgagcccggattcactgtatttattccgtgtgcaggcagtctgcagaaacgacatgcgatccgacttcagccagacaatgctgttccaggcaaacaccacccgtatctttcagggtactagaattgtcaaaactggcgtgcccaccgcaagccccgctagctccgctgacatggctccaatttcctccggcagttccacgtggacctctagtggaatcccattctcattcgtctccatggccacgggaatgggtcccagcagcagcgggtcacaagccacggtggcctcagtggtgacctctactttgctcgctggtctgggcttcggggggggtggtatcagctcatttccctccactgtgtggccaacgcgactcccaacagctgcctccgcctccaaacaggccgctagacctgtattggccactactgaagccctggccagccctgggcctgatggagattcctcccccactaaagacggcgaagggaccgaagaaggcgagaaagacgagaagagcgagtctgaggacggagaaagggagcacgaagaggatggagagaaggattcagaaaaaaaagagaaatctggcgtgacccacgctgctgaagagagaaaccaaacagagcccagtccaacccctagtagccccaaccgtacggctgagggaggccatcagacgatccccggccacgaacaggatcatactgccgtacccaccgaccaaactggcggcagaagggacgccggaccaggcctggatccagatatggttacgtccacccaggtgccaccgaccgccacggaagaacagtatgcgggttccgaccccaaacggccagaaatgccgtccaaaaagcccatgtcaagaggggataggttctccgaggactccagattcatcactgtcaacccggctgagaagaatacctccgggatgatctcacggcccgctcccggacgcatggaatggattatccctctcatagtggtgagcgcattaacatttgtgtgtctgattcttcttattgccgtgctagtgtactggaggggctgcaacaagatcaaatccaagggattcccccgacgctttcgggaggtgcccagcagcggggaacggggagagaagggcagcaggaaatgtttccagacggctcatttttacgttgaggatagctcttccccccgtgtggtgcctaatgaatctatccccataataccaatacccgatgatatggaagccatccccgtgaaacagtttgtgaagcacattggcgaactgtattctaataaccagcacggattcagcgaagacttcgaagaggtgcagaggtgcacggctgatatgaatatcacagccgaacatagcaatcatccggaaaataaacacaagaacagatacataaatattctagcctacgatcattcccgtgtgaagctgcgcccattgcctggcaaagattcgaaacactccgactacataaatgctaattacgtcgatggctataacaaggcaaaggcctacatcgccacgcagggcccattgaagtctacgtttgaggacttctggagaatgatttgggaacagaacaccggtattattgtcatgataacaaatctcgtggagaaagggcggagaaagtgcgatcagtactggccaacagaaaattctgaggaatatggaaacataatcgtcacattgaaatctacaaagatccacgcgtgctataccgtccgccggttctccatacggaatacaaaagtgaaaaaagggcagaaaggtaatcccaagggcagacagaatgagcgggtggtgatccagtaccactatactcaatggccagatatgggcgttcctgagtatgccctgccagtcttaacgttcgtgagacggtccagcgcagcccgcatgccagagaccggccccgtcctggtccactgtagcgctggcgtgggcagaactggaacgtatattgttatcgactccatgctgcagcagattaaagacaaatcgacggtcaacgtactggggtttctcaaacacattagaactcaacgcaactacctggtccagactgaggagcaatacattttcatacacgatgcactgttagaagccatccttggaaaggagactgaggtcagcagtaatcaactacactcttacgttaatagcattcttatccctggggttggcggcaaaacacgcctggagaagcagttcaagttggtgacccagtgcaatgccaaatatgtggaatgcttctccgcacaaaaggagtgcaataaagaaaaaaaccggaatagttcggttgtgccttcagaaagggcccgggtaggtctggcccccctcccaggcatgaagggaacagattacatcaacgcctcttatattatggggtactacagatcaaacgagtttataattacccaacatccactgccccatacaaccaaggacttttggaggatgatctgggatcacaatgcccagatcatcgttatgctcccggataaccagagcttggccgaggacgaatttgtgtactggccatcgcgcgaggagagcatgaactgtgaagctttcaccgtcactctgatctctaaggatcgcttatgcctttctaacgaggagcagattatcatacacgattttatcttagaagcaacacaggacgattacgtcttggaagtgcgccactttcagtgccccaagtggcccaaccctgacgcacctatatcatccacattcgaactcatcaacgtaataaaagaggaagccctgactcgcgatgggcctactatcgtacatgatgaatacggagctgtaagcgctggaatgctatgtgcacttacaaccctgtcccaacaactggaaaacgagaatgctgtagatgtctttcaggtggcaaaaatgataaacctgatgcggcccggggtgttcactgatatcgagcaatatcagttcatatataaagcaatgctgagtctagtgtcaactaaggagaacgggaacgggcccatgacagttgacaaaaacggtgccgtgctgatcgcagatgagtccgatccagccgagtccatggaatccctggtatag

SEQ ID NO: 132618 - DNA, 4338 bp, Artificial Sequence
  derived and/or modified sequence
atgaggcggctgctggagccctgctggtggatcctcttcctgaagatcaccagctctgtgctgcactacgtggtgtgcttccctgccctgacagagggctacgtgggcgccctgcacgagaacagacatggcagcgctgtgcagatcagaagaaggaaggccagcggggacccctactgggcctacagcggggcctacggccctgagcactgggtgaccagctctgtgtcctgtggcggccgccaccagagccccatcgacatcctggaccagtatgcccgggtgggggaggagtaccaggagctgcagctggatggctttgacaatgaaagcagcaacaagacctggatgaagaacacaggcaagacagtggccatcctgctgaaggatgactactttgtgtctggagctggcctgcccggccgcttcaaggccgagaaggtggagttccactggggccacagcaatggcagcgctggcagcgagcacagcatcaatggccgccgcttccctgtggagatgcagatcttcttctacaacccagatgactttgacagcttccagacagccatcagtgaaaatcgcatcattggagccatggccatcttcttccaggtgagcccccgggacaacagcgccctggaccccatcatccacggcctgaagggcgtggtgcaccacgagaaggagaccttcctggacccctttgtgctgcgggacctgctgcctgccagcctgggcagctactaccgctacacaggcagcctgaccaccccaccctgcagcgagatcgtggagtggatcgtgttcagaagacctgtgcccatctcctaccaccagctggaggccttctacagcatcttcaccacagagcagcaggaccacgtgaagtctgtggagtacctgaggaacaacttccggccccagcagaggctgcatgacagagtggtgtccaagtctgctgtgcgggacagctggaaccacgacatgacagacttcctggagaaccccctgggcacagaggccagcaaggtgtgcagcagcccccccatccacatgaaggtgcagcccctgaaccagacagccctgcaggtgtcctggagccagcctgagaccatctaccacccccccatcatgaactacatgatctcctacagctggaccaagaatgaagatgagaaggagaagaccttcaccaaggacagcgacaaggacctgaaggccaccatcagccacgtgtccccagacagcctgtacctgttccgggtgcaggccgtgtgcagaaatgacatgagaagtgacttcagccagaccatgctgttccaggccaacaccacccgcatcttccagggcacccgcatcgtgaagacaggagtgcccacagccagccctgccagcagcgctgacatggcccccatcagcagcggcagcagcacctggaccagcagcggcatccccttctcctttgtgtccatggccaccggcatgggccccagcagcagcggcagccaggccaccgtggcctctgtggtgaccagcaccctgctggccggcctgggctttggaggcggcggcatcagcagcttccccagcacagtgtggcccacccggctgcccacagctgccagcgccagcaagcaggccgcccggcctgtgctggccaccacagaggccctggccagccctggcccagatggagacagcagccccaccaaggatggagagggcacagaggagggggagaaggatgagaagtctgagagtgaagatggagagcgggagcatgaagaagatggagagaaggacagcgagaagaaggagaagtctggagtgacccacgccgctgaggagaggaaccagacagagcccagccccacccccagcagccccaacagaacagctgagggcggccaccagaccatccctggccacgagcaggaccacacagctgtgcccacagaccagacaggaggaagaagagatgctggccctggcctggaccctgacatggtgaccagcacccaggtgcccccaacagccacagaggagcagtatgccggcagtgaccccaagaggcctgagatgcccagcaagaagcccatgagcagaggagaccgcttcagcgaggacagccgcttcatcaccgtgaacccagctgagaagaacaccagcggcatgatcagcaggcctgcccctggccgcatggagtggatcatccccctcatcgtggtgtctgccctgacctttgtgtgcctgatcctgctgattgctgtgctggtgtactggaggggctgcaacaagatcaagagcaagggcttcccccggcgcttccgggaggtgcccagcagtggagagcggggggagaagggcagcaggaagtgcttccagacagcccacttctacgtggaggacagcagcagcccccgggtggtgcccaatgaaagcatccccatcatccccatcccagatgacatggaggccatccctgtgaagcagtttgtgaagcacatcggggagctgtacagcaacaaccagcacggcttcagcgaggactttgaggaggtgcagcgctgcacagctgacatgaacatcacagctgagcacagcaaccaccctgagaacaagcacaagaaccgctacatcaacatcctggcctatgaccacagccgggtgaagctgcggcccctgcccgggaaggacagcaagcacagcgactacatcaatgccaactacgtggatggctacaacaaggccaaggcctacatcgccacccagggccccctgaagagcacctttgaggacttctggaggatgatctgggagcagaacacaggcatcatcgtgatgatcaccaacctggtggagaagggccgcaggaaatgtgaccagtactggcccacagagaacagcgaggagtatggcaacatcatcgtgaccctgaagagcaccaagatccacgcctgctacacagtgcggcgcttcagcatccggaacaccaaggtgaagaagggccagaagggcaaccccaagggccggcagaatgaaagagtggtgatccagtaccactacacccagtggccagacatgggcgtgcctgaatatgccctgcctgtgctgacctttgtgagaagaagcagcgctgccaggatgcctgagactggacctgtgctggtgcactgcagcgctggggtgggccgcacaggcacctacatcgtgattgacagcatgctgcagcagatcaaggacaagagcacagtgaatgtgctgggcttcctgaagcacatccgcacccagaggaactacctggtgcagacagaggagcagtacatcttcatccatgatgccctgctggaggccatcctgggcaaggagacagaggtgagcagcaaccagctgcacagctatgtgaacagcatcctgatccctggggtgggcggcaagacccggctggagaagcagttcaagctggtgacccagtgcaatgccaagtatgtggagtgcttcagcgcccagaaggagtgcaacaaggagaagaacagaaacagctctgtggtgcccagcgagcgggcccgggtgggcctggcccccctgcccggcatgaagggcacagactacatcaatgccagctacatcatgggctactaccgcagcaatgagttcatcatcacccagcaccccctgccccacaccaccaaggacttctggaggatgatctgggaccacaatgcccagatcatcgtgatgctgcctgacaaccagagcctggctgaagatgaatttgtgtactggcccagccgggaggagagcatgaactgtgaggccttcaccgtgaccctcatcagcaaggaccggctgtgcctgagcaatgaggagcagatcatcatccatgacttcatcctggaggccacccaggatgattatgtgctggaggtgcgccacttccagtgccccaagtggcccaacccagatgcccccatcagcagcacctttgagctgatcaacgtcatcaaggaggaggccctgaccagagatggccccaccatcgtgcatgatgaatatggagctgtgtctgctggcatgctgtgtgccctgaccaccctgagccagcagctggagaatgaaaatgctgtggatgtgttccaggtggccaagatgatcaacctgatgaggcctggggtcttcacagacatcgagcagtaccagttcatctacaaggccatgctgagcctggtgtccaccaaggaaaatggaaatggccccatgacagtggacaagaatggagctgtgctgattgctgatgaaagtgaccctgctgagagcatggagagcctggtgtag

SEQ ID NO: 132619 - DNA, 4338 bp, Artificial Sequence
  derived and/or modified sequence
atgcggcggctgctggagccctgctggtggatcctgttcctgaagattacatcgtctgtgttgcactacgtggtgtgctttcctgcactgacagagggttacgtcggtgccctgcacgaaaacagacacggcagtgcggtccagattagacgtaggaaggcctctggcgacccctattgggcctacagcggagcatatgggcctgagcattgggtgacaagctccgtctcctgcggaggacgccatcaatccccgatcgacattcttgaccagtatgcaagggtaggcgaagaataccaggaactgcagctggatggcttcgacaatgaatcatcaaacaagacctggatgaaaaatacagggaaaactgtggcaatcttgctcaaggatgactacttcgtatctggcgcaggactgccaggacggtttaaggccgagaaagtagaattccactggggccattccaacggcagtgctgggagtgagcactcaatcaacggacggcggtttcctgtggaaatgcagatcttcttctacaatccagacgatttcgactctttccagacagccatcagcgagaatagaattatcggtgccatggctatattttttcaggttagtcccagagataattcagcattggatccgatcatacacggtctgaagggagtggtgcatcacgagaaggaaacctttctggaccctttcgtccttcgcgatctgctgcctgcgtctctgggaagctactataggtacaccggttcactcactacccctccctgcagtgagatcgtagagtggatcgtctttcggagaccggtgcccattagctatcaccagttggaggccttttactcgatctttacgacagaacaacaagaccacgtcaagtctgttgaatatctgagaaataactttcggccacaacagaggctgcacgatcgcgtggtgtcgaaatcggctgtccgtgactcatggaatcacgacatgaccgactttctagagaacccactaggcacagaggcgtcaaaagtgtgtagttctcctcccatccatatgaaggtgcagccattgaaccaaaccgcattacaagttagctggtcccagccagagactatataccaccctcccatcatgaattatatgatatcctacagttggacaaaaaacgaggatgagaaggagaagacttttacgaaagactctgataaggatctcaaggctacaatttcacatgttagccctgattccctctatctgttccgtgtgcaggccgtctgtagaaacgacatgcgatccgatttttcacagaccatgctatttcaagcaaatacgacacgtatttttcaaggtacaaggattgttaaaacaggcgttcctactgcgagccctgccagttcggccgacatggcgcccatcagctctgggtcttccacctggactagctctggtatccctttctcctttgtgagtatggccacaggcatggggccttcgagtagcggttcgcaggcaactgtggcaagcgtcgtgacctccactctgttggctggtctgggattcggtggtggcgggattagcagttttccgtcgaccgtgtggccaactcgattacccaccgctgcctccgcctcaaaacaggcagccagacccgtcttagcaaccacagaagcactggcttcacctgggccagatggcgattcctccccgactaaggacggtgagggcacagaggaaggcgagaaggatgaaaaatccgaatcggaagatggggagcgggagcatgaagaagacggcgagaaggattccgagaaaaaagagaagagcggagtaacccatgccgcagaagaacgtaaccaaactgaaccgagccctacacccagcagccctaatagaacagccgagggaggccaccagaccatcccaggccacgaacaggaccatactgcagtgccaacagatcagaccgggggacgtcgcgatgccggccccggtcttgaccctgatatggtcacctccactcaggtgccccctacagccaccgaagagcagtacgccggcagcgatcccaaaaggcctgagatgccctcaaaaaaacctatgagcagaggtgaccgtttctcggaagactcgcgattcatcaccgtcaaccccgccgaaaagaacacttcggggatgatttctcggccagctcctggaagaatggagtggatcatcccactcattgtcgtctccgcactcaccttcgtgtgcttgatcctgctgattgcagttctggtatactggcgcggctgcaataagatcaagagcaagggatttccgcggagatttcgcgaagttccatcgtctggagagagaggggagaagggcagccggaaatgctttcagacagcccatttttacgttgaggacagctcgagtcccagagtagtgccaaacgaatcaattccaattatacccataccagacgatatggaggcgatcccagttaaacagttcgttaagcacatcggcgagctctacagtaataaccaacatgggtttagcgaggatttcgaagaagtccagcggtgtacagcggacatgaatatcactgccgaacacagcaaccatccagagaacaagcacaagaacagatacataaatatcctggcctacgaccatagccgggtgaaacttcgcccgctcccggggaaagacagcaaacatagcgactacattaacgctaattatgttgacggatacaacaaagcgaaagcttacatcgccacccaaggtcctcttaagagcacattcgaagatttttggcgcatgatctgggaacagaataccggtataatcgtcatgatcacaaatttggtcgagaaaggacgaagaaagtgcgaccagtactggcctacggagaattccgaggagtacggtaatataatcgtgacactgaagtccacaaagatacatgcgtgctataccgtccgaagatttagcatccggaatacaaaagtcaaaaaaggacaaaaaggaaatcctaagggtaggcagaatgagcgggtggttatccagtatcattacacccaatggcctgatatgggggtacccgagtatgccctgcccgttctcacatttgtgaggcggagcagcgctgccagaatgccagaaacagggccggtactggtccactgctcagcgggcgttggacggaccggaacgtacatcgtcatcgactcaatgctgcagcaaatcaaagataagtctaccgttaatgttttgggctttctaaaacatatcagaacacaaaggaattatctggttcagaccgaggaacaatatattttcatccacgacgccctgttagaagctattctgggcaaggagactgaggtgagcagcaaccagcttcacagttacgtgaatagtatccttatccctggcgtggggggaaaaacccgcctcgagaaacagtttaagctggtgactcagtgcaacgccaaatatgtcgagtgtttttcagctcagaaggagtgcaataaggaaaaaaacagaaactcttctgtggtgccttctgagcgggccagggtgggtctggcgcctttacccgggatgaaaggcactgattacataaacgcatcatacatcatgggctactacaggtcaaatgaatttataattactcagcaccccctgcctcacaccactaaagacttttggagaatgatatgggatcacaacgctcagattatcgttatgttgcctgataatcagtccctcgctgaagatgagttcgtctactggcccagcagggaagagtcaatgaattgtgaggcttttaccgtgactctgatttctaaggaccgtctttgcctctcaaacgaagaacagatcatcattcacgacttcatactcgaggccacccaggatgactatgttctcgaagttaggcacttccaatgtcctaagtggcctaatccggatgccccaatctcaagcacatttgagttaattaatgtgattaaggaagaggccttaacacgagatggcccaactatcgtgcacgacgagtacggagccgtgtccgccggcatgctgtgcgcgctgaccaccctcagccagcaattggagaatgaaaatgccgtcgacgtttttcaagtcgccaagatgataaacttgatgcgccccggcgtgttcactgacatcgagcagtatcagtttatatacaaagcaatgctctctctcgtaagtactaaggaaaatggcaacggtccaatgaccgtggataagaacggcgccgtgctcatagctgatgaatcagacccggcagagagtatggaatcactggtatag

SEQ ID NO: 132620 - DNA, 4338 bp, Artificial Sequence
  derived and/or modified sequence
atgcggcgattactggaaccttgctggtggattctgtttctgaaaattacctcttccgtactgcattacgtggtctgctttcccgctctgactgagggctacgtcggggctttgcatgaaaaccgccacggttccgccgtgcagatcagaagacgcaaagcaagtggggatccctactgggcgtactccggggcatacggcccagagcactgggtgacctccagtgtgtcctgcggcggtcgccatcaatcgccaattgatatcctggaccagtacgccagagtgggggaagaatatcaggagctgcagttggacggcttcgacaatgaaagcagcaataaaacatggatgaagaataccgggaagacagtggctattctcttgaaggatgactattttgtctccggggcaggtcttcccggacgcttcaaagccgaaaaagtggaattccactggggccatagtaatggctcagccggtagcgagcacagcataaatgggagacggtttccggtagaaatgcagatctttttttacaaccctgatgattttgactcatttcagactgctataagcgaaaatcgcattatcggggctatggcaatttttttccaggtttctccgcgagataattctgccctcgatccgattatccacgggctcaagggggttgtgcaccacgagaaagagacatttctggatccttttgtgctccgggatctattgcctgcaagcctgggcagctactacaggtacaccggcagtctgactacacccccatgcagtgaaattgtggagtggatcgtgttcaggagacccgtgcccatctcctatcatcagcttgaagcattctactctatattcaccacggaacagcaagatcacgtgaagtccgtcgagtatctcagaaataacttcaggccccaacagaggctccacgatagggtcgtatccaaatcagcagtccgggactcctggaaccacgacatgacagactttctggagaaccctctgggtaccgaggcatcaaaggtctgcagctcccctcctattcacatgaaggtacagcccctcaatcaaaccgccctgcaagtttcatggtcacagcccgagactatctaccaccctccaattatgaactatatgatcagctactcctggaccaagaacgaggatgagaaagagaagacattcacaaaagacagcgataaggacctcaaagccacaattagtcatgtctctcccgatagtctgtacctgtttcgcgtgcaggctgtctgtagaaatgatatgagatccgacttctctcagactatgctgtttcaggcgaacacaacccgcatcttccagggaacccgtattgtcaagaccggtgttcccaccgcatcaccggcttccagcgcagacatggctccgatcagcagtgggtccagcacatggacctcctctggtatccccttcagcttcgtatcaatggccacagggatgggtcccagcagttcaggctcacaggctacagtggccagcgtggtcacctccacactattggcgggtctcgggttcggtggcggtgggatatcttcattccctagtaccgtttggcctaccaggcttcctacagcagccagcgcatccaagcaggctgctcggcctgtgctggccactacggaggccctcgcctcacccggtcccgacggcgactctagtcctaccaaggatggagaaggtaccgaggagggggaaaaggatgaaaaatccgaatctgaggacggggaaagagaacacgaagaggatggagagaaagattcggagaaaaaggagaagagtggagtcacacacgcggcagaagagaggaaccaaaccgagccttcaccaacacccagcagtcctaacaggacggccgagggcggacaccagaccatacccggtcacgagcaggaccataccgccgtcccaacagatcagactggcggacgtcgcgacgcaggtccgggattggaccccgacatggttaccagtacccaggttccaccaacagcaacggaggagcagtacgcaggttccgacccgaagcggcctgaaatgccctctaaaaagcccatgtcaagaggagacaggttttcagaagatagccggtttatcacagtgaaccccgctgaaaaaaacacctcggggatgatctctcgaccagcgccaggacgcatggagtggattatccccctcatcgtcgttagcgcgcttacgtttgtgtgtctgattctcctgatagccgtcctcgtgtactggaggggttgcaataagatcaagagtaagggtttccccagaagattcagggaagtccccagtagtggagaaaggggcgagaaaggtagtaggaagtgtttccagaccgcacatttttatgtggaggactcatccagtccaagggtggtgcctaacgagagtatacccatcatccccatccctgacgatatggaggccattcccgtgaaacagttcgtaaagcacatcggagaattgtattcaaataaccagcacggcttcagcgaagattttgaggaagttcagcgatgcacagcagacatgaacatcacagccgaacattccaatcatccagagaataagcataaaaatagatacatcaatatcctcgcctacgatcactccagagtgaaactgcgtcctttgccagggaaagattcaaaacactcggattatatcaacgccaattatgttgacggatataacaaagccaaagcatatattgccacacaagggccactgaagtccactttcgaggatttctggaggatgatctgggagcaaaatactgggatcatcgtcatgattacaaacttggtggaaaagggacgaaggaagtgtgatcagtactggcccacagagaattctgaggagtacggtaacatcattgtaaccctcaagtctaccaaaatccatgcgtgctataccgtgcgcaggttctccattagaaacaccaaggtgaagaaggggcagaaagggaatcccaaggggcgtcagaatgagcgcgtagtgatccaatatcattacacccagtggccggatatgggtgtgcctgaatacgcgcttcctgtgcttacgtttgtccgacgctcatctgctgcgagaatgcctgaaaccggaccagttctcgtgcattgttcggcaggagtgggcaggacaggtacctacatcgtcatagactcaatgctgcagcaaattaaagacaaaagcactgtcaacgtcttaggctttctcaaacatatccgcactcagaggaattatctcgtgcaaaccgaggagcagtacatttttatccacgatgcactgctcgaagcgatcctggggaaagaaactgaagtatccagcaatcagctgcattcttatgtcaattcaatactcattccaggcgttgggggaaagacgcgcctggaaaaacaattcaagctcgtgacccagtgcaacgctaaatatgtcgagtgtttctccgctcagaaggagtgtaataaagagaagaaccgtaacagctcagtggtaccgtcagaacgcgctagagtgggtctggcgcctctgcccggtatgaagggtacggactacataaacgcctcatacatcatgggttactatcggtccaatgagttcataattacccaacaccctctgccgcatactactaaagacttttggcgtatgatctgggaccacaatgcccagatcattgtgatgctgcctgacaaccaatccctggccgaggacgagttcgtctattggccaagtcgcgaagagagcatgaactgtgaggcctttacagttacactgatctcaaaagatagactctgtctgtctaacgaagaacagatcatcatccatgattttattctggaggccacacaggacgattacgtcttagaggtgagacatttccaatgcccgaaatggcccaatcccgacgcccctatcagttccacatttgagctgataaatgtcatcaaggaagaggcgctcactcgcgacgggccaacaattgttcacgacgaatacggcgctgtctctgcaggaatgctatgcgctcttacaacactcagtcagcagcttgagaacgaaaatgccgtggacgtctttcaagtagcaaaaatgatcaatctcatgagacccggtgtctttaccgatattgagcagtaccagttcatctacaaggctatgctgagtctcgtgtccactaaagaaaatggcaatggacccatgacagtggataaaaacggagccgtgctgattgcagatgagagcgaccctgccgaatctatggagagtttagtctag

SEQ ID NO: 132621 - DNA, 9021 bp, Artificial Sequence
  derived and/or modified sequence
ctcaagttggggatcctcggctgctcgccgccgccgcccgcggtccctgcctgccccaggcccggggcatcgccgccggccgccgactccgcgccctgcccgatcggctctctcctttttaaacggaaagcagcctttctccgccgagaggatcgtccccagcgtggctctgcgttcccggtcactttttgagattttccggggggcgctcggcggcttcccggattccaaggggactcgggccgccgagcgcggggggcccgtggagcgggcgagccggggaagcgccccggcttagcggaggctcgcacggaggcaagaacttattcaacaagtttacctccctgctttcctcttttcgatgtgcgttttcggacatgcggaggttactggaaccgtgttggtggattttgttcctgaaaatcaccagttccgtgctccattatgtcgtgtgcttccccgcgttgacagaaggctacgttggggccctgcacgagaatagacacggcagcgcagtgcagatccgcaggcgcaaggcttcaggcgacccgtactgggcctactctggtgcctatggtcctgagcactgggtcacgtctagtgtcagctgtgggggccgtcaccagtctcctattgacattttagaccagtatgcgcgtgttggggaagaataccaggaactgcaactcgatggcttcgacaatgagtcttctaacaaaacctggatgaaaaacacagggaaaacagtcgccatccttctgaaagacgactattttgtcagtggagctggtctacctggcagattcaaagctgagaaggtggaatttcactggggccacagcaatggctcagcgggctctgaacacagcatcaatggcaggaggtttcctgttgagatgcagattttcttttacaatccagatgactttgacagctttcaaaccgcaatttctgagaacagaataatcggagccatggccatattttttcaagtcagtccgagggacaattctgcactggatcctattatccacgggttgaagggtgtcgtacatcatgagaaggagacctttctggatcctttcgtcctccgggacctcctgcctgcatccctgggcagctattatcggtacacaggttccttgaccacaccaccgtgtagcgaaatagtggagtggatagtcttccggagacccgtccccatctcttaccatcagcttgaggctttttattccatcttcaccacggagcagcaagaccatgtcaagtcggtggagtatctgagaaataactttcgaccacagcagcgtctgcatgacagggtggtgtccaagtccgccgtccgtgactcctggaaccacgacatgacagacttcttagaaaacccactggggacagaagcctctaaagtttgcagctctccacccatccacatgaaggtgcagcctctgaaccagacggcactgcaggtgtcctggagccagccggagactatctaccacccacccatcatgaactacatgatctcctacagctggaccaagaatgaggacgagaaggagaagacgtttacaaaggacagcgacaaagacttgaaagccaccattagccatgtctcacccgatagcctttacctgttccgagtccaggccgtgtgtcggaacgacatgcgcagcgactttagccagacgatgctgtttcaagctaataccactcgaatattccaagggaccagaatagtgaaaacaggagtgcccacagcgtctcctgcctcttcagccgacatggcccccatcagctcggggtcttctacctggacgtcctctggcatcccattctcatttgtttccatggcaactgggatgggcccctcctccagtggcagccaggccacagtggcctcggtggtcaccagcacgctgctcgccggcctggggttcggcggtggtggcatctcctctttccccagcactgtgtggcccacgcgcctcccgacggccgcctcagccagcaagcaggcggctaggccagtcctagccaccacagaggccttggcttctccagggcccgatggtgattcgtcaccaaccaaggacggcgagggcaccgaggaaggagagaaggatgagaaaagcgagagtgaggatggggagcgggagcacgaggaggatggagagaaggactccgaaaagaaggagaagagtggggtgacccacgctgccgaggagcggaatcagacggagcccagccccacaccctcgtctcctaacaggactgccgagggagggcatcagactatacctgggcatgagcaggatcacactgccgtccccacagaccagacgggcggaaggagggatgccggcccaggcctggaccccgacatggtcacctccacccaagtgccccccaccgccacagaggagcagtatgcagggagtgatcccaagaggcccgaaatgccatctaaaaagcctatgtcccgcggggaccgattttctgaagacagcagatttatcactgttaatccagcggaaaaaaacacctctggaatgataagccgccctgctccagggaggatggagtggatcatccctctgattgtggtatcagccttgaccttcgtgtgcctcatccttctcattgctgtgctcgtttactggagagggtgtaacaaaataaagtccaagggctttcccagacgtttccgtgaagtgccttcttctggggagagaggagagaaggggagcagaaaatgttttcagactgctcatttctatgtggaagacagcagttcacctcgagtggtccctaatgaaagtatccctattattcctattccggatgacatggaagccattcctgtcaaacagtttgtcaaacacatcggtgagctctattctaataaccagcatgggttctctgaggattttgaggaagtccagcgctgtactgctgatatgaacatcactgcagagcattccaatcatccagaaaacaagcacaaaaacagatacatcaacattttagcatatgatcacagtagggtgaagttaagacctttaccaggaaaagactctaagcacagcgactacattaatgcaaactatgttgatggttacaacaaagcaaaagcctacattgccacccaaggacctttgaagtctacatttgaagatttctggaggatgatttgggaacaaaacactggaatcattgtgatgattacgaaccttgtggaaaaaggaagacgaaaatgtgatcagtattggccaacagagaacagtgaggaatatggaaacattattgtcacgctgaagagcacaaaaatacatgcctgctacactgttcgtcgtttttcaatcagaaatacaaaagtgaaaaagggtcagaagggaaatcccaagggtcgtcagaatgaaagggtagtgatccagtatcactatacacagtggcctgacatgggagttcccgagtatgcccttccagtactgactttcgtgaggagatcctcagcagctcggatgccagaaacgggccctgtgttggtgcactgcagtgctggtgtgggcagaacaggcacctatattgtaatagacagcatgctgcaacagataaaagacaaaagcacagttaacgtcctgggattcctgaagcatatcaggacacagcgtaactacctcgtccagactgaggagcagtacattttcatccatgatgccttgttggaagccattcttggaaaggagactgaagtatcttcaaatcagctgcacagctatgttaacagcatccttataccaggagtaggaggaaagacacgactggaaaagcaattcaagctggtcacacagtgtaatgcaaaatatgtggaatgtttcagtgctcagaaagagtgtaacaaagaaaagaacagaaactcttcagttgtgccatctgagcgtgctcgagtgggtcttgcaccattgcctggaatgaaaggaacagattacattaatgcttcttatatcatgggctattataggagcaatgaatttattataactcagcatcctctgccacatactacgaaagatttctggcgaatgatttgggatcataacgcacagatcattgtcatgctgccagacaaccagagcttggcagaagatgagtttgtgtactggccaagtcgagaagaatccatgaactgtgaggcctttaccgtcacccttatcagcaaagacagactgtgcctctctaatgaagaacaaattatcatccatgactttatccttgaagctacacaggatgactatgtcttagaagttcggcactttcagtgtcccaaatggcctaacccagatgcccccataagtagtacctttgaacttatcaacgtcatcaaggaagaggccttaacaagggatggtcccaccattgttcatgatgagtatggagcagtttcagcaggaatgttatgtgcccttaccaccctgtcccagcaactggagaatgaaaatgctgtggatgttttccaggttgcaaaaatgatcaatcttatgaggcctggagtattcacagacattgaacaataccagttcatctataaagcaatgcttagcttggtcagcactaaagaaaatggaaatggtcccatgacagtagacaaaaatggtgctgttcttattgcagatgaatcagaccctgctgagagcatggagtccctagtgtgactggaatcctgaaagggcacttaatttgtaaacttctgaagactgagaacttttttgaggccttttttgccagactctaggttatacaataacccagttacttttttacactgataaaagttttgatatttattttttgccattttatgtcttaatggtatcctactgagcatttgcacctctgttcatttcacacagtgaaacgcaattttacctagtttgcactatatgatcagtgttactgcctataatcttatacaacagcaaaccctgatgtgacattccatgacgacatacatgctacttttttttagttcaatacagtgaaggtctttgttatgacagtgaatattgcttttattattattattgctgaagtggttgcattctactagcaggcaatgctgtacttttcttcagtcctcctctcctttttattttaggcactgttcaatactgtatgccttctgtattttaatggagtggatagcattgttttcttttacagactagcaggctactgggacctaaaaaggtctgttaatgtcatggccttgaaacagttccatttatgctggttaagagatcccttaagaagttagaaggcttaagaactgcttcatgtgaacatcccttattagttacaaagttatattcacagttttttaaaaatgtgtcaaaataaaggataactctgtattacagctttcacagtagctatgtggacaatgtgttatttccattttgactctctaaaatagctacatcctaaaatcagggctatctttaacaatagcaagatagcaatattatatacaactcagttatgagaccctttagttattctccattaatgcttcttagtttgtaataccatacctcacagtaggtagaagaatgaaaacttctgcaggtgtgtaattttgaaactagtcctctaaaaattccctattactcctatagcaatctaataaaaactacctacatagttactgttttctttccttctttgccaaatgttttataataaatctcttaattacatacatttttctacttaagattaaattggaaatactgtcttagcaaaagtcttgggactatctaaactcccacacatagataaatctgatttggagagagaaatttaaaatatttaattaaaggtgatacccacattttcaagtttttaaaagagggagatggctttgtatgcttttgtgtagtttagaacagatacacattagtaaaagataccaataatcattagagctcaaggaagttattaggtgcagcctctggagccatactcacgctgcagtgcataatgggaaaattaggagcattaataagaaatttcagtagtgtttgtaaggaaaataagctacttactgagatctgtttcttctattgcatgtttgcttttgagggacagcttctgtcaaaagtgaaatcatcaccagaactgggcctgttaggaagaatagggttttatttactttttatgtcaattaacttcaacaaaaaggccacgctggctgctgtcatgccatctgggtatgcattaaacattaatgatgatcagcactgaggttctatttatcttgatttggctttcataaagtttgtcagaatggtgctggaggaccagaagtgctaaggagaaagaagctatgggccaagttaaagaatttgaatgcaaaggccaggtcaatggagttttcataaactacataatttaccagggtttatctcatcttctcaatacatagatttaacaacatggaatactctgcttttcaagagctgcgtaagctagtcctgagataagatgttcaagagagcatgctaagttgcatgtgctagatgagagacacctttacagcccctccgctccaaccagaggtgacacaggaagctctgtaaagttcaagtaaagcttgaacacaggaacactacaactgccagatgctgaggagaatcaggaaagcaatgagctagactctttttttagtcaattaagtgggttgttttagatgtatagagtattgatatgagttaacactttttagtagatggcaaagtgggcttgatgttcaaaagtaatgttcgagttagggttcatggtccctttctcagtaattttttcttaataaaagtaaacactggttcaaagacaaatagcaagtattccctcctgtgctatttatagagggctcaattcgtagaaaggcataccctccaatgcaattctgtggctgtcccttacagtggtttcagaatcacgaaaaaacagctagtaaataggatagaaacaataaaagaaagagtttagaagttccctgtgagcaatctgtgtgtcttcagcgagcttgaaccaaagtcttcatatcctgacccactgaattataagcaattgctacttgcccatcttgccaaagtagtccaaacacacttcaatgaggacagttatatttagcaggtcctcacccctgcaagagacagcatatcctcactattattattcatgtgttattggcaaaaacatagcttgcatctttccagaggcagagtttcaaagacagggttttctttgagacataagcacattgcttaagtacataacaaggttattaacacttgcactcaggggaaaggaaatagctattgcaaattaatgtgtgcaacttaataaaataagctgtttgtgtatatgaatttagctctaggtaagcaaaatgcacacatcatataaaaataaattgcaatgatcagaccaagtggctgtgctggacatcaaagaaaagacatgctgttgccatcaggagaactctttcttatatgcgatagccaagatatcttctttaatatgaaaaaagttaatttctgaatttcaaaaagagtaagattagctaattggtcttcctaatttttatgcctttagagtttttagtctattcaagtagaagagtccagcgaggccaaagaagggttacggtgttcaagttctggttgttggagtttttagcccagagtgacatactgaaatcagtaaataattattttataatgacacagcacaactgccttgttatgaatttttcttaaatgcatatatactgtatttaaaattaaaatatagataccaatttaccaaagatacatattactaattctaagcaaaactaaaaaaaaaacccaactcatcataatttaagaatcaaaatgtagtttgtcttaagaatttagtggttatactggaaatgcattttcaactcctatgttctaaagtttatgttcaaatggtgccagtgaatttttatatgaagggaaaatgcctgctttttttttttttttaacagatgtaatttcacttaaccctttgcgctttcccttagttgtcatttaacatacaatactggctttacttatctctagaaagaagaaggcatgctacaaataggaaggaattgtaataatgatatttggcctctactttgtcttagctgttaaactgtttttagtatttttgttaaatatttgcaaagggaagcattttctacagaggataattaatttcaagaaaaatatcttgagttttaagaaataaacatctccagaaaaggagaaagtcgattttataaaatgtcgcaactctccaacatttggggtagtgactccttttttgttaggacatttgaaactagcaagcagccattgtttctaaagaattctggcttcacattgactcatgtttctttcactccattttgaaatagctaaaaatcattaaaactgtaaatattttgttgcttgggtaagcatcttctgggaactttgtatctatggtatataatcatagaattttatattttcatataaagctaatttttttctagtttcaactccgtcatagttttttttcctttttgtggtggatatgtgaattcaactttctgtgtattgaagtagcaaaaaccatctttacattccaaaagaatccaacatgtgttatttctttgaggcagtgattgtgaaagttgggttttctttttaattccattgaccatttgtgcaataggaattagacataattagtcactgaaaacattcgtcacattgacccatttggaaaaagtgtgctttttttttttttttaaatttgttcagggggaggggttttgtaacctgaaatttttccctttttcttctgtttaaactatatcaaatcattctattatagtgttatttaatatgtaaattgtattgctatacataaaataaagtatggtttttgatgtattca

SEQ ID NO: 132622 - DNA, 4338 bp, Artificial Sequence
  derived and/or modified sequence
atgagaagactgctggagccctgctggtggatcctgttcctgaagatcaccagcagcgtgctgcactacgtggtgtgcttccccgccctgaccgagggctacgtgggcgccctgcacgagaacagacacggcagcgccgtgcagatcagaagaagaaaggccagcggcgacccctactgggcctacagcggcgcctacggccccgagcactgggtgaccagcagcgtgagctgcggcggcagacaccagagccccatcgacatcctggaccagtacgccagagtgggcgaggagtaccaggagctgcagctggacggcttcgacaacgagagcagcaacaagacctggatgaagaacaccggcaagaccgtggccatcctgctgaaggacgactacttcgtgagcggcgccggcctgcccggcagattcaaggccgagaaggtggagttccactggggccacagcaacggcagcgccggcagcgagcacagcatcaacggcagaagattccccgtggagatgcagatcttcttctacaaccccgacgacttcgacagcttccagaccgccatcagcgagaacagaatcatcggcgccatggccatcttcttccaggtgagccccagagacaacagcgccctggaccccatcatccacggcctgaagggcgtggtgcaccacgagaaggagaccttcctggaccccttcgtgctgagagacctgctgcccgccagcctgggcagctactacagatacaccggcagcctgaccacccccccctgcagcgagatcgtggagtggatcgtgttcagaagacccgtgcccatcagctaccaccagctggaggccttctacagcatcttcaccaccgagcagcaggaccacgtgaagagcgtggagtacctgagaaacaacttcagaccccagcagagactgcacgacagagtggtgagcaagagcgccgtgagagacagctggaaccacgacatgaccgacttcctggagaaccccctgggcaccgaggccagcaaggtgtgcagcagcccccccatccacatgaaggtgcagcccctgaaccagaccgccctgcaggtgagctggagccagcccgagaccatctaccacccccccatcatgaactacatgatcagctacagctggaccaagaacgaggacgagaaggagaagaccttcaccaaggacagcgacaaggacctgaaggccaccatcagccacgtgagccccgacagcctgtacctgttcagagtgcaggccgtgtgcagaaacgacatgagaagcgacttcagccagaccatgctgttccaggccaacaccaccagaatcttccagggcaccagaatcgtgaagaccggcgtgcccaccgccagccccgccagcagcgccgacatggcccccatcagcagcggcagcagcacctggaccagcagcggcatccccttcagcttcgtgagcatggccaccggcatgggccccagcagcagcggcagccaggccaccgtggccagcgtggtgaccagcaccctgctggccggcctgggcttcggcggcggcggcatcagcagcttccccagcaccgtgtggcccaccagactgcccaccgccgccagcgccagcaagcaggccgccagacccgtgctggccaccaccgaggccctggccagccccggccccgacggcgacagcagccccaccaaggacggcgagggcaccgaggagggcgagaaggacgagaagagcgagagcgaggacggcgagagagagcacgaggaggacggcgagaaggacagcgagaagaaggagaagagcggcgtgacccacgccgccgaggagagaaaccagaccgagcccagccccacccccagcagccccaacagaaccgccgagggcggccaccagaccatccccggccacgagcaggaccacaccgccgtgcccaccgaccagaccggcggcagaagagacgccggccccggcctggaccccgacatggtgaccagcacccaggtgccccccaccgccaccgaggagcagtacgccggcagcgaccccaagagacccgagatgcccagcaagaagcccatgagcagaggcgacagattcagcgaggacagcagattcatcaccgtgaaccccgccgagaagaacaccagcggcatgatcagcagacccgcccccggcagaatggagtggatcatccccctgatcgtggtgagcgccctgaccttcgtgtgcctgatcctgctgatcgccgtgctggtgtactggagaggctgcaacaagatcaagagcaagggcttccccagaagattcagagaggtgcccagcagcggcgagagaggcgagaagggcagcagaaagtgcttccagaccgcccacttctacgtggaggacagcagcagccccagagtggtgcccaacgagagcatccccatcatccccatccccgacgacatggaggccatccccgtgaagcagttcgtgaagcacatcggcgagctgtacagcaacaaccagcacggcttcagcgaggacttcgaggaggtgcagagatgcaccgccgacatgaacatcaccgccgagcacagcaaccaccccgagaacaagcacaagaacagatacatcaacatcctggcctacgaccacagcagagtgaagctgagacccctgcccggcaaggacagcaagcacagcgactacatcaacgccaactacgtggacggctacaacaaggccaaggcctacatcgccacccagggccccctgaagagcaccttcgaggacttctggagaatgatctgggagcagaacaccggcatcatcgtgatgatcaccaacctggtggagaagggcagaagaaagtgcgaccagtactggcccaccgagaacagcgaggagtacggcaacatcatcgtgaccctgaagagcaccaagatccacgcctgctacaccgtgagaagattcagcatcagaaacaccaaggtgaagaagggccagaagggcaaccccaagggcagacagaacgagagagtggtgatccagtaccactacacccagtggcccgacatgggcgtgcccgagtacgccctgcccgtgctgaccttcgtgagaagaagcagcgccgccagaatgcccgagaccggccccgtgctggtgcactgcagcgccggcgtgggcagaaccggcacctacatcgtgatcgacagcatgctgcagcagatcaaggacaagagcaccgtgaacgtgctgggcttcctgaagcacatcagaacccagagaaactacctggtgcagaccgaggagcagtacatcttcatccacgacgccctgctggaggccatcctgggcaaggagaccgaggtgagcagcaaccagctgcacagctacgtgaacagcatcctgatccccggcgtgggcggcaagaccagactggagaagcagttcaagctggtgacccagtgcaacgccaagtacgtggagtgcttcagcgcccagaaggagtgcaacaaggagaagaacagaaacagcagcgtggtgcccagcgagagagccagagtgggcctggcccccctgcccggcatgaagggcaccgactacatcaacgccagctacatcatgggctactacagaagcaacgagttcatcatcacccagcaccccctgccccacaccaccaaggacttctggagaatgatctgggaccacaacgcccagatcatcgtgatgctgcccgacaaccagagcctggccgaggacgagttcgtgtactggcccagcagagaggagagcatgaactgcgaggccttcaccgtgaccctgatcagcaaggacagactgtgcctgagcaacgaggagcagatcatcatccacgacttcatcctggaggccacccaggacgactacgtgctggaggtgagacacttccagtgccccaagtggcccaaccccgacgcccccatcagcagcaccttcgagctgatcaacgtgatcaaggaggaggccctgaccagagacggccccaccatcgtgcacgacgagtacggcgccgtgagcgccggcatgctgtgcgccctgaccaccctgagccagcagctggagaacgagaacgccgtggacgtgttccaggtggccaagatgatcaacctgatgagacccggcgtgttcaccgacatcgagcagtaccagttcatctacaaggccatgctgagcctggtgagcaccaaggagaacggcaacggccccatgaccgtggacaagaacggcgccgtgctgatcgccgacgagagcgaccccgccgagagcatggagagcctggtgtag

SEQ ID NO: 132623 - protein, 1115 aa, Artificial Sequence
  derived and/or modified sequence
MAGAGGGLGVWGNLVLLGLCSWTGARAPAPNPGRNLTVETQTTSSISLSWEVPDGLDSQNSNYWVQCTGDGGTTETRNTTATNVTVDGLGPGSLYTCSVWVEKDGVNSSVGTVTTATAPNPVRNLRVEAQTNSSIALTWEVPDGPDPQNSTYGVEYTGDGGRAGTRSTAHTNITVDGLEPGCLYAFSMWVGKNGINSSRETRNATTAHNPVRNLRVEAQTTSSISLSWEVPDGTDPQNSTYCVQCTGDGGRTETRNTTDTRVTVDGLGPGSLYTCSVWVEKDGVNSSVEIVTSATAPNPVRNLTVEAQTNSSIALTWEVPDGPDPQNSTYGVEYTGDGGRAGTRSTAHTNITVDRLEPGCLYVFSVWVGKNGINSSRETRNATTAPNPVRNLHMETQTNSSIALCWEVPDGPYPQDYTYWVEYTGDGGGTETRNTTNTSVTAERLEPGTLYTFSVWAEKNGARGSRQNVSISTVPNAVTSLSKQDWTNSTIALRWTAPQGPGQSSYSYWVSWVREGMTDPRTQSTSGTDITLKELEAGSLYHLTVWAERNEVRGYNSTLTAATAPNEVTDLQNETQTKNSVMLWWKAPGDPHSQLYVYWVQWASKGHPRRGQDPQANWVNQTSRTNETWYKVEALEPGTLYNFTVWAERNDVASSTQSLCASTYPDTVTITSCVSTSAGYGVNLIWSCPQGGYEAFELEVGGQRGSQDRSSCGEAVSVLGLGPARSYPATITTIWDGMKVVSHSVVCHTESAGVIAGAFVGILLFLILVGLLIFFLKRRNKKKQQKPELRDLVFSSPGDIPAEDFADHVRKNERDSNCGFADKYQQLSLVGHSQSQMVASASENNAKNRYRNVLPYDWSRVPLKPIHEEPGSDYINASFMPGLWSPQEFIATQGPLPQTVGDFWRLVWEQQSHTLVMLTNCMEAGRVKCEHYWPLDSQPCTHGHLRVTLVGEEVMENWTVRELLLLQVEEQKTLSVRQFHYQAWPDHGVPSSPDTLLAFWRMLRQWLDQTMEGGPPIVHCSAGVGRTGTLIALDVLLRQLQSEGLLGPFSFVRKMRESRPLMVQTEAQYVFLHQCILRFLQQSAQAPAEKEVPYEDVENLIYENVAAIQAHKLEV

SEQ ID NO: 132624 - DNA, 3348 bp, Artificial Sequence
  derived and/or modified sequence
atggcaggcgccggcggtggattgggagtgtggggtaaccttgtgttgttgggactatgctcatggaccggggcaagggcacccgccccaaacccaggacgcaacctaacagtggaaactcaaactacctcttcgatctccctcagttgggaggtgcctgatggactggattcccagaactctaattactgggtgcagtgcacgggtgatggggggacaacagagaccaggaacacaaccgccaccaacgtgactgttgatggcctgggaccagggtccctgtacacctgctcggtctgggtcgagaaggacggtgttaactcaagcgttggcaccgttactactgccaccgcccccaatcctgtgagaaatctgagagtcgaggcgcagacaaattcctcaattgcactgacttgggaagtgccagacggccctgacccgcagaatagtacttacggagtggagtataccggggatggcggccgagcaggaacacgaagtaccgcccatacgaacattacagtggatgggttggagccagggtgtctctacgcttttagcatgtgggtgggcaagaatggtatcaactccagcagggagacaaggaacgcaaccactgcgcacaaccctgtgcgaaatttacgggtggaggcccaaactaccagtagcatttctctgtcctgggaggtccctgacggaacagacccgcaaaactcaacttattgtgtccaatgcaccggagatggcggccggactgagactcggaacaccactgacacaagagtgacagtcgacggcttgggccccggcagtctctacacgtgcagcgtgtgggtggagaaggatggcgtgaattcttccgtggaaattgtcacttccgctacagcccctaaccctgtgcgcaacctgactgtcgaggctcaaaccaactcctcaattgctctgacatgggaagtccccgatgggcccgacccccagaacagtacctatggggtcgaatacaccggcgacgggggtagagcagggacgaggagtactgcccataccaacataacagtcgacaggctggagccaggttgtctgtatgtctttagtgtgtgggtgggcaaaaacggaatcaatagttcccgggaaacaagaaacgctaccactgccccaaatcctgttcgaaacctgcatatggagacgcagacaaattcttccatcgccctctgctgggaggtaccggacggaccctatcctcaagactatacatactgggtagagtatacaggcgacggaggtgggacggagactaggaacacaacgaatacttccgtgacagccgaacgactggagcccggtactctgtatacgtttagtgtctgggctgagaagaatggtgctcggggctccagacaaaatgtgtccatttcaacagttcctaatgcggtgacttctctcagtaaacaggattggacaaactccaccattgctctacggtggaccgctccacaaggcccgggccagtcttcctacagctactgggttagctgggtgagggaggggatgactgaccccagaacacagtcaacaagtggcacggatatcactctgaaggaactcgaggccggctcactttatcacctgacagtctgggctgaacgcaatgaagtgcgaggctataatagcactcttaccgcggctaccgctcctaatgaagtcacagatctccaaaatgagacacagactaaaaatagcgtcatgctgtggtggaaagcaccaggcgacccgcattcacagctgtatgtgtactgggtccaatgggcatccaaaggacatccacgtcgggggcaggatccacaggccaactgggtgaaccaaacctcccgaaccaatgagacttggtataaagtcgaggccttagaacccgggactctgtacaacttcactgtttgggccgaacgtaacgatgtggcctccagtacacagtctctgtgcgcttctacataccctgataccgtaaccattacctcctgtgtgtcaacatctgccgggtatggtgtgaacctgatctggagctgcccccagggcggctacgaggcattcgagctggaggtgggtggtcagcggggtagccaggaccgctcaagttgcggtgaagcagtttccgtcctgggactgggtcccgcgaggagttatcccgccactattaccacaatttgggatggcatgaaggtggtctcccatagtgtggtttgtcataccgagagtgccggtgtgattgcgggcgcattcgtgggaatccttttgttcttaatactggtggggctgcttatcttttttctgaaacggagaaataaaaaaaagcagcagaaacctgagctacgggatctcgtgttcagctcacctggcgatatacccgctgaggatttcgcggatcatgttcgcaaaaacgagcgggatagcaattgtgggtttgccgacaagtatcagcagctgtccctggtcggccacagccagtctcaaatggtggcaagtgccagtgagaataatgcaaaaaacaggtaccgcaacgtgctcccatatgactggagtcgagtgccactcaagccgattcacgaggaacctgggtctgactacatcaatgccagcttcatgcctggtctctggagcccacaagaattcatcgctactcaggggcctttacctcagaccgttggcgacttctggcgactcgtctgggaacagcagtcccatacgctggtaatgttgacaaattgcatggaagctggcagggtaaagtgcgagcactactggccactggacagccaaccatgtacccatggacatctccgggtgaccctcgtgggagaggaggtgatggaaaactggacagtgcgggaactgttgcttctccaggttgaggagcagaagacactgagcgtgagacagttccactaccaagcctggcccgaccacggtgtcccttcaagcccagatacattgctggccttttggcgtatgctaaggcagtggctcgatcagaccatggaggggggacctccgatcgtgcactgctccgccggcgttgggagaaccggcacacttatcgcattggatgtgctgctgcggcagctccagagtgaagggctgctgggacccttctccttcgtgagaaagatgcgggagtcccggcctctgatggtgcagactgaggcccagtatgtttttttgcaccagtgtatcttgcgattcctgcagcagagcgcccaggctccggccgagaaagaagtcccttatgaagatgtggaaaacttgatatatgaaaatgtggccgctatccaagcccataaattggaggtgtag

SEQ ID NO: 132625 - DNA, 3348 bp, Artificial Sequence
  derived and/or modified sequence
atggccggggccggcggcggcctgggcgtgtggggcaacctggtgctgctgggcctgtgctcctggacaggagcccgggccccagcccccaaccctggcaggaacctgactgtggagacccagaccaccagcagcatcagcctgtcctgggaggtgcctgatggcctggacagccagaacagcaactactgggtgcagtgcacaggagatggcggcaccacagagaccaggaacaccacagccaccaacgtgacagtggatggcctgggccctggcagcctgtacacctgcagcgtgtgggtggagaaggatggagtgaacagctctgtgggcaccgtgaccacagccacagcccccaaccctgtgaggaacctgcgggtggaggcccagaccaacagcagcatcgccctgacctgggaggtgcctgatggccctgacccccagaacagcacctacggcgtggagtacacaggagatggcggccgggccggcaccaggagcacagcccacaccaacatcaccgtggatggcctggagcccggctgcctgtatgccttctccatgtgggtgggcaagaatggcatcaacagcagccgggagaccagaaatgccaccacagcccacaaccctgtgaggaacctgcgggtggaggcccagaccaccagcagcatcagcctgtcctgggaggtgcctgatggaacagacccccagaacagcacctactgtgtgcagtgcacaggagatggcggccgcacagagaccaggaacaccacagacaccagggtgacagtggatggcctgggccctggcagcctgtacacctgcagcgtgtgggtggagaaggatggagtgaacagctctgtggagatcgtgaccagcgccacagcccccaaccctgtgaggaacctgactgtggaggcccagaccaacagcagcatcgccctgacctgggaggtgcctgatggccctgacccccagaacagcacctacggcgtggagtacacaggagatggcggccgggccggcaccaggagcacagcccacaccaacatcaccgtggaccggctggagcccggctgcctgtatgtgttttctgtgtgggtgggcaagaatggcatcaacagcagccgggagaccagaaatgccaccacagcccccaaccctgtgaggaacctgcacatggagacccagaccaacagcagcatcgccctgtgctgggaggtgcctgatggcccctacccccaggactacacctactgggtggagtacacaggagatggcggcggcacagagaccaggaacaccaccaacacctctgtgacagctgagcggctggagcccggcaccctgtacaccttctctgtgtgggccgagaagaatggagcccggggcagccggcagaatgtgtccatcagcacagtgcccaatgctgtgaccagcctgagcaagcaggactggaccaacagcaccatcgccctgcgctggacagccccccagggccctggccagagcagctacagctactgggtgtcctgggtgcgggagggcatgacagaccccaggacccagagcaccagcggcacagacatcaccctgaaggagctggaggccggcagcctgtaccacctgactgtgtgggccgagagaaatgaggtgcggggctacaacagcaccctgacagctgccacagccccaaatgaggtgacagacctgcagaatgagacccagaccaagaacagcgtgatgctgtggtggaaggcccctggggacccccacagccagctgtatgtgtactgggtgcagtgggccagcaagggccacccccggcggggccaggacccccaggccaactgggtgaaccagaccagcaggaccaatgagacctggtacaaggtggaggccctggagcccggcaccctgtacaacttcaccgtgtgggccgagagaaatgatgtggccagcagcacccagagcctgtgtgccagcacctacccagacacagtgaccatcaccagctgtgtgtccaccagcgctggctacggcgtgaacctgatctggagctgcccccagggcggctatgaggcctttgagctggaggtgggcggccagaggggcagccaggacaggagcagctgtggggaggccgtgtctgtgctgggcctgggccctgcccggagctacccagccaccatcaccaccatctgggatggcatgaaggtggtgagccacagcgtggtgtgccacacagaatctgctggggtgattgctggggcctttgtgggcatcctgctcttcctgatcctggtgggcctgctgatcttcttcctgaagagaagaaacaagaagaagcagcagaagccagagctgcgggacctggtgttcagcagccctggggacatcccagcagaagattttgctgaccacgtgaggaagaatgaaagagacagcaactgtggctttgctgacaagtaccagcagctgagcctggtgggccacagccagagccagatggtggccagcgcctctgaaaataatgccaagaaccgctacagaaatgtgctgccctatgactggagccgggtgcccctgaagcccatccacgaggagcccggcagtgactacatcaatgccagcttcatgcctggcctgtggagcccccaggagttcatcgccacccagggccccctgccccagacagtgggggacttctggaggctggtgtgggagcagcagagccacaccctggtgatgctgaccaactgcatggaggccggccgggtgaagtgtgagcactactggcccctggacagccagccctgcacccacggccacctgcgggtgaccctggtgggggaggaggtgatggagaactggacagtgcgggagctgctgctgctgcaggtggaggagcagaagaccctgtctgtgcggcagttccactaccaggcctggccagaccatggagtgcccagcagcccagacaccctgctggccttctggaggatgctgcggcagtggctggaccagaccatggagggcggcccccccatcgtgcactgcagcgctggggtgggccgcacaggcaccctgattgccctggatgtgctgctgcggcagctgcagagcgagggcctgctgggccccttctcctttgtgaggaagatgagggagagccggcccctgatggtgcagacagaggcccagtatgtgttcctgcaccagtgcatcctgcgcttcctgcagcagagcgcccaggccccagctgagaaggaggtgccctatgaagatgtggagaacctgatctatgaaaatgtggccgccatccaggcccacaagctggaggtgtag

SEQ ID NO: 132626 - DNA, 3348 bp, Artificial Sequence
  derived and/or modified sequence
atggccggcgccggcggcggcctgggcgtgtggggcaacctggtgctgctgggcctttgctcgtggacaggcgcccgggctcccgcgcctaaccctggacgcaacctgaccgtcgagactcagaccacgtcaagcatttcactcagttgggaagtacccgacggtctggacagccaaaactcaaactactgggtacagtgtacgggagacgggggaacaaccgagaccaggaatacaactgctaccaatgtgaccgtggacggactaggccccggctcattatatacctgctctgtctgggtagaaaaggacggagttaactcttctgttggcaccgtgaccaccgcaaccgccccaaatcccgtaaggaatttgagagtggaagcccaaacaaatagcagcattgcacttacttgggaggtcccagatggcccagatccccagaactccacctatggggtggagtatacaggggacggaggccgagcaggaacacgctccacagcccatacgaatattacagtggatggcctcgaaccaggctgtctttacgccttttccatgtgggtcggtaaaaatggcattaactcctccagagaaacccgcaacgccaccactgctcacaatcctgtgcgtaacttacgagtcgaggctcaaaccacatcttcgattagcctgtcttgggaagtcccagacggcacagacccacagaactctacttactgcgtgcagtgcacaggggacggaggcaggaccgaaacacggaacactacagacacccgggtgactgttgatgggctgggtccaggatcactgtatacttgttcagtttgggtggaaaaggatggtgttaattctagtgttgaaatcgtaactagtgctactgctcctaacccagtcaggaatctcaccgtcgaggcccaaacaaattcttctatcgctcttacttgggaagttccagacgggcccgaccctcagaactccacctacggagtggaatacacaggggacggggggcgcgcgggcactcggtctacggcacacacaaacataaccgtcgataggttggagccagggtgtctgtatgtgttttctgtgtgggtgggcaaaaatgggataaatagctctagggaaaccaggaacgccaccacagccccaaacccggtgcgtaatctccacatggaaacgcagactaattcctcgatcgcactctgctgggaagttcctgatggcccttacccacaggactatacttactgggtagaatataccggtgacggaggaggtacggagacaaggaatactactaatactagtgttactgccgagcggctggagcctgggacactttacaccttctcagtgtgggctgagaagaacggggcaagagggtcacggcagaatgtgtccatctcgaccgtgcccaatgctgtaacgtctctgtctaaacaagactggactaactccactatcgctttaaggtggacggccccgcaaggccctgggcagtcttcctactcctactgggtgagttgggtgagagagggtatgaccgatccaagaacccagtctacctctggcacggacatcacactcaaggaattggaagccggatctttataccatctgactgtttgggccgaaagaaatgaagttcgcgggtacaattctactctgactgctgccacagcccctaacgaagtgaccgacctccagaacgaaacgcaaacaaagaatagcgtcatgttgtggtggaaagctcctggagaccctcactcacagttgtatgtttattgggttcagtgggctagcaaaggccacccccggcgggggcaggaccctcaggctaattgggttaatcagacgtctagaacaaatgagacctggtataaggtggaggctctggagccaggcaccctgtacaactttactgtatgggctgagcgcaacgatgtggccagcagcacccaatccctctgtgcttccacgtaccccgatacagtcacaatcacaagttgtgtctctacttccgcggggtatggagtaaatttgatctggtcctgccctcagggtggatacgaagcctttgaactggaggtgggggggcaaagagggagccaggaccggagtagctgcggagaggccgtttccgtgttgggattaggccccgccagatcctaccccgcgactatcaccactatctgggacggaatgaaggtggtctcccactcggtggtgtgccacacagagagtgccggcgtcattgccggtgcttttgttggaattcttttgttcttaattctggtcgggcttttgatctttttcctgaagagacgtaataagaagaagcaacaaaaacctgagctacgcgatctcgttttctctagccccggagatattccagccgaggactttgcagatcacgtgaggaagaatgaacgagactcaaactgtggcttcgctgataaatatcaacagctgtccctggtcggacactctcagagccaaatggtcgcttcagcctccgagaacaatgctaaaaacagatatagaaatgtgttgccctacgattggtcccgcgtacctctgaaacctattcacgaagaaccaggttctgattacatcaatgcctcattcatgccagggctgtggtccccacaggagttcatcgcaacacaaggtcccctgcctcagacagtcggggacttttggaggctggtgtgggagcaacaatcacatacacttgtgatgcttacaaactgcatggaggccggcagagttaagtgtgaacactattggccactggatagccagccctgtacgcatgggcatctgcgcgtcactttggtcggggaagaggtcatggagaattggacagttcgagagttattgctgctccaagtggaggaacagaagacactgagcgttcggcagttccactaccaggcctggcccgaccacggagtcccatcgtcgcccgatacccttttggcgttttggcgcatgctgcgacagtggttagaccagacaatggagggaggtccacccattgtccactgttcggcaggcgtgggacgcaccggaactctgatcgccctggatgtgctactgcggcaactgcagtccgaaggattattgggcccattcagcttcgtcagaaagatgcgcgaatctaggccactgatggtgcagacggaggctcagtacgtgttcctgcaccaatgcatcttgcggttcttgcagcaatcagcacaggctcctgccgaaaaggaagtcccttatgaagacgtcgagaatctaatttatgagaacgtggcagccatacaagctcataaactggaagtgtag

SEQ ID NO: 132627 - DNA, 3348 bp, Artificial Sequence
  derived and/or modified sequence
atggccggtgccggtggagggctgggtgtatggggaaatctcgtgttactagggctgtgcagctggacgggtgcgcgagcacccgctccaaatccagggagaaatttgaccgtggagactcagacaactagctctatttctctctcctgggaagtgccggatggacttgatagtcagaattcaaactattgggtgcagtgcaccggtgatggtggtactaccgagacgagaaataccaccgctactaatgtgactgtcgacggtcttgggccaggaagtctgtatacatgcagcgtgtgggtagagaaagacggtgtgaactctagcgtgggaacagtgacgacagcaacggccccaaaccccgtcaggaatctgcgggttgaagcccaaaccaactcaagtatcgccctgacctgggaggtgccagacgggcctgaccctcagaattccacatatggcgtagagtatacaggcgatgggggaagggcaggaacccgctcaactgctcacactaacataacagtagatggactcgagcccggatgtctctacgctttctctatgtgggtgggcaagaatggaatcaattcctccagggaaacccgtaatgcaactaccgcacacaatcctgtgaggaatctgagggttgaggcacaaactacatcttccatcagcctgtcgtgggaagtcccagacggtacagatccccagaattctacctactgtgtgcagtgcactggggacggagggaggactgagacccgcaacaccactgacacaagggttacggtcgacggattaggcccaggatctttgtacacatgtagcgtatgggtcgaaaaagacggagtgaattcctctgtagagatcgtgacgtccgcaacagctcccaatccagtccgcaatttgactgtggaggcccaaacaaattcttctatcgccctgacttgggaggtgcccgatgggcctgatccacaaaactccacctacggggttgagtacactggcgatggcggtcgcgcaggcaccagatccactgcacacaccaatatcaccgtcgaccgcttggaaccaggctgcctttacgtcttttccgtctgggtggggaagaacggtattaactcgagccgggaaacccggaacgccaccacggcccctaaccccgtcagaaatcttcacatggaaacacagacaaactccagtatcgcactgtgctgggaggtgcccgacgggccttacccccaagattatacctactgggtagaatataccggtgatggagggggtaccgaaacacgcaataccacgaatacatcggttaccgcggaaaggctggagccaggcactctgtacacattcagcgtctgggccgaaaagaacggcgctcgcggttcccgccagaacgtgagtatttctacagtgcctaacgcagtgacctccttgtccaaacaggattggaccaatagtaccatcgccctcaggtggaccgctccccagggacccggtcagagcagctactcttactgggtgagttgggtgcgggagggaatgaccgaccccaggactcagagcacaagtggcaccgacatcactctgaaagagctagaagccggatctctgtatcacctgactgtctgggcagagcggaacgaggtccgtggctataatagtacactgacggcagcaactgccccaaatgaggtcaccgatctgcagaatgagacccagacaaagaattcagtaatgctatggtggaaagcaccgggtgacccgcactctcagctgtacgtctattgggtgcagtgggccagcaaagggcatcccagaaggggtcaagaccctcaggctaattgggtgaatcagacctcaagaacaaacgagacttggtacaaagttgaagcactcgagccaggaacactgtacaactttaccgtgtgggccgagagaaacgacgtggcctcctcaacgcagtccctgtgtgcctcaacgtatcccgataccgtgacaattacctcatgcgtttctacttcagccggttacggggtgaacctgatttggagttgtccccagggcggatatgaagccttcgaacttgaggtggggggtcagcgaggcagccaggaccgttccagctgcggggaagcagtatctgttctcgggcttggcccagcacggtcctatccggctactataacaaccatttgggacgggatgaaggtcgtgagccacagcgtcgtgtgtcacactgagtccgctggcgttattgccggagcattcgtgggcattcttctttttctgatcttggttggtctgttaatttttttccttaaacgcaggaataaaaagaagcaacaaaagcccgaactgagggacctggtcttcagcagcccaggggacatccccgctgaggatttcgctgatcatgtgcggaaaaacgagagagatagcaactgcggcttcgccgacaaataccagcagctcagtctggtcggtcattctcagtcacaaatggtggcaagtgcctctgagaacaacgccaagaacaggtatcgaaatgttcttccatacgattggtctagggtcccactgaaaccgattcatgaggagccaggaagcgactatataaatgcatcttttatgccaggcctttggagccctcaggagtttatcgccactcagggacccctcccccaaaccgtcggggacttctggaggctggtatgggaacagcaatcacacaccctcgtgatgttaacgaactgtatggaagctgggagagtcaaatgcgagcactattggcccctggacagccaaccctgtactcatgggcacttgagggtgactctggtgggcgaagaagttatggagaattggacagtccgggagttactgctgctccaagtcgaagagcagaagacactgtctgtaaggcaattccactatcaggcctggcccgaccatggagtgccaagctctcccgacaccctgctcgccttttggagaatgttacgtcagtggctggaccaaacaatggagggaggcccacctatcgttcattgctccgcgggtgtgggtcgtaccggtaccctaatcgctctggatgtcctgctgagacagcttcagagcgagggtctcctgggcccatttagcttcgtgaggaagatgcgcgagagtcgacctctgatggtgcagaccgaagctcaatatgtgttcctgcaccaatgcattttacggttccttcagcagtctgcccaggcacccgcagagaaagaagtcccctacgaggacgtcgagaacctaatatatgagaatgtcgcggcaatccaggcacataaattagaagtttag

SEQ ID NO: 132628 - DNA, 3925 bp, Artificial Sequence
  derived and/or modified sequence
ttcttgagtgtaaagtccagcaggtggaaggactaggcctgggactcctgggtccccggcagtgtctggaggcatggctggggctggcgggggcctcggggtctgggggaacctggtgctgctgggcctgtgcagctggacaggggccagggcgcctgcccccaacccagggaggaacctgacagtggagactcagaccaccagctccatctccctgagctgggaggtccccgatggcctagactcacagaactccaactactgggttcagtgtactggagacggcggcacaacagagactcgaaacacaacagccaccaacgtcaccgtggatggccttggacccgggtcattgtatacgtgttctgtgtgggtggagaaagacggagtaaatagctctgtggggactgtcactactgccacagctcccaacccagtgaggaacctgagagtggaggctcagaccaacagctccatcgccctgacctgggaggtccccgacggcccagacccacagaactccacctacggggttgagtacactggagatggtggcagagcagggactcgaagcacagcacacactaacatcaccgtggatggacttgaacccgggtgtttgtatgcgttttccatgtgggtgggaaagaatggaatcaacagctcccgggagactcgaaatgccaccacagctcacaacccagtgaggaacctgagagtggaggctcagaccaccagctccatctccctgagctgggaggtccccgatggcacagacccacagaactcgacctactgcgttcagtgcactggagatggtggcagaacagagactcgaaacacaacagacaccagagtcaccgtggatggccttggacccgggtcattgtatacgtgttctgtgtgggtggagaaagacggagtaaatagctctgtggagattgtcactagtgccacagctcccaacccagtgagaaacctgacagtggaggctcagaccaacagctccatcgccctgacctgggaggtccccgatggcccagacccacagaactccacctacggggttgagtacactggagatggtggcagagcagggactcgaagcacagcacacaccaacatcaccgtggatagacttgaacccgggtgtttgtatgtgttttccgtgtgggtggggaagaatggaatcaacagctcccgggagactcgaaatgccaccacagcccccaacccagtgagaaacctccatatggagactcagaccaacagctccatcgccctatgctgggaagtccccgatggcccataccctcaggactacacctactgggtagagtacactggagacggtggtggcacagagacccgaaacacaacaaataccagtgtgacagctgagagacttgagcccggaaccttgtacacattctctgtatgggcagaaaaaaatggagcacgtggctccaggcagaatgtcagcatctccacagtccccaacgcagtgacaagcctcagcaagcaggactggaccaacagcaccattgctttgcgctggacagctccccagggcccaggccagtcttcctacagctactgggtctcatgggtcagggaaggcatgactgaccccaggacccaaagcacctcaggtactgacatcaccctaaaggaactggaagctggcagcctgtaccacctcaccgtctgggccgagaggaatgaggtcagaggctataacagcaccctcactgcagccactgctcccaatgaggtcacagatctccagaatgaaactcagactaagaactcagtcatgctgtggtggaaggcccctggagacccccactctcagttgtacgtatactgggtccagtgggccagcaagggacatccccggagggggcaagatccccaagcgaattgggtcaaccagaccagcaggaccaatgagacgtggtacaaagtggaggccctggaacccgggacgttgtacaatttcaccgtgtgggcagagaggaatgacgtagccagttccacgcagagcctctgtgcgtccacatacccagacacagtcaccatcacttcctgtgtcagcacctcagcgggctatggagtcaacttgatctggtcctgcccccagggaggctacgaggcctttgagttggaggtgggaggacagcggggctcccaggacagatcttcatgtggggaggctgtgtctgtgttgggtctcgggccggctcggtcctacccagccaccatcacgaccatctgggacggaatgaaggtcgtgtctcactctgtggtctgccacaccgagagtgcaggggtcattgccggagcctttgtgggcatcctcctgtttctcatcctcgtgggcctgctgattttcttcctgaagaggaggaataagaagaagcagcagaaaccagaactcagggatctggtctttagctccccaggggacatcccagctgaagacttcgctgaccacgtcaggaagaatgagagggacagcaactgtggttttgcagacaagtaccagcaactctccctggtgggccacagccagtctcagatggtggcttcggcttcagagaacaacgccaagaaccgctacagaaatgtgctgccctatgactggtcccgggtgcccctgaagcccatccatgaggagccaggctctgactacatcaatgccagcttcatgcccggtctctggagcccccaggagttcattgcaacccagggtcccctgccacagacagtgggtgacttctggcgcctggtgtgggaacagcagagccacaccctggtcatgctgaccaactgcatggaggccggccgggtgaagtgtgagcattactggcctctggactcgcagccctgcacccatgggcacctgcgggtaaccctggtaggtgaggaagtgatggagaactggacggtgcgggaactgctgctcctccaggtggaggagcagaagacactgtctgtgcgccaattccactaccaggcctggccggatcacggcgttccctcctccccagacaccttgctggctttctggaggatgcttcggcagtggctggatcagaccatggagggaggcccacccattgtgcactgcagtgctggcgtgggtcgcacaggaaccctcattgccctggacgtcctgctccggcagctgcagtccgagggtctccttgggcccttcagctttgtaaggaagatgagagagagtcggccgttgatggtgcagactgaggctcagtacgtattcctgcatcagtgcatcctgcggttcctccaacagtcagcccaggccccagccgagaaggaagtcccgtatgaggatgtcgaaaacctcatctacgagaacgtggccgccatccaggcccacaagttggaggtctaagtgacgagggggctgggtcggcagcccaggcatcctcaagctctggacacccacttgagcccagattcctggaagagcagagggctgggctcccagactcctgggtgctgtgggaggagggggctggtatcccaaactctggtttccccaggagagagtggtctggtgggcttcagatgagtcctatgggagctggggatctggattcctggttccctgaaggaggagagggatgatagcttggattccctaggtctttccaggatgcagaaagaaacaggctggggcctggattctgaggcaggaaggaatttgggtctggagttctggctacttgaggaccaaaggcaggaaggatcctgccttgattttacttcagaaaccaaatcagtcttctataatctggggtcggagggagtccctgtgcccaaggtctctctgcaccccaccatccacatgtatttttccttctatcccataatttattaaatcactgttctcccc

SEQ ID NO: 132629 - DNA, 3348 bp, Artificial Sequence
  derived and/or modified sequence
atggccggcgccggcggcggcctgggcgtgtggggcaacctggtgctgctgggcctgtgcagctggaccggcgccagagcccccgcccccaaccccggcagaaacctgaccgtggagacccagaccaccagcagcatcagcctgagctgggaggtgcccgacggcctggacagccagaacagcaactactgggtgcagtgcaccggcgacggcggcaccaccgagaccagaaacaccaccgccaccaacgtgaccgtggacggcctgggccccggcagcctgtacacctgcagcgtgtgggtggagaaggacggcgtgaacagcagcgtgggcaccgtgaccaccgccaccgcccccaaccccgtgagaaacctgagagtggaggcccagaccaacagcagcatcgccctgacctgggaggtgcccgacggccccgacccccagaacagcacctacggcgtggagtacaccggcgacggcggcagagccggcaccagaagcaccgcccacaccaacatcaccgtggacggcctggagcccggctgcctgtacgccttcagcatgtgggtgggcaagaacggcatcaacagcagcagagagaccagaaacgccaccaccgcccacaaccccgtgagaaacctgagagtggaggcccagaccaccagcagcatcagcctgagctgggaggtgcccgacggcaccgacccccagaacagcacctactgcgtgcagtgcaccggcgacggcggcagaaccgagaccagaaacaccaccgacaccagagtgaccgtggacggcctgggccccggcagcctgtacacctgcagcgtgtgggtggagaaggacggcgtgaacagcagcgtggagatcgtgaccagcgccaccgcccccaaccccgtgagaaacctgaccgtggaggcccagaccaacagcagcatcgccctgacctgggaggtgcccgacggccccgacccccagaacagcacctacggcgtggagtacaccggcgacggcggcagagccggcaccagaagcaccgcccacaccaacatcaccgtggacagactggagcccggctgcctgtacgtgttcagcgtgtgggtgggcaagaacggcatcaacagcagcagagagaccagaaacgccaccaccgcccccaaccccgtgagaaacctgcacatggagacccagaccaacagcagcatcgccctgtgctgggaggtgcccgacggcccctacccccaggactacacctactgggtggagtacaccggcgacggcggcggcaccgagaccagaaacaccaccaacaccagcgtgaccgccgagagactggagcccggcaccctgtacaccttcagcgtgtgggccgagaagaacggcgccagaggcagcagacagaacgtgagcatcagcaccgtgcccaacgccgtgaccagcctgagcaagcaggactggaccaacagcaccatcgccctgagatggaccgccccccagggccccggccagagcagctacagctactgggtgagctgggtgagagagggcatgaccgaccccagaacccagagcaccagcggcaccgacatcaccctgaaggagctggaggccggcagcctgtaccacctgaccgtgtgggccgagagaaacgaggtgagaggctacaacagcaccctgaccgccgccaccgcccccaacgaggtgaccgacctgcagaacgagacccagaccaagaacagcgtgatgctgtggtggaaggcccccggcgacccccacagccagctgtacgtgtactgggtgcagtgggccagcaagggccaccccagaagaggccaggacccccaggccaactgggtgaaccagaccagcagaaccaacgagacctggtacaaggtggaggccctggagcccggcaccctgtacaacttcaccgtgtgggccgagagaaacgacgtggccagcagcacccagagcctgtgcgccagcacctaccccgacaccgtgaccatcaccagctgcgtgagcaccagcgccggctacggcgtgaacctgatctggagctgcccccagggcggctacgaggccttcgagctggaggtgggcggccagagaggcagccaggacagaagcagctgcggcgaggccgtgagcgtgctgggcctgggccccgccagaagctaccccgccaccatcaccaccatctgggacggcatgaaggtggtgagccacagcgtggtgtgccacaccgagagcgccggcgtgatcgccggcgccttcgtgggcatcctgctgttcctgatcctggtgggcctgctgatcttcttcctgaagagaagaaacaagaagaagcagcagaagcccgagctgagagacctggtgttcagcagccccggcgacatccccgccgaggacttcgccgaccacgtgagaaagaacgagagagacagcaactgcggcttcgccgacaagtaccagcagctgagcctggtgggccacagccagagccagatggtggccagcgccagcgagaacaacgccaagaacagatacagaaacgtgctgccctacgactggagcagagtgcccctgaagcccatccacgaggagcccggcagcgactacatcaacgccagcttcatgcccggcctgtggagcccccaggagttcatcgccacccagggccccctgccccagaccgtgggcgacttctggagactggtgtgggagcagcagagccacaccctggtgatgctgaccaactgcatggaggccggcagagtgaagtgcgagcactactggcccctggacagccagccctgcacccacggccacctgagagtgaccctggtgggcgaggaggtgatggagaactggaccgtgagagagctgctgctgctgcaggtggaggagcagaagaccctgagcgtgagacagttccactaccaggcctggcccgaccacggcgtgcccagcagccccgacaccctgctggccttctggagaatgctgagacagtggctggaccagaccatggagggcggcccccccatcgtgcactgcagcgccggcgtgggcagaaccggcaccctgatcgccctggacgtgctgctgagacagctgcagagcgagggcctgctgggccccttcagcttcgtgagaaagatgagagagagcagacccctgatggtgcagaccgaggcccagtacgtgttcctgcaccagtgcatcctgagattcctgcagcagagcgcccaggcccccgccgagaaggaggtgccctacgaggacgtggagaacctgatctacgagaacgtggccgccatccaggcccacaagctggaggtgtag

SEQ ID NO: 132630 - protein, 425 aa, Artificial Sequence
  derived and/or modified sequence
MKPAAREARLPPRSPGLRWALPLLLLLLRLGQILCAGGTPSPIPDPSVATVATGENGITQISSTAESFHKQNGTGTPQVETNTSEDGESSGANDSLRTPEQGSNGTDGASQKTPSSTGPSPVFDIKAVSISPTNVILTWKSNDTAASEYKYVVKHKMENEKTITVVHQPWCNITGLRPATSYVFSITPGIGNETWGDPRVIKVITEPIPVSDLRVALTGVRKAALSWSNGNGTASCRVLLESIGSHEELTQDSRLQVNISGLKPGVQYNINPYLLQSNKTKGDPLGTEGGLDASNTERSRAGSPTAPVHDESLVGPVDPSSGQQSRDTEVLLVGLEPGTRYNATVYSQAANGTEGQPQAIEFRTNAIQVFDVTAVNISATSLTLIWKVSDNESSSNYTYKIHVAGETDSSNLNVSEPRAVIPGLR

SEQ ID NO: 132631 - protein, 1337 aa, Artificial Sequence
  derived and/or modified sequence
MKPAAREARLPPRSPGLRWALPLLLLLLRLGQILCAGGTPSPIPDPSVATVATGENGITQISSTAESFHKQNGTGTPQVETNTSEDGESSGANDSLRTPEQGSNGTDGASQKTPSSTGPSPVFDIKAVSISPTNVILTWKSNDTAASEYKYVVKHKMENEKTITVVHQPWCNITGLRPATSYVFSITPGIGNETWGDPRVIKVITEPIPVSDLRVALTGVRKAALSWSNGNGTASCRVLLESIGSHEELTQDSRLQVNISGLKPGVQYNINPYLLQSNKTKGDPLGTEGGLDASNTERSRAGSPTAPVHDESLVGPVDPSSGQQSRDTEVLLVGLEPGTRYNATVYSQAANGTEGQPQAIEFRTNAIQVFDVTAVNISATSLTLIWKVSDNESSSNYTYKIHVAGETDSSNLNVSEPRAVIPGLRSSTFYNITVCPVLGDIEGTPGFLQVHTPPVPVSDFRVTVVSTTEIGLAWSSHDAESFQMHITQEGAGNSRVEITTNQSIIIGGLFPGTKYCFEIVPKGPNGTEGASRTVCNRTVPSAVFDIHVVYVTTTEMWLDWKSPDGASEYVYHLVIESKHGSNHTSTYDKAITLQGLIPGTLYNITISPEVDHVWGDPNSTAQYTRPSNVSNIDVSTNTTAATLSWQNFDDASPTYSYCLLIEKAGNSSNATQVVTDIGITDATVTELIPGSSYTVEIFAQVGDGIKSLEPGRKSFCTDPASMASFDCEVVPKEPALVLKWTCPPGANAGFELEVSSGAWNNATHLESCSSENGTEYRTEVTYLNFSTSYNISITTVSCGKMAAPTRNTCTTGITDPPPPDGSPNITSVSHNSVKVKFSGFEASHGPIKAYAVILTTGEAGHPSADVLKYTYEDFKKGASDTYVTYLIRTEEKGRSQSLSEVLKYEIDVGNESTTLGYYNGKLEPLGSYRACVAGFTNITFHPQNKGLIDGAESYVSFSRYSDAVSLPQDPGVICGAVFGCIFGALVIVTVGGFIFWRKKRKDAKNNEVSFSQIKPKKSKLIRVENFEAYFKKQQADSNCGFAEEYEDLKLVGISQPKYAAELAENRGKNRYNNVLPYDISRVKLSVQTHSTDDYINANYMPGYHSKKDFIATQGPLPNTLKDFWRMVWEKNVYAIIMLTKCVEQGRTKCEEYWPSKQAQDYGDITVAMTSEIVLPEWTIRDFTVKNIQTSESHPLRQFHFTSWPDHGVPDTTDLLINFRYLVRDYMKQSPPESPILVHCSAGVGRTGTFIAIDRLIYQIENENTVDVYGIVYDLRMHRPLMVQTEDQYVFLNQCVLDIVRSQKDSKVDLIYQNTTAMTIYENLAPVTTFGKTNGYIA

SEQ ID NO: 132632 - DNA, 4014 bp, Artificial Sequence
  derived and/or modified sequence
atgaagcctgcagcccgagaggctcgactccctcctcgatccccgggtctccggtgggcactgcccttgctgctgctccttctacgactaggacagatactgtgcgcaggagggacacccagtcctattcctgacccctccgttgcgactgtagcaacaggggagaacgggattactcagatctcaagcactgccgagagcttccacaaacaaaacggcaccggtaccccacaggtcgagaccaacacaagcgaagatggagaatctagtggcgctaatgactcccttcggacacctgaacagggttccaacggtaccgatggtgcatcccagaagaccccctcttcaactgggcctagccctgtctttgatatcaaggcagtgtctatcagccccacgaacgtgattctgacatggaagtcaaacgataccgccgcatccgaatataagtatgtggttaaacataagatggagaacgaaaagacgatcactgttgttcaccagccttggtgcaacatcactggcctgaggcctgccacctcctacgttttctccatcacgcctgggatagggaatgaaacctggggggatcctcgggttatcaaggtgattacagagccaattccagtatccgacctgcgcgtggcactgaccggcgtgcggaaagccgctctctcttggtcaaatggtaatggaactgcctcctgtagggtcctgttagagtctataggctcccatgaggaattaacccaggattcgagactgcaagttaacatttccggattgaaaccgggggtgcagtataatattaatccatatctgctgcagtctaataagacaaagggagaccctttaggcacggagggggggctggacgcttccaataccgagcggtcccgcgcaggttcgcccaccgcaccggttcacgacgaatcgctggtcgggccagttgatccttccagcggccagcaatccagagataccgaagtgctgcttgtcggcctggagcctggcactcggtacaatgccacggtgtattcacaagctgcaaacggaaccgaaggccaaccgcaagctattgaatttcgcacaaacgccatccaggtgtttgacgtaaccgccgtgaatatctcggccacctccttgacactcatctggaaggtgtcggataatgaaagcagcagcaattacacttacaaaatccacgttgctggtgaaaccgactcgagtaatctaaacgtctcagagcctcgcgcggttatcccaggccttagatcgtcaacgttctacaacatcacagtttgccccgtgctgggagacattgagggtactcccggattcctacaggtccacactccacctgtccctgtctctgacttcagggtgactgtggtcagcaccactgaaattggactcgcttggagttcccacgatgccgagagctttcaaatgcacattacccaggagggagccggcaactcacgggtggaaattaccacaaaccagagcataataatcggcggcctctttcctgggactaagtattgttttgaaatcgtgccaaaagggcctaatgggacagaaggagcttccagaacagtgtgcaacagaacggttccttcagccgttttcgacattcacgtggtgtacgttaccaccaccgagatgtggttagactggaaaagccctgacggagcaagtgagtacgtttatcacctggtgatcgagagcaaacacggcagcaaccatacatccacctatgataaagctattacactgcagggtcttattcccggaaccctttataatatcaccatttcccctgaggtggaccacgtttggggagaccccaactcaacggcgcagtatacaaggccaagcaacgtttccaatatcgacgtgagcaccaacacgaccgcagccaccttaagttggcagaactttgacgatgcgagccctacctattcatactgtcttctgattgaaaaagccggtaactcaagcaacgctactcaggtggtgaccgatatcgggatcaccgatgcgactgtgacggaactgatccccggcagtagctacacggtggagatcttcgcacaggtcggggacggtataaagagtctcgaacctggacgaaaatccttctgcaccgatcccgccagtatggccagttttgattgtgaagttgtgccaaaggagcctgcactggtcttgaagtggacttgtcctcctggggcaaatgcagggttcgaactcgaagtctcttcgggggcgtggaacaacgcaacccacctggagtcctgctctagtgaaaatggcacagaatataggaccgaggtcacctatctgaacttctccacatcttacaatatctccattaccaccgtctcctgcggcaaaatggcagctcccactaggaatacctgtacgactggaatcacggatcccccaccccctgacggttcacccaatattacgtcagtaagccataacagcgttaaagttaaattctccggcttcgaggctagtcacggcccaatcaaggcgtatgctgtaatattaaccaccggggaggccggacacccaagtgccgatgtgctgaaatacacttatgaagacttcaagaaaggcgccagtgatacctatgttacgtatctgatccggaccgaagagaagggaaggagccaaagcctgtcggaggtgctcaagtatgagatagacgtgggcaatgagtcaacgacacttggttactacaatggaaaacttgagccgctgggctcttatcgcgcatgtgtcgctggttttacgaatatcaccttccatccacagaataaaggactcatcgacggggctgagtcctacgtgtctttcagccgctactccgacgcagtctccctgcctcaggatcccggagtcatatgcggtgccgtgtttggctgtatttttggagccctggtaatcgtgaccgtgggaggtttcattttctggagaaagaaaaggaaagacgctaagaataatgaagtgagtttcagtcagatcaaaccaaaaaaatcgaaacttatcagagtcgagaacttcgaagcttatttcaaaaagcagcaagccgatagtaattgtggttttgccgaggagtacgaggacttaaaactggtgggcattagccagcccaagtatgcagcggagctcgctgaaaacagggggaaaaaccgatacaacaacgttttgccctacgatatttctcgggtgaagctgtcagtgcagactcattctacagacgactacatcaacgcgaattacatgcccggctaccacagtaaaaaggacttcatcgctacacagggtccccttcccaataccttgaaggatttttggcgaatggtttgggagaagaacgtctacgctattataatgttgactaagtgcgtagagcaaggacgaacaaaatgcgaagaatattggccatccaaacaagcgcaggactacggagatattacagttgccatgacatcggagattgtcctaccagaatggaccatccgcgatttcaccgtaaaaaacatacagacaagtgaatcacatcctcttcggcagttccattttacctcgtggcctgatcacggagtgccagatacaaccgatttgttaataaactttaggtacctggtccgcgattatatgaaacagagtccacctgagtcccccatacttgtgcactgctccgccggagtcggccggacagggacgtttattgcaattgatagactgatttatcagatcgagaacgagaacaccgtggatgtatatggcatcgtgtacgatttgagaatgcaccgtcccctcatggtgcagaccgaagaccagtacgtctttttaaaccagtgtgtacttgacattgtccggtctcagaaggattccaaggttgatctcatctatcaaaatacaactgccatgacaatctacgaaaatcttgcccctgtcactacatttggaaaaacaaatggctatattgcttag

SEQ ID NO: 132633 - DNA, 4014 bp, Artificial Sequence
  derived and/or modified sequence
atgaagccagctgcccgggaggcccggctgcccccaagaagccctggcctgcgctgggccctgcccctgctgctgctgctgctgcggctgggccagatcctgtgtgccggcggcacccccagccccatcccagaccccagcgtggccaccgtggccactggagaaaatggcatcacccagatcagcagcacagctgagagcttccacaagcagaatggcaccggcaccccccaggtggagaccaacaccagtgaagatggagagagcagcggggccaatgacagcctgcggaccccagagcagggcagcaatggaacagatggagccagccagaagacccccagcagcacaggccccagccctgtgtttgacatcaaggctgtgtccatcagccccaccaacgtcatcctgacctggaagagcaatgacacagctgccagcgagtacaagtatgtggtgaagcacaagatggagaatgagaagaccatcaccgtggtgcaccagccctggtgcaacatcaccggcctgcggcctgccaccagctatgtgttcagcatcaccccaggcattggaaatgagacctggggagaccccagggtcatcaaggtgatcacagagcccatccctgtgtctgacctgcgggtggccctgactggagtgaggaaggccgccctgtcctggagcaatggaaatggaacagccagctgccgggtgctgctggagagcatcggcagccatgaggagctgacccaggacagccggctgcaggtgaacatcagcggcctgaagccaggagtgcagtacaacatcaacccctacctgctgcagagcaacaagaccaagggggaccccctgggcacagaaggaggcctggatgccagcaacacagagaggagcagagctggcagccccacagcccctgtgcatgatgagagcctggtgggccctgtggaccccagcagcggccagcagagccgggacacagaggtgctgctggtgggcctggagcccggcacccgctacaatgccaccgtgtacagccaggccgccaatggaacagagggccagccccaggccatcgagttccgcaccaatgccatccaggtgtttgatgtgacagctgtgaacatcagcgccaccagcctgaccctcatctggaaggtgtctgacaatgaaagcagcagcaactacacctacaagatccacgtggccggggagacagacagcagcaacctgaatgtgtctgagcccagggctgtgattcctggcctgcggagcagcaccttctacaacatcaccgtgtgccctgtgctgggggacatcgagggcaccccaggcttcctgcaggtgcacaccccacctgtgcctgtgtctgacttccgggtgacagtggtgtccaccacagagatcggcctggcctggagcagccatgatgctgagagcttccagatgcacatcacccaggagggcgccggcaacagccgggtggagatcaccaccaaccagagcatcatcatcggcggcctcttccctggcaccaagtactgctttgaaattgtgcccaagggccccaatggaacagaaggagccagcaggacagtgtgcaacagaacagtgcccagcgctgtgtttgacatccacgtggtgtatgtgaccaccacagagatgtggctggactggaagagcccagatggagcctctgaatatgtgtaccacctggtgattgagagcaagcacggcagcaaccacaccagcacctatgacaaggccatcaccctgcagggcctcatccctggcaccctgtacaacatcaccatcagccctgaggtggaccacgtgtggggagaccccaacagcacagcccagtacacccggcccagcaatgtgagcaacattgatgtgtccaccaacaccacagctgccaccctgtcctggcagaactttgatgatgccagccccacctacagctactgcctgctgattgagaaggccggcaacagcagcaatgccacccaggtggtgacagacatcggcatcacagatgccaccgtgacagagctgatccctggcagcagctacacagtggagatctttgcccaggtgggagatggcatcaagagcctggagcccggcaggaagagcttctgcacagatcctgcctccatggccagctttgactgtgaggtggtgcccaaggagcccgccctggtgctgaagtggacctgccccccaggggccaatgccggctttgagctggaggtgagcagcggggcctggaacaatgccacccacctggagagctgcagcagtgaaaatggaacagagtacagaacagaggtgacctacctgaacttcagcaccagctacaacatcagcatcaccaccgtgtcctgtgggaagatggccgcccccaccaggaacacctgcaccaccggcatcacagaccccccacctccagatggcagccccaacatcacctctgtgagccacaacagcgtgaaggtgaagttcagcggctttgaggccagccacggccccatcaaggcctatgctgtgatcctgaccaccggggaggccggccaccccagcgcagatgtgctgaagtacacctatgaggacttcaagaagggggccagtgacacctacgtgacctacctgatcagaacagaggagaagggccgcagccagagcctgtctgaggtgctgaagtatgaaattgatgtgggcaatgaaagcaccaccctgggctactacaacgggaagctggagcccctgggcagctaccgggcctgtgtggccggcttcaccaacatcaccttccacccccagaacaagggcctgattgatggagctgagagctatgtgtccttcagccgctacagtgatgctgtgtccctgccccaggaccccggggtcatctgtggggctgtgtttggctgcatctttggagccctggtgattgtgacagtgggcggcttcatcttctggaggaagaagaggaaggatgccaagaacaatgaggtgtccttcagccagatcaagcccaagaagagcaagctgatccgggtggagaactttgaggcctacttcaagaagcagcaggccgacagcaactgtggctttgctgaggagtatgaggacctgaagctggtgggcatcagccagcccaagtatgctgctgagctggccgagaacagaggcaagaaccgctacaacaacgtgctgccctatgacatcagccgggtgaagctgtctgtgcagacccacagcacagatgactacatcaatgccaactacatgcctggctaccacagcaagaaggacttcatcgccacccagggccccctgcccaacaccctgaaggacttctggaggatggtgtgggagaagaatgtgtatgccatcatcatgctgaccaagtgtgtggagcagggccgcaccaagtgtgaggagtactggcccagcaagcaggcccaggactatggagacatcaccgtggccatgaccagcgagatcgtgctgcctgagtggaccatccgggacttcaccgtgaagaacatccagaccagcgagagccaccccctgcggcagttccacttcacctcctggccagaccacggcgtgcctgacaccacagacctgctgatcaacttccgctacctggtgcgggactacatgaagcagagccccccagagagccccatcctggtgcactgcagcgctggggtgggccgcacaggcaccttcatcgccatcgacaggctcatctaccagattgaaaatgaaaatacagtggatgtgtatggcatcgtgtatgacctgaggatgcaccggcccctgatggtgcagacagaggaccagtatgtgttcctgaaccagtgtgtgctggacatcgtgcgcagccagaaggacagcaaggtggacctgatctaccagaacaccacagccatgaccatctatgagaacctggcccctgtgaccaccttcggcaagaccaacggctacatcgcctag

SEQ ID NO: 132634 - DNA, 4014 bp, Artificial Sequence
  derived and/or modified sequence
atgaagcccgccgcccgggaggcccggctgcccccccggagccccgggctgagatgggccctgcctctgctgctccttttgctgcggctgggacagattctctgtgctggaggaacgccatctccgattcctgacccttccgttgcaaccgtcgctaccggagagaacgggatcacccagattagttcaacagcagagtctttccacaaacagaatggaacaggcacgccgcaagtggaaaccaatacctccgaagatggagaatcctctggcgccaacgattccctgcggacccctgaacagggctccaacggcacagacggtgccagtcagaaaacgccttcttctaccgggccttcgcccgtttttgatattaaggctgtgtctatcagtcccactaacgtgatactgacctggaaatccaatgacaccgctgcctctgaatataagtatgtcgtgaagcataagatggagaatgaaaagaccatcaccgtcgttcaccagccatggtgcaacattaccggcctgcggcccgctacctcgtatgtgttttccattactcccggcatagggaatgagacttggggagaccctagagtgatcaaagttatcaccgaaccgatcccagtttctgacttgagagtggccctgaccggagttcgaaaggcagccttaagttggtcaaatgggaacggcactgccagttgcagggtcctcctggagagcatcgggagccacgaagaactgacacaggattcaagactgcaggttaatatctccggactgaagcccggggttcagtataacattaacccctatctgctccaatccaataagaccaagggcgacccccttggcacagagggtggcctcgatgcttccaacaccgagcggagccgggccggctctcccaccgctcctgtgcacgatgaatctcttgttgggcccgtggatcccagctcaggccagcagagtagggatactgaagtcttgctggtcgggctggagcctgggactaggtataacgccacggtatacagtcaggccgcgaatgggacagagggacagccccaagccatagaatttaggacaaatgctatacaggtgttcgatgtaaccgctgtgaatatctcggcgacttcattgaccctgatctggaaggtgtctgataatgaatcgagttccaattacacttacaaaatccacgtggcaggtgaaaccgattcaagcaatcttaacgtgtcagagccaagggcagtgatccctgggcttaggtcttctaccttctataacattacagtgtgccctgttctgggcgatatcgagggaacacctggttttttgcaggttcacacccccccagtgccagtgagtgattttagagtgacggtggtatcaacaactgagatcggtctagcatggtcctcacacgacgccgagtcctttcagatgcacatcacacaggagggcgctggtaattctcgcgtcgaaattacgaccaatcagagtatcatcattgggggactgttcccaggaactaagtactgcttcgaaattgttcccaagggtcccaacggcactgagggggcttcccgtacagtttgcaataggaccgttccaagcgccgtgttcgatatccacgttgtgtatgtaaccaccaccgaaatgtggttggactggaagtccccagacggtgcctctgagtacgtctaccacctggtaattgagtccaaacatggaagcaaccacaccagcacgtatgacaaagccattacgttgcaggggttgataccgggtaccctgtataatatcactatttcacccgaagtcgaccacgtttggggtgatcccaatagtacggctcaatacacccgcccgtccaacgtgagtaacatcgatgtgagcactaacacgacagctgcgacactgtcttggcagaattttgacgatgcttcccccacttactcttactgcctgctgattgaaaaggcaggaaattcctcaaatgctactcaagttgtgaccgacatcggtataaccgatgcaactgtcacagagcttattcctggatcatcctatacggtcgagatcttcgctcaagtaggggacggaatcaagtcactcgagcccggacggaaaagtttctgcacagaccccgcttctatggcttcttttgattgtgaggtagtgcctaaggagcctgcccttgttctcaagtggacctgccccccgggtgccaatgcaggctttgaactagaggtatcctcgggcgcttggaacaatgctactcacctagagagctgctcttcagagaacggcaccgaatacagaacagaggtgacctatctcaattttagcacttcctacaacatcagcataaccacagtgagttgtgggaaaatggctgcccctactcggaatacatgtaccacggggattactgatcctccgccaccagacgggtctcccaatattacctcggtgtcccataatagtgttaaagtgaaatttagcggcttcgaggcaagccatggcccaatcaaagcatacgcagtgatcctgaccacaggggaggccggtcaccccagcgccgacgtacttaaatacacatacgaagatttcaagaaaggtgcttccgatacctacgttacttacctcattcgaaccgaggagaaaggtaggtctcagtccttaagtgaagtgctcaaatatgagatcgacgtgggaaacgaatccaccacattgggatattacaatggaaaactcgagcctctgggcagctaccgggcctgcgtcgccgggtttactaatatcaccttccatccacaaaacaaaggcctgatcgacggggccgagtcctatgtatcattctctcgatactccgatgcggttagcctgccacaagaccccggagtgatatgtggagcagtgttcggctgcatcttcggagctctggtcatagtgactgtgggaggatttatcttttggcgtaagaaacgtaaggatgctaaaaataatgaggtttccttttcacaaattaagccaaaaaagagtaaacttattagggtggagaactttgaggcctactttaagaagcagcaggccgactccaattgcggatttgcagaagaatatgaagacttgaaactggtagggatttcgcagcccaagtacgcggccgaactggccgagaatcggggcaagaatcgctataacaatgtcctaccgtatgatataagtcgggtgaagctttcagtgcagacacattcgactgatgactatatcaatgccaactacatgcctggctaccacagcaagaaggatttcatcgccacccagggaccgctcccgaatacgcttaaagatttctggcggatggtttgggaaaagaacgtatacgccattatcatgctaacaaagtgcgtagagcagggacgcacgaaatgcgaagagtactggccctcaaagcaggcccaagactatggcgatatcaccgttgctatgactagtgaaattgtgctgcccgagtggaccatccgtgatttcactgtcaagaacattcaaaccagtgagtcacatccactgcggcaattccacttcacctcatggccagaccacggggtcccagataccactgatttgttaatcaacttccggtatctcgtgcgcgattatatgaagcagagtcctccagagtcaccgatccttgtgcactgttcagcgggagtggggaggaccggcacgttcatcgccattgaccgactgatctaccagattgagaatgaaaatactgtcgatgtgtatggtatcgtttacgatctgcgcatgcatcgaccattgatggtacagaccgaggatcagtacgtgttcctgaaccagtgtgtgctcgatatagtgcgctcccagaaggatagtaaggtcgatctcatttaccagaacaccaccgctatgaccatctacgagaaccttgcacccgtcacgaccttcggcaagactaacggatacatcgcttag

SEQ ID NO: 132635 - DNA, 4014 bp, Artificial Sequence
  derived and/or modified sequence
atgaagccggctgcgagggaggctcgtctgccccctcgtagccccggtctgagatgggccctacctttactgctcctgcttctgaggctgggacagatactctgcgccggtgggacaccatctccaattccggacccctccgtcgccacagtggcgacaggcgagaatggaattactcaaattagctctactgctgagtccttccataaacagaacgggaccgggactccgcaggtcgaaaccaacactagtgaagatggcgaatcctcgggcgcaaacgatagcctgcggactccggaacagggctctaatggtaccgatggggcaagtcaaaagacaccctcaagcactgggccaagccccgtgttcgacattaaggccgtcagcatatcccccaccaatgtgatcctgacatggaaaagtaacgacacggctgccagcgaatataagtacgtcgttaagcataagatggagaacgagaagaccataacagtcgtccatcaaccctggtgcaatatcacaggattacgcccagctacgagctacgtcttctctattacccccggtattggaaatgaaacatggggcgacccccgtgttattaaagtaattaccgagcctatccccgtgtccgatcttagagtggccctcaccggcgtacgcaaggcagcgctgagctggagcaacggcaacgggactgccagctgcagagtcctactggagagtataggcagccacgaggaactcacccaggactcaagacttcaggtgaacatttctggcctaaagccaggcgtgcagtacaatataaacccctacctcctgcagagcaataagacgaaaggagacccactgggcactgagggtggactggatgcaagcaacaccgagaggtctcgggcaggcagtccaacagcccctgtgcacgacgagtccctggtcggaccagtggacccttcgtcaggacagcaaagtcgggacacggaggtgttgctagtaggcttagagcccggaaccaggtataatgccacagtgtactcacaggccgctaatggtactgaaggacagccacaggcaatagagtttaggacaaatgctatccaggtatttgacgtgacggctgtcaacatcagcgcaacctcactgactctaatttggaaggtgtctgataatgagagctcatcaaattacacttacaaaattcacgtcgccggtgagaccgattcttccaacctgaacgtgtcagaaccaagggctgtcatacctggacttagatccagcacattttacaacatcactgtctgccccgtgctgggcgacattgaagggacacctggtttcttgcaggttcacactcctcctgtgcccgtgtctgattttagggtcactgtggtcagcacaacggagataggcctggcgtggagcagccacgacgcagaaagctttcaaatgcacatcactcaggagggtgctggaaattcccgagtggagatcaccaccaatcaaagcatcataatcggcggtctgttcccgggtacaaagtactgcttcgaaattgtcccaaagggtcctaacggcacggagggcgctagccgcacagtatgtaatagaaccgtgccttctgcagtgttcgatatccacgtggtgtacgtcaccactaccgaaatgtggttggactggaaatcccccgacggtgccagtgagtacgtgtaccacttggtgattgagtctaagcatgggagcaatcatacttctacctacgacaaagccattactttgcaaggattgatccctggcacactctataacatcaccatcagtcccgaggtcgatcacgtgtggggggacccaaacagtacagcgcagtacacacgcccttccaatgtatccaacatagatgtcagcaccaacaccacagccgcaactttatcctggcagaacttcgatgacgccagcccaacctactcttactgtctcctcatcgagaaagcaggtaatagtagtaacgccactcaagtggtcacggacattggcataacagacgcgaccgtgaccgaactgatacctggttcttcatacaccgtcgagatatttgcacaggtgggagatggtattaaaagcctggagccaggcagaaaatctttttgtaccgacccagcctctatggccagcttcgattgcgaggtcgtgcccaaggagcctgcgctcgtgttgaagtggacttgcccaccaggagccaatgctggattcgagctggaagtctcctccggggcatggaacaacgccacccacctggagtcatgctctagcgaaaacggaacagagtacagaactgaggtcacctacctcaacttctcaacaagctataacatttcgataacaactgtctcctgcgggaagatggccgcacccaccagaaacacttgcacaactggtatcacagatccgccacctcccgatggctcgccaaacattacctctgtttcccacaactctgtgaaagtgaagtttagcggcttcgaagccagccatgggcctatcaaggcttatgccgtgattcttaccactggggaggcaggacacccctctgctgacgtgcttaagtacacgtatgaggatttcaaaaagggggcttccgacacttatgtcacgtacctgattcgtacggaggaaaaagggcgatctcagtcccttagtgaggtgttaaagtatgaaattgatgttggaaacgagagtactacactgggctactataatggcaaactggaacccctgggaagttatcgcgcttgcgtcgccggattcactaacattacgtttcacccccagaataaagggctgatcgatggggcagaaagttatgtcagcttttcccgttatagtgacgccgtctccttaccccaggatcctggagtgatttgtggcgcagtatttggctgtatcttcggcgctctggtgattgtcacggttggaggctttatcttctggcggaaaaagagaaaggacgcaaagaataatgaagtttccttctcgcagattaagcccaagaaatctaagctgatccgggtggaaaatttcgaggcgtattttaagaaacaacaggccgacagcaactgtggctttgccgaagaatatgaagatctgaagctggtgggcatctctcagcctaagtatgccgcagaactggccgagaatagaggaaagaaccggtataacaacgtccttccctatgacatctcgagagtcaaactgtccgttcagacccacagcaccgacgattacataaacgctaactacatgcctggttaccactccaagaaagattttatcgctactcagggccctttaccaaataccctgaaagacttctggcgaatggtctgggagaagaacgtgtatgccatcatcatgttgactaagtgtgttgagcaaggccgaactaagtgtgaggaatattggccttcaaaacaagcacaggactacggagatattaccgtggctatgacatctgagatagtactgccagaatggactatccgggactttactgtaaagaacatacagacgagcgaaagccatcctctgaggcagttccacttcacatcttggccagaccacggcgtgcctgatactaccgacctcctcatcaacttcaggtacctggtgcgggattatatgaaacagagcccccctgaaagcccgattctggtgcattgctcagccggagtgggacggacgggaaccttcattgcaatcgacagattgatttaccagatagaaaatgagaatacggtagacgtatacggcatcgtttacgaccttcgcatgcatcgacccctcatggtgcaaacagaggaccagtacgttttcttaaatcagtgtgtcctggacatcgtgaggtcccaaaaagatagcaaggtggaccttatttatcagaataccaccgctatgactatttatgagaatttagcgcctgtcacaacgttcggcaaaaccaatggctatattgcatag

SEQ ID NO: 132636 - DNA, 7846 bp, Artificial Sequence
  derived and/or modified sequence
cagccccagccgcatgacgcgcggaggaggcagcgggagcagccgcgggagccgggaccgggtagccgcgcgctgggggtgggcgccgctcgctccgccccgcgaagcccctgcgcgctcagggacgcggcccccccgcggcagccgcgctaggctccggcgtgtggccgcggccgccgccgccgctgccatgtctccggggaagcccggggcgggcggagcggggacgaggcggaccggctggcggaggaggaggcgaaggagacggcaggaggcggcgacgacggtgcccgggctcgggcgcacggcggggcccgattcgcgcgtccggggcacgttccagggcgcgcggggcatgaagccggcggcgcgggaggcgcggctgcctccgcgctcgcccgggctgcgctgggcgctgccgctgctgctgctgctgctgcgcctgggccagatcctgtgcgcaggtggcacccctagtccaattcctgacccttcagtagcaactgttgccacaggggaaaatggcataacgcagatcagcagtacagcagaatcctttcataaacagaatggaactggaacacctcaggtggaaacaaacaccagtgaggatggtgaaagctctggagccaacgatagtttaagaacacctgaacaaggatctaatgggactgatggggcatctcaaaaaactcccagtagcactgggcccagtcctgtgtttgacattaaagctgtttccatcagtccaaccaatgtgatcttaacttggaaaagtaatgacacagctgcttctgagtacaagtatgtagtaaagcataagatggaaaatgagaagacaattactgttgtgcatcaaccatggtgtaacatcacaggcttacgtccagcgacttcatatgtattctccatcactccaggaataggcaatgagacttggggagatcccagagtcataaaagtcatcacagagccgatcccagtttctgatctccgtgttgccctcacgggtgtgaggaaggctgctctctcctggagcaatggcaatggcactgcctcctgccgggttcttcttgaaagcattggaagccatgaggagttgactcaagactcaagacttcaggtcaatatctcgggcctgaagccaggggttcaatacaacatcaacccgtatcttctacaatcaaataagacaaagggagaccccttgggcacagaaggtggcttggatgccagcaatacagagagaagccgggcagggagccccaccgcccctgtgcatgatgagtccctcgtgggacctgtggacccatcctccggccagcagtcccgagacacggaagtcctgcttgtcgggttagagcctggcacccgatacaatgccaccgtttattcccaagcagcgaatggcacagaaggacagccccaggccatagagttcaggacaaatgctattcaggtttttgacgtcaccgctgtgaacatcagtgccacaagcctgaccctgatctggaaagtcagcgataacgagtcgtcatctaactatacctacaagatacatgtggcgggggagacagattcttccaatctcaacgtcagtgagcctcgcgctgtcatccccggactccgctccagcaccttctacaacatcacagtgtgtcctgtcctaggtgacatcgagggcacgccgggcttcctccaagtgcacaccccccctgttccagtttctgacttccgagtgacagtggtcagcacgacggagatcggcttagcatggagcagccatgatgcagaatcatttcagatgcatatcacacaggagggagctggcaattctcgggtagaaataaccaccaaccaaagtattatcattggtggcttgttccctggaaccaagtattgctttgaaatagttccaaaaggaccaaatgggactgaaggggcatctcggacagtttgcaatagaactgttcccagtgcagtgtttgacatccacgtggtctacgtcaccaccacggagatgtggctggactggaagagccctgacggtgcttccgagtatgtctaccatttagtcatagagtccaagcatggctctaaccacacaagcacgtatgacaaagcgattactctccagggcctgattccgggcaccttatataacatcaccatctctccagaagtggaccacgtctggggggaccccaactccactgcacagtacacacggcccagcaatgtgtccaacattgatgtaagtaccaacaccacagcagcaactttaagttggcagaactttgatgacgcctctcccacgtactcctactgccttcttattgagaaggctggaaattccagcaacgcaacacaagtagtcacggacattggaattactgacgctacagtcactgaattaatacctggctcatcatacacagtggagatctttgcacaagtaggggatgggatcaagtcactggaacctggccggaagtcattctgtacagatcctgcgtccatggcctccttcgactgcgaagtggtccccaaagagccagccctggttctcaaatggacctgccctcctggcgccaatgcaggctttgagctggaggtcagcagtggagcctggaacaatgcgacccacctggagagctgctcctctgagaatggcactgagtatagaacggaagtcacgtatttgaatttttctacctcgtacaacatcagcatcaccactgtgtcctgtggaaagatggcagcccccacccggaacacctgcactactggcatcacagatccccctcctccagatggatcccctaatattacatctgtcagtcacaattcagtaaaggtcaagttcagtggatttgaagccagccacggacccatcaaagcctatgctgtcattctcaccaccggggaagctggtcacccttctgcagatgtcctgaaatacacgtatgaggatttcaaaaagggagcctcagatacttatgtgacatacctcataagaacagaagaaaagggacgttctcagagcttgtctgaagttttgaaatatgaaattgacgttgggaatgagtcaaccacacttggttattacaatgggaagctggaacctctgggctcctaccgggcttgtgtggctggcttcaccaacattaccttccaccctcaaaacaaggggctcattgatggggctgagagctatgtgtccttcagtcgctactcagatgctgtttccttgccccaggatccaggtgtcatctgtggagcggtttttggctgtatctttggtgccctggttattgtgactgtgggaggcttcatcttctggagaaagaagaggaaagatgcaaagaataatgaagtgtccttttctcaaattaagtaatagatctaagttaatcagagtggagaattttgaggcctacttcaagaagcagcaagctgactccaactgtgggttcgcagaggaatacgaagatctgaagcttgttggaattagtcaacctaaatatgcagcagaactggctgagaatagaggaaagaatcgctataataatgttctgccctatgatatttcccgtgtcaaactttcggtccagacccattcaacggatgactacatcaatgccaactacatgcctggctaccactccaagaaagattttattgccacacaaggacctttaccgaacactttgaaagatttttggcgtatggtttgggagaaaaatgtatatgccatcattatgttgactaaatgtgttgaacagggaagaaccaaatgtgaggagtattggccctccaagcaggctcaggactatggagacataactgtggcaatgacatcagaaattgttcttccggaatggaccatcagagatttcacagtgaaaaatatccagacaagtgagagtcaccctctgagacagttccatttcacctcctggccagaccacggtgttcccgacaccactgacctgctcatcaacttccggtacctcgttcgtgactacatgaagcagagtcctcccgaatcgccgattctggtgcattgcagtgctggggtcggaaggacgggcactttcattgccattgatcgtctcatctaccagatagagaatgagaacaccgtggatgtgtatgggattgtgtatgaccttcgaatgcataggcctttaatggtgcagacagaggaccagtatgttttcctcaatcagtgtgttttggatattgtcagatcccagaaagactcaaaagtagatcttatctaccagaacacaactgcaatgacaatctatgaaaaccttgcgcccgtgaccacatttggaaagaccaatggttacatcgcctaattccaaaggaataacctttctggagtgaaccagaccgtcgcacccacagcgaaggcacatgccccgatgtcgacatgtttttatatgtctaatatcttaattctttgttctgttttgtgagaactaattttgagggcatgaagctgcatatgatagatgacaaattggggctgtcgggggctgtggatgggtggggagcaaatcatctgcattcctgatgaccaatgggatgaggtcactttttttttttttcccccttgaggattgtggaaaaccaggaaaagggagctatgatttttttttccaaaacaatttcttttttaaaaaagactattttatatgattcacatgctaaagccaggattgtgttgggttgaatatattttaagtatcagaggtctatttttacctactgtgtcttggaatctagccgatggaaaatacctaattgtggatgatgattgcgcagggaggggtacgtggcacctcttccgaatgggttttctatttgaacatgtgccttttctgaattatgcttccacaggcaaaactcagtagagatctatatttttgtactgaatctcataattggaatatacggaatatttaaacagtagcttagcatcagaggtttgcttcctcagtaacatttctgttctcatttgatcaggggaggcctctttgccccgactccgcttcccctgccccctgtacatttgtgctccattttttcttcccttttccctcccagttttctccaaagactcttctgttggcaacattttcaacccattggttgggtgagaatggcgactcaaatatcaccttgagaatttctgtgggtgggaatgggagaagcagaggaatcctacagtggcagaaatccttttcttgtccctgtattatcctttttctcatgtctgtatttggtatgaaggattatttaaaggtgcaatatgtgaattagtgattcatgatgttctaggtttttagtaacgttttactcaggttggcattttatgtgtctgtgtctgtatgtgtgtgtgtatgttcagaagcgtggcaatctgtgaacacttcagcgtgaattcagtgtcagattaatccctccttccccaaagtccactggctttcgtctctctctgccgtgacacatatcggaatctactgtgtatatatatatatatatatatatatatatatatatatatatatatatacactaagctctcaaaaacagtcattcctatgaattgaggtgtacaaagtttgaatttgtatcaaagatgtaattattatttttaaaaccttttcactatactgctgctgtaattactttgatttttaaaatgtagattaatttttttttttttgcttcaggtgtgtatccaccaagaatttcaaatttatgtggatttattttattggtacataatctgtaaacttcttaaggcattaacatgaaaagattttttctttttattttatattgtggctcaggttatattttgaagatgttttgagtttatcctccaataggcaatgaagttgacaaggttttatgaaggaataaccaagtccctggagtcctgtggctgttgccacagtaatgtgtcctgctgtaaacaggacaggtgtgtcctgttgagaatgtgagcgggctcttccagcctcctggtccctcctgactctgccacgcccctcacctcactggcacttcgataactgactggacgtgttaatgggtcttttagggttctaaagggtgaaccacacttttaaagccccggctgtggttcggagggttagtgctgtatgccttttatttccctttccctttgaggtactgaaaggatgaaaaggtggtgtcatgttttggggagaatcttacttctcaaatggaaattgcactttttgctgaatcctttgcatttttttggtagtaagcagttcattgagtatcaggtcctcaaaggaatgagttggcccggctagggtgggccctcttgacctaacttcagagggggccttggctcagtaggtgtgaatcagggaagccacattgtcctcagggtgctgtatgaagctgggtgtgggcggattcctcccacaccttcacactggcctgcctccaactcatacagatctcggagcggtcggtacttcattcataggtccctgttcaggcagcagttctgtgggctgtggccctctcccctccaatatgtccgaaaccattgtgatgggtggcaaatcccagggagctcctaagccctgctctgcccacatcactgccacagagaagtcagaggaagggacttgttgctaaaaaatcctttaaaaggttaaatactttaaaagattaaagcaacataactgtaaacatattgtataaaaatgaaaaacacaggaaccctcttcccttccgcctggtgtgggcttgggaaatgggcaagcggccccagcaatcatgggaggaactcttgcgggggagcggtctgggattccaaatgggcaggtcacacgaaggtcacgatgcttctctgcatcctgaaaagggctggggacagggccagtgggggtggtaagggtatttatagcacagtgcttgaaaagggaagattaatgtgtaaatataaaggacacacaggctgggggttggtcagaggcaagaggagggtgcctctgagcttcaacccctcccaggaacaatgagctcaaattggaagagtccagtggaatcggggggatggtgtgagcacccctgttcagtctttgacaattgcatacagaaaagcagctggtatgggtttgggtgtcaatgaaagggccaaagactggtggccagctggtttgggggatttgggccattgatagcatctcccaggaacaacgactttttgcctccaaagttggatctagtgatgatcagcaccagcaggaaatgacatttggtgtctgcccactgcagccatactgtgacctccagccagacttccgcctaattgactccactggatttgtgctctgttgagtcagaggctcccgggggttggggatcgaggggcgggggtcagctatgcagcccatcacgtgtgtttttcatctgggatgaaaaagcctggttctcttttgaaatgcttgattgtacttattgagctaaacaagtcttggtgactgttgttgatttgcctcaaaagttttaagtcctgggttttcagactactgtgtagcagctgtgtgtttaacatactgtagctttttctcccttgggggcacatacaaataggatgtgttgatgtggactctaaactgtaattttcctgtaactattttggaatgatgcatatttctaatgtttgttatacttgtacagagtattgctgttggttgctttttttttttttaaggaaaaaatggcctgaaaacatttttttaaagacttacaaataccaaatataaaaaaatgtcaatgcatt

SEQ ID NO: 132637 - DNA, 5122 bp, Artificial Sequence
  derived and/or modified sequence
ccccagccgcatgacgcgcggaggaggcagcgggagcagccgcgggagccgggaccgggtagccgcgcgctgggggtgggcgccgctcgctccgccccgcgaagcccctgcgcgctcagggacgcggcccccccgcggcagccgcgctaggctccggcgtgtggccgcggccgccgccgccgctgccatgtctccggggaagcccggggcgggcggagcggggacgaggcggaccggctggcggaggaggaggcgaaggagacggcaggaggcggcgacgacggtgcccgggctcgggcgcacggcggggcccgattcgcgcgtccggggcacgttccagggcgcgcggggcatgaagccggcggcgcgggaggcgcggctgcctccgcgctcgcccgggctgcgctgggcgctgccgctgctgctgctgctgctgcgcctgggccagatcctgtgcgcaggtggcacccctagtccaattcctgacccttcagtagcaactgttgccacaggggaaaatggcataacgcagatcagcagtacagcagaatcctttcataaacagaatggaactggaacacctcaggtggaaacaaacaccagtgaggatggtgaaagctctggagccaacgatagtttaagaacacctgaacaaggatctaatgggactgatggggcatctcaaaaaactcccagtagcactgggcccagtcctgtgtttgacattaaagctgtttccatcagtccaaccaatgtgatcttaacttggaaaagtaatgacacagctgcttctgagtacaagtatgtagtaaagcataagatggaaaatgagaagacaattactgttgtgcatcaaccatggtgtaacatcacaggcttacgtccagcgacttcatatgtattctccatcactccaggaataggcaatgagacttggggagatcccagagtcataaaagtcatcacagagccgatcccagtttctgatctccgtgttgccctcacgggtgtgaggaaggctgctctctcctggagcaatggcaatggcactgcctcctgccgggttcttcttgaaagcattggaagccatgaggagttgactcaagactcaagacttcaggtcaatatctcgggcctgaagccaggggttcaatacaacatcaacccgtatcttctacaatcaaataagacaaagggagaccccttgggcacagaaggtggcttggatgccagcaatacagagagaagccgggcagggagccccaccgcccctgtgcatgatgagtccctcgtgggacctgtggacccatcctccggccagcagtcccgagacacggaagtcctgcttgtcgggttagagcctggcacccgatacaatgccaccgtttattcccaagcagcgaatggcacagaaggacagccccaggccatagagttcaggacaaatgctattcaggtttttgacgtcaccgctgtgaacatcagtgccacaagcctgaccctgatctggaaagtcagcgataacgagtcgtcatctaactatacctacaagatacatgtggcgggggagacagattcttccaatctcaacgtcagtgagcctcgcgctgtcatccccggactccgctccagcaccttctacaacatcacagtgtgtcctgtcctaggtgacatcgagggcacgccgggcttcctccaagtgcacaccccccctgttccagtttctgacttccgagtgacagtggtcagcacgacggagatcggcttagcatggagcagccatgatgcagaatcatttcagatgcatatcacacaggagggagctggcaattctcgggtagaaataaccaccaaccaaagtattatcattggtggcttgttccctggaaccaagtattgctttgaaatagttccaaaaggaccaaatgggactgaaggggcatctcggacagtttgcaatagaactgttcccagtgcagtgtttgacatccacgtggtctacgtcaccaccacggagatgtggctggactggaagagccctgacggtgcttccgagtatgtctaccatttagtcatagagtccaagcatggctctaaccacacaagcacgtatgacaaagcgattactctccagggcctgattccgggcaccttatataacatcaccatctctccagaagtggaccacgtctggggggaccccaactccactgcacagtacacacggcccagcaatgtgtccaacattgatgtaagtaccaacaccacagcagcaactttaagttggcagaactttgatgacgcctctcccacgtactcctactgccttcttattgagaaggctggaaattccagcaacgcaacacaagtagtcacggacattggaattactgacgctacagtcactgaattaatacctggctcatcatacacagtggagatctttgcacaagtaggggatgggatcaagtcactggaacctggccggaagtcattctgtacagatcctgcgtccatggcctccttcgactgcgaagtggtccccaaagagccagccctggttctcaaatggacctgccctcctggcgccaatgcaggctttgagctggaggtcagcagtggagcctggaacaatgcgacccacctggagagctgctcctctgagaatggcactgagtatagaacggaagtcacgtatttgaatttttctacctcgtacaacatcagcatcaccactgtgtcctgtggaaagatggcagcccccacccggaacacctgcactactggcatcacagatccccctcctccagatggatcccctaatattacatctgtcagtcacaattcagtaaaggtcaagttcagtggatttgaagccagccacggacccatcaaagcctatgctgtcattctcaccaccggggaagctggtcacccttctgcagatgtcctgaaatacacgtatgaggatttcaaaaagggagcctcagatacttatgtgacatacctcataagaacagaagaaaagggacgttctcagagcttgtctgaagttttgaaatatgaaattgacgttgggaatgagtcaaccacacttggttattacaatgggaagctggaacctctgggctcctaccgggcttgtgtggctggcttcaccaacattaccttccaccctcaaaacaaggggctcattgatggggctgagagctatgtgtccttcagtcgctactcagatgctgtttccttgccccaggatccaggtgtcatctgtggagcggtttttggctgtatctttggtgccctggttattgtgactgtgggaggcttcatcttctggagaaagaagaggaaagatgcaaagaataatgaagtgtccttttctcaaattaaacctaaaaaatctaagttaatcagagtggagaattttgaggcctacttcaagaagcagcaagctgactccaactgtgggttcgcagaggaatacgaagatctgaagcttgttggaattagtcaacctaaatatgcagcagaactggctgagaatagaggaaagaatcgctataataatgttctgccctatgatatttcccgtgtcaaactttcggtccagacccattcaacggatgactacatcaatgccaactacatgcctggctaccactccaagaaagattttattgccacacaaggacctttaccgaacactttgaaagatttttggcgtatggtttgggagaaaaatgtatatgccatcattatgttgactaaatgtgttgaacagggaagaaccaaatgtgaggagtattggccctccaagcaggctcaggactatggagacataactgtggcaatgacatcagaaattgttcttccggaatggaccatcagagatttcacagtgaaaaatatccagacaagtgagagtcaccctctgagacagttccatttcacctcctggccagaccacggtgttcccgacaccactgacctgctcatcaacttccggtacctcgttcgtgactacatgaagcagagtcctcccgaatcgccgattctggtgcattgcagtgctggggtcggaaggacgggcactttcattgccattgatcgtctcatctaccagatagagaatgagaacaccgtggatgtgtatgggattgtgtatgaccttcgaatgcataggcctttaatggtgcagacagaggaccagtatgttttcctcaatcagtgtgttttggatattgtcagatcccagaaagactcaaaagtagatcttatctaccagaacacaactgcaatgacaatctatgaaaaccttgcgcccgtgaccacatttggaaagaccaatggttacatcgcctaattccaaaggaataacctttctggagtgaaccagaccgtcgcacccacagcgaaggcacatgccccgatgtcgacatgtttttatatgtctaatatcttaattctttgttctgttttgtgagaactaattttgagggcatgaagctgcatatgatagatgacaaattggggctgtcgggggctgtggatgggtggggagcaaatcatctgcattcctgatgaccaatgggatgaggtcactttttttttttttcccccttgaggattgtggaaaaccaggaaaagggagctatgatttttttttccaaaacaatttcttttttaaaaaagactattttatatgattcacatgctaaagccaggattgtgttgggttgaatatattttaagtatcagaggtctatttttacctactgtgtcttggaatctagccgatggaaaatacctaattgtggatgatgattgcgcagggaggggtacgtggcacctcttccgaatgggttttctatttgaacatgtgccttttctgaattatgcttccacaggcaaaactcagtagagatctatatttttgtactgaatctcataattggaatatacggaatatttaaacagtagcttagcatcagaggtttgcttcctcagtaacatttctgttctcatttgatcaggggaggcctctttgccccgactccgcttcccctgccccctgtacatttgtgctccattttttcttcccttttccctcccagttttc

SEQ ID NO: 132638 - DNA, 4014 bp, Artificial Sequence
  derived and/or modified sequence
atgaagcccgccgccagagaggccagactgccccccagaagccccggcctgagatgggccctgcccctgctgctgctgctgctgagactgggccagatcctgtgcgccggcggcacccccagccccatccccgaccccagcgtggccaccgtggccaccggcgagaacggcatcacccagatcagcagcaccgccgagagcttccacaagcagaacggcaccggcaccccccaggtggagaccaacaccagcgaggacggcgagagcagcggcgccaacgacagcctgagaacccccgagcagggcagcaacggcaccgacggcgccagccagaagacccccagcagcaccggccccagccccgtgttcgacatcaaggccgtgagcatcagccccaccaacgtgatcctgacctggaagagcaacgacaccgccgccagcgagtacaagtacgtggtgaagcacaagatggagaacgagaagaccatcaccgtggtgcaccagccctggtgcaacatcaccggcctgagacccgccaccagctacgtgttcagcatcacccccggcatcggcaacgagacctggggcgaccccagagtgatcaaggtgatcaccgagcccatccccgtgagcgacctgagagtggccctgaccggcgtgagaaaggccgccctgagctggagcaacggcaacggcaccgccagctgcagagtgctgctggagagcatcggcagccacgaggagctgacccaggacagcagactgcaggtgaacatcagcggcctgaagcccggcgtgcagtacaacatcaacccctacctgctgcagagcaacaagaccaagggcgaccccctgggcaccgagggcggcctggacgccagcaacaccgagagaagcagagccggcagccccaccgcccccgtgcacgacgagagcctggtgggccccgtggaccccagcagcggccagcagagcagagacaccgaggtgctgctggtgggcctggagcccggcaccagatacaacgccaccgtgtacagccaggccgccaacggcaccgagggccagccccaggccatcgagttcagaaccaacgccatccaggtgttcgacgtgaccgccgtgaacatcagcgccaccagcctgaccctgatctggaaggtgagcgacaacgagagcagcagcaactacacctacaagatccacgtggccggcgagaccgacagcagcaacctgaacgtgagcgagcccagagccgtgatccccggcctgagaagcagcaccttctacaacatcaccgtgtgccccgtgctgggcgacatcgagggcacccccggcttcctgcaggtgcacaccccccccgtgcccgtgagcgacttcagagtgaccgtggtgagcaccaccgagatcggcctggcctggagcagccacgacgccgagagcttccagatgcacatcacccaggagggcgccggcaacagcagagtggagatcaccaccaaccagagcatcatcatcggcggcctgttccccggcaccaagtactgcttcgagatcgtgcccaagggccccaacggcaccgagggcgccagcagaaccgtgtgcaacagaaccgtgcccagcgccgtgttcgacatccacgtggtgtacgtgaccaccaccgagatgtggctggactggaagagccccgacggcgccagcgagtacgtgtaccacctggtgatcgagagcaagcacggcagcaaccacaccagcacctacgacaaggccatcaccctgcagggcctgatccccggcaccctgtacaacatcaccatcagccccgaggtggaccacgtgtggggcgaccccaacagcaccgcccagtacaccagacccagcaacgtgagcaacatcgacgtgagcaccaacaccaccgccgccaccctgagctggcagaacttcgacgacgccagccccacctacagctactgcctgctgatcgagaaggccggcaacagcagcaacgccacccaggtggtgaccgacatcggcatcaccgacgccaccgtgaccgagctgatccccggcagcagctacaccgtggagatcttcgcccaggtgggcgacggcatcaagagcctggagcccggcagaaagagcttctgcaccgaccccgccagcatggccagcttcgactgcgaggtggtgcccaaggagcccgccctggtgctgaagtggacctgcccccccggcgccaacgccggcttcgagctggaggtgagcagcggcgcctggaacaacgccacccacctggagagctgcagcagcgagaacggcaccgagtacagaaccgaggtgacctacctgaacttcagcaccagctacaacatcagcatcaccaccgtgagctgcggcaagatggccgcccccaccagaaacacctgcaccaccggcatcaccgacccccccccccccgacggcagccccaacatcaccagcgtgagccacaacagcgtgaaggtgaagttcagcggcttcgaggccagccacggccccatcaaggcctacgccgtgatcctgaccaccggcgaggccggccaccccagcgccgacgtgctgaagtacacctacgaggacttcaagaagggcgccagcgacacctacgtgacctacctgatcagaaccgaggagaagggcagaagccagagcctgagcgaggtgctgaagtacgagatcgacgtgggcaacgagagcaccaccctgggctactacaacggcaagctggagcccctgggcagctacagagcctgcgtggccggcttcaccaacatcaccttccacccccagaacaagggcctgatcgacggcgccgagagctacgtgagcttcagcagatacagcgacgccgtgagcctgccccaggaccccggcgtgatctgcggcgccgtgttcggctgcatcttcggcgccctggtgatcgtgaccgtgggcggcttcatcttctggagaaagaagagaaaggacgccaagaacaacgaggtgagcttcagccagatcaagcccaagaagagcaagctgatcagagtggagaacttcgaggcctacttcaagaagcagcaggccgacagcaactgcggcttcgccgaggagtacgaggacctgaagctggtgggcatcagccagcccaagtacgccgccgagctggccgagaacagaggcaagaacagatacaacaacgtgctgccctacgacatcagcagagtgaagctgagcgtgcagacccacagcaccgacgactacatcaacgccaactacatgcccggctaccacagcaagaaggacttcatcgccacccagggccccctgcccaacaccctgaaggacttctggagaatggtgtgggagaagaacgtgtacgccatcatcatgctgaccaagtgcgtggagcagggcagaaccaagtgcgaggagtactggcccagcaagcaggcccaggactacggcgacatcaccgtggccatgaccagcgagatcgtgctgcccgagtggaccatcagagacttcaccgtgaagaacatccagaccagcgagagccaccccctgagacagttccacttcaccagctggcccgaccacggcgtgcccgacaccaccgacctgctgatcaacttcagatacctggtgagagactacatgaagcagagcccccccgagagccccatcctggtgcactgcagcgccggcgtgggcagaaccggcaccttcatcgccatcgacagactgatctaccagatcgagaacgagaacaccgtggacgtgtacggcatcgtgtacgacctgagaatgcacagacccctgatggtgcagaccgaggaccagtacgtgttcctgaaccagtgcgtgctggacatcgtgagaagccagaaggacagcaaggtggacctgatctaccagaacaccaccgccatgaccatctacgagaacctggcccccgtgaccaccttcggcaagaccaacggctacatcgcctag

SEQ ID NO: 132639 - protein, 1440 aa, Artificial Sequence
  derived and/or modified sequence
MDTTAAAALPAFVALLLLSPWPLLGSAQGQFSAGGCTFDDGPGACDYHQDLYDDFEWVHVSAQEPHYLPPEMPQGSYMIVDSSDHDPGEKARLQLPTMKENDTHCIDFSYLLYSQKGLNPGTLNILVRVNKGPLANPIWNVTGFTGRDWLRAELAVSTFWPNEYQVIFEAEVSGGRSGYIAIDDIQVLSYPCDKSPHFLRLGDVEVNAGQNATFQCIATGRDAVHNKLWLQRRNGEDIPVAQTKNINHRRFAASFRLQEVTKTDQDLYRCVTQSERGSGVSNFAQLIVREPPRPIAPPQLLGVGPTYLLIQLNANSIIGDGPIILKEVEYRMTSGSWTETHAVNAPTYKLWHLDPDTEYEIRVLLTRPGEGGTGLPGPPLITRTKCAEPMRTPKTLKIAEIQARRIAVDWESLGYNITRCHTFNVTICYHYFRGHNESKADCLDMDPKAPQHVVNHLPPYTNVSLKMILTNPEGRKESEETIIQTDEDVPGPVPVKSLQGTSFENKIFLNWKEPLDPNGIITQYEISYSSIRSFDPAVPVAGPPQTVSNLWNSTHHVFMHLHPGTTYQFFIRASTVKGFGPATAINVTTNISAPTLPDYEGVDASLNETATTITVLLRPAQAKGAPISAYQIVVEELHPHRTKREAGAMECYQVPVTYQNAMSGGAPYYFAAELPPGNLPEPAPFTVGDNRTYQGFWNPPLAPRKGYNIYFQAMSSVEKETKTQCVRIATKAAATEEPEVIPDPAKQTDRVVKIAGISAGILVFILLLLVVILIVKKSKLAKKRKDAMGNTRQEMTHMVNAMDRSYADQSTLHAEDPLSITFMDQHNFSPRYENHSATAESSRLLDVPRYLCEGTESPYQTGQLHPAIRVADLLQHINLMKTSDSYGFKEEYESFFEGQSASWDVAKKDQNRAKNRYGNIIAYDHSRVILQPVEDDPSSDYINANYIDGYQRPSHYIATQGPVHETVYDFWRMIWQEQSACIVMVTNLVEVGRVKCYKYWPDDTEVYGDFKVTCVEMEPLAEYVVRTFTLERRGYNEIREVKQFHFTGWPDHGVPYHATGLLSFIRRVKLSNPPSAGPIVVHCSAGAGRTGCYIVIDIMLDMAEREGVVDIYNCVKALRSRRINMVQTEEQYIFIHDAILEACLCGETAIPVCEFKAAYFDMIRIDSQTNSSHLKDEFQTLNSVTPRLQAEDCSIACLPRNHDKNRFMDMLPPDRCLPFLITIDGESSNYINAALMDSYRQPAAFIVTQYPLPNTVKDFWRLVYDYGCTSIVMLNEVDLSQGCPQYWPEEGMLRYGPIQVECMSCSMDCDVINRIFRICNLTRPQEGYLMVQQFQYLGWASHREVPGSKRSFLKLILQVEKWQEECEEGEGRTIIHCLNGGGRSGMFCAIGIVVEMVKRQNVVDVFHAVKTLRNSKPNMVEAPEQYRFCYDVALEYLESS

SEQ ID NO: 132640 - DNA, 4323 bp, Artificial Sequence
  derived and/or modified sequence
atggacactactgctgcagccgctctgcctgccttcgtggccttactactgctttccccctggcccctccttgggagtgcacagggtcagttcagcgcgggcggctgcaccttcgatgacggccctggggcatgcgactatcatcaggacctctacgatgatttcgagtgggtgcatgtgtctgcccaggagccccattaccttcccccggagatgcctcaagggagttacatgatcgtagacagctccgaccatgaccctggagaaaaagctaggctgcaattaccaactatgaaggagaatgacacacattgtatcgactttagctatctcttgtatagccaaaaagggctgaaccctggtacactgaacatactcgtcagagttaataaaggacccttagctaaccctatatggaatgtcaccggcttcacaggtagagactggttgcgcgcggaactggccgtctccacgttctggccgaacgaataccaggtgatcttcgaagcagaggtctccggtggtagatctggttacatcgcaattgacgacattcaggttctctcatatccctgcgataaaagcccacattttctcaggcttggcgatgtggaggtgaacgctggccagaacgcaaccttccagtgtatcgcaaccgggagagacgccgttcacaataaactgtggctacagagaaggaatggggaggatattcccgtggcccagaccaaaaacattaatcaccgtcggtttgctgcttcctttcgactgcaggaagtgaccaagactgatcaggatttgtaccgctgtgtcacacagtctgagcgcgggtcgggggtgtctaacttcgctcagttaatcgtgagggaacctccccggcccatcgcgccgccccaattattgggcgtaggccctacctaccttttaattcagctgaacgccaattcaatcattggagatggcccaatcatcttaaaagaggtggagtacaggatgacaagtgggtcttggaccgagactcacgctgtaaacgctcccacgtataaactgtggcatctagaccccgacactgagtatgaaatacgtgttctgctgacccgccctggtgagggtggaacgggtctgcccggtccacctttgataaccagaacaaagtgtgccgaacctatgagaacacccaaaacactgaagattgccgagatccaggcacggagaatcgccgtggactgggaaagcctaggctacaacattacccggtgtcacacatttaacgtgactatttgttatcactattttcgcggccacaacgaatcaaaggccgattgcctagacatggaccctaaagccccccagcacgtggtaaatcatctgccaccttacacaaacgtcagcttgaagatgatactaactaatcctgagggcagaaaagaatccgaggagaccataatacagactgacgaagacgtgcccggccctgtccctgtgaaatcgctgcagggcaccagctttgaaaacaaaattttcctgaactggaaggagcccctggaccccaacggaatcatcactcagtatgagatttcgtacagtagcatcaggtcctttgacccagccgtaccagtggctgggcctccacagacagtaagcaatttatggaatagcactcatcacgtgtttatgcacttgcacccgggaaccacgtaccagttttttatcagggccagtaccgtcaaaggattcggaccagccacagcaattaatgtgaccaccaatatttccgctcctacattgccagattacgagggtgtcgacgccagccttaatgagacagccactacgataacagtcctcttgagacctgcgcaggccaagggagcgcccattagcgcataccaaatagtggttgaggagctccaccctcataggacgaaacgcgaggctggcgccatggaatgttaccaggtgcccgtgacataccagaacgccatgtctggcggagccccctattacttcgctgcagagcttccccccggcaatctcccagagccagccccgttcaccgtgggagacaaccgcacttaccaaggcttctggaatcccccactggctccaagaaagggatataatatctattttcaagcgatgagcagtgtggagaaggaaactaaaacccaatgcgtccgaatcgccacaaaggcagctgccactgaggagcctgaagttattccggatcctgctaagcagaccgacagggttgttaaaatcgccggaatatctgccggaatactcgtgtttatcttactgctgctggttgttatcttaattgtaaagaaaagcaagctggccaaaaagaggaaggacgcgatgggtaacactaggcaagaaatgacccatatggtgaacgctatggatagaagttacgccgatcagtcaactctgcacgccgaggatcctctcagtatcacgtttatggaccaacataacttctctccaaggtacgaaaaccactctgccacagcggaatcatccaggctgttggatgtgccacggtatttgtgtgaaggtaccgaaagcccgtaccagactggccagctgcatcccgcaatcagggtggccgacctgttacagcatattaatctgatgaaaacttctgatagttacgggtttaaggaagaatacgagagtttcttcgaagggcagtcggcaagctgggatgtagccaaaaaggatcagaatcgtgccaagaaccggtatggcaatattattgcatatgatcattccagagtgattctacagcctgtggaagacgaccctagttcagattatattaatgccaattacatagacggttatcaacgcccaagccactacatcgcgacacagggacccgtgcatgaaacagtgtacgatttttggagaatgatctggcaggaacaaagtgcctgtatcgtgatggtcaccaacttagtagaagtcggaagggtaaaatgctataagtactggccggatgatactgaggtttatggtgactttaaggtgacatgcgtcgagatggaacccctcgccgaatacgttgtaaggacatttactctggaacggcgaggatataatgaaatccgggaagtgaagcaattccatttcaccggatggcccgatcacggcgtcccataccacgctacaggcctcctttctttcattcgaagggtgaagttatccaaccctccatctgctggcccgatcgtggtacactgcagcgccggagcaggacgcaccggctgctatatagtgatcgacatcatgctcgacatggctgagagggagggcgtggtggacatttataattgtgtgaaggctttgcgatcccgcagaatcaatatggtgcagacagaggagcaatacatcttcattcacgatgcaatcctggaggcatgcttgtgcggagagactgccatccctgtgtgtgagttcaaggcagcatattttgacatgatacgcatcgacagccaaaccaactcctctcatttgaaggacgagttccagaccctgaattctgttaccccccgcctgcaggccgaggattgttcaatcgcctgtctgccccgaaaccatgacaaaaaccgtttcatggacatgctcccaccggatagatgcttgccttttctgatcaccatagatggcgagtccagcaattatattaacgctgccctcatggacagttacaggcagcctgcagcattcatcgtaacacagtaccctctaccaaacaccgttaaggatttctggagactggtgtacgactatggctgtaccagcattgtgatgctcaatgaggtggacctgagtcagggatgcccgcagtactggccagaggaaggtatgttaaggtatggcccaattcaagtggagtgcatgtcttgctccatggactgcgacgtgatcaacaggatctttcggatatgcaaccttacaaggcctcaggagggctacctaatggtgcagcagttccaatacctggggtgggcaagccacagagaggttcctggatcaaaaaggtctttcttaaaacttatcctgcaggtggaaaagtggcaggaagaatgtgaggaaggggaaggcaggacaataatccactgtctgaatggtggcggtaggagcgggatgttctgtgcgattggtattgttgtggagatggttaagaggcagaatgtagtcgacgtgttccatgccgtgaagacgctgcgaaacagtaagcctaatatggtggaggcgcccgaacagtatagattttgctacgacgtggcgctggagtacctggagagctcatag

SEQ ID NO: 132641 - DNA, 4323 bp, Artificial Sequence
  derived and/or modified sequence
atggacaccacagctgctgctgccctgcctgcctttgtggccctgctgctgctgagcccctggcccctgctgggcagcgcccagggccagttctctgctgggggctgcacctttgatgatggccctggggcctgtgactaccaccaggacctgtatgatgactttgagtgggtgcacgtgtctgcccaggagccccactacctgcccccagagatgccccagggcagctacatgattgtggacagcagtgaccatgaccctggagagaaggcccggctgcagctgcccaccatgaaggaaaatgacacccactgcatcgacttctcctacctgctgtacagccagaagggcctgaaccctggcaccctgaacatcctggtgcgggtgaacaagggccccctggccaaccccatctggaatgtgacaggcttcaccggccgggactggctgcgggcagagctggccgtgtccaccttctggcccaatgagtaccaggtgatctttgaggccgaggtgtctgggggccgcagcggctacatcgccattgatgacatccaggtgctgagctacccctgtgacaagagcccccacttcctgcggctgggagatgtggaggtgaatgccggccagaatgccaccttccagtgcatcgccaccggcagagatgctgtgcacaacaagctgtggctgcagaggagaaatggagaggacatccctgtggcccagaccaagaacatcaaccacagaagatttgctgccagcttccggctgcaggaggtgaccaagacagaccaggacctgtaccgctgtgtgacccagagcgagcggggcagcggcgtgagcaactttgcccagctgattgtgcgggagcccccccggcccatcgccccaccccagctgctgggcgtgggccccacctacctgctgatccagctgaatgccaacagcatcattggagatggccccatcatcctgaaggaggtggagtacaggatgaccagcggctcctggacagagacccatgctgtgaatgcccccacctacaagctgtggcacctggaccctgacacagaatatgagatccgggtgctgctgaccaggcctggagagggcggcaccggcctgcccggccccccactcatcaccaggaccaagtgtgccgagcccatgaggacccccaagaccctgaagattgctgagatccaggccaggagaattgctgtggactgggagagcctgggctacaacatcacccgctgccacaccttcaacgtgaccatctgctaccactacttccggggccacaatgaaagcaaggctgactgcctggacatggaccccaaggccccccagcacgtggtgaaccacctgcccccctacaccaacgtgtccctgaagatgatcctgaccaaccctgagggcaggaaggagagcgaggagaccatcatccagacagatgaagatgtgcccggccctgtgcctgtgaagagcctgcagggcaccagctttgagaacaagatcttcctgaactggaaggagcccctggaccccaacggcatcatcacccagtatgagatctcctacagcagcatccgcagctttgatcctgctgtgcctgtggccggccccccccagacagtgagcaacctgtggaacagcacccaccacgtgttcatgcacctgcaccctggcaccacctaccagttcttcatccgggccagcacagtgaagggctttggacctgccacagccatcaacgtgaccaccaacatcagcgcccccaccctgcctgactatgaaggagtggatgccagcctgaatgaaacagccaccaccatcaccgtgctgctgcggcctgcccaggccaagggggcccccatcagcgcctaccagatcgtggtggaggagctgcacccccacaggaccaagcgggaggccggggccatggagtgctaccaggtgcctgtgacctaccagaatgccatgtctggaggagccccctactactttgctgctgagctgcccccaggcaacctgcctgagcccgcccccttcaccgtgggggacaacagaacctaccagggcttctggaacccccccctggcccccaggaagggctacaacatctacttccaggccatgagctctgtggagaaggagaccaagacccagtgtgtgcgcatcgccaccaaggctgctgccacagaggagcctgaggtgatcccagaccctgccaagcagacagacagagtggtgaagattgctggcatctctgctggcatcctggtgttcatcctgctgctgctggtggtgatcctgattgtgaagaagagcaagctggccaagaagaggaaggatgccatgggcaacacccggcaggagatgacccacatggtgaatgccatggacaggagctatgctgaccagagcaccctgcacgccgaggaccccctgagcatcaccttcatggaccagcacaacttcagccccaggtatgagaaccacagcgccacagctgagagcagccggctgctggatgtgccccgctacctgtgtgagggcacagagagcccctaccagacaggccagctgcacccagccatccgggtggccgacctgctgcagcacatcaacctgatgaagaccagtgacagctatggcttcaaggaggagtatgagagcttctttgagggccagagcgcctcctgggatgtggccaagaaggaccagaacagagccaagaacagatatggcaacatcatcgcctatgaccacagcagggtcatcctgcagcctgtggaggatgaccccagcagtgactacatcaatgccaactacattgatggctaccagaggcccagccactacatcgccacccagggccctgtgcatgagaccgtgtatgacttctggaggatgatctggcaggagcagagcgcctgcatcgtgatggtgaccaacctggtggaggtgggccgggtgaagtgctacaagtactggccagatgacacagaggtgtatggagacttcaaggtgacctgtgtggagatggagcccctggccgagtatgtggtgaggaccttcaccctggagcggcggggctacaatgagatccgggaggtgaagcagttccacttcaccggctggccagaccacggcgtgccctaccacgccaccggcctgctgtccttcatccggcgggtgaagctgagcaaccccccatctgctggccccatcgtggtgcactgcagcgctggagctggccgcacaggctgctacatcgtcatcgacatcatgctggacatggccgagcgggagggcgtggtggacatctacaactgtgtgaaggccctgcggagccgccgcatcaacatggtgcagacagaggagcagtacatcttcatccatgatgccatcctggaggcctgcctgtgtggggagacagccatccctgtgtgtgagttcaaggccgcctactttgacatgatcagaattgacagccagaccaacagcagccacctgaaggatgagttccagaccctgaacagcgtgaccccccggctgcaggccgaggactgcagcatcgcctgcctgcccaggaaccacgacaagaaccgcttcatggacatgctgcccccagaccgctgcctgcccttcctgatcaccattgatggagagagcagcaactacatcaatgctgccctgatggacagctaccggcagcctgctgccttcatcgtgacccagtaccccctgcccaacacagtgaaggacttctggaggctggtgtatgactatggctgcaccagcatcgtgatgctgaatgaggtggacctgagccagggctgcccccagtactggccagaggagggcatgctgcgctatggccccatccaggtggagtgcatgagctgcagcatggactgtgatgtgatcaaccgcatcttccgcatctgcaacctgacccggccccaggagggctacctgatggtgcagcagttccagtacctgggctgggccagccaccgggaggtgcccggcagcaagaggagcttcctgaagctgatcctgcaggtggagaagtggcaggaggagtgtgaggagggggagggccgcaccatcatccactgcctgaatggaggcggccgcagcggcatgttctgtgccatcggcatcgtggtggagatggtgaagaggcagaatgtggtggatgtgttccacgctgtgaagaccctgaggaacagcaagcccaacatggtggaggcccctgagcagtaccgcttctgctatgatgtggccctggagtacctggagagcagctag

SEQ ID NO: 132642 - DNA, 4323 bp, Artificial Sequence
  derived and/or modified sequence
atggacaccaccgccgccgccgccctgcccgccttcgtggccctgttgctcttgtccccatggcctctgcttggtagcgcccagggacagttctctgccgggggttgtacattcgatgatggacccggcgcctgcgactaccaccaggatctctacgatgactttgagtgggttcatgtgtcagcccaggaaccacattatctcccccctgagatgccccagggatcatatatgatagtggactcgtccgatcacgacccgggtgagaaagcaaggctgcagttacccacaatgaaagagaacgacacacattgcattgacttttcttatctgctttattcccaaaagggtctcaacccaggcacactcaacatactagtgagggtgaataaaggaccattagccaatccaatttggaatgtgaccggctttactggaagagactggctaagagctgaattagctgtgtcaactttttggccaaatgagtaccaagtgatcttcgaggctgaagtttctgggggccggtctggttacatcgctattgacgacatccaggtcttgtcctacccttgcgacaaaagtcctcattttctgcgactgggcgatgttgaggtgaacgctggccagaatgccaccttccagtgcatcgccaccggccgggacgcagtacataacaagctgtggctccaaagaagaaatggtgaagatatccctgtcgctcagacaaagaacataaatcatcgaaggttcgcggcgagcttcaggttgcaagaggttaccaaaacagaccaggatctctatagatgtgttactcagtcggagagaggaagtggagtgtcaaactttgcccaattaatagtacgtgagcctccgcggccaatcgcccctccacagcttcttggggtaggccccacatatttgctgatccagttgaacgccaactcgatcattggggatggtccaattatcctgaaggaggtagaatacagaatgaccagcgggagctggaccgaaacgcacgccgtcaacgcacccacctacaagctctggcatctcgatccagataccgaatatgaaatcagggttcttcttacaaggcctggagaaggaggtacaggactgccaggccctccactgatcacacggaccaagtgcgccgaacctatgcgaactcccaaaaccttgaagatcgccgaaatccaggcacgccgaatcgccgtcgattgggagagccttggctacaatataactcgctgccacacatttaacgtgacgatctgttaccattattttagagggcataatgagtcaaaagccgactgtctggacatggatcccaaagcccctcagcacgtggtcaaccacctgcctccttatacaaacgtgtccctgaagatgatcctcaccaacccagaagggagaaaagaaagtgaggagacaataatccagacagacgaggacgttccgggccctgtccccgtcaaatcgctccagggtacctcatttgaaaataaaatatttctgaactggaaggaaccattggacccaaacgggattatcacacagtacgaaataagctactcctcaatcagaagctttgatccggccgtgcccgtggcaggacccccccagacagtgagtaacctctggaatagcacgcaccatgtcttcatgcacttgcaccccggaacaacgtatcaattctttatccgtgcctccaccgtaaaggggttcggtcctgccacagccataaatgttacaacaaacattagcgccccgacactgccagattatgaaggagtcgatgcctcccttaacgagacggccacaacaatcaccgtgttgctgcggcctgcacaggctaagggcgcaccgataagcgcatatcagatcgtggtggaggagctgcaccctcatcgcacaaagcgggaagcaggcgctatggaatgttatcaggttcccgttacctaccagaatgctatgtcaggaggcgccccttattattttgcggccgaacttccacctggcaaccttccagaaccagccccctttactgtaggcgacaaccgtacatatcagggattttggaaccctcctctggcaccccgcaaggggtacaatatctacttccaggcaatgagttccgtggaaaaggagactaagacccaatgtgtgcgcattgcgaccaaggccgcagccacggaagagcctgaagttatccccgaccctgctaagcagaccgaccgagtggtaaaaattgctggaatctccgccggaattctcgtgttcatcctactactgctggttgtgattctcattgtcaaaaaaagtaaactggctaagaagcggaaggatgctatggggaacacacgccaggagatgacccacatggtgaatgccatggatagaagttacgccgaccagagcactctccacgcagaagatccattgagcatcaccttcatggaccagcacaactttagccccaggtatgagaaccacagcgccactgctgagagctcccgcctacttgatgtccccagatacctgtgtgaaggaacagagagtccataccagaccggacagctccacccagccatcagagtcgccgacctgctgcaacatatcaaccttatgaagactagtgactcgtatggcttcaaggaggaatacgaatcttttttcgaaggacagagtgccagttgggacgtggcgaaaaaagaccaaaaccgggcaaaaaaccggtacgggaacatcatcgcttacgaccactcaagggtcattctgcagccagtggaggatgatccttcttctgactatattaatgccaattacatcgacggctatcagcggcccagtcattacattgcaacccaggggccggtccacgagacagtatatgacttctggcgcatgatttggcaagaacaatcggcttgtatcgtcatggttaccaacctcgtcgaggtggggcgcgtgaaatgttataaatactggccagacgatacagaggtgtacggagatttcaaagtcacctgcgtcgagatggagcccttggccgagtatgtggtgcgcacctttaccctcgagcggaggggctataatgagattagggaggtgaagcagttccactttacaggctggccagatcacggcgtcccctaccacgctaccgggctccttagcttcatcaggcgagttaaactctctaatcctccttcagctggaccaatagtggtacactgctccgcgggtgctggtcgcacaggctgctacatcgtcattgatatcatgctggatatggcagaaagggaaggggtggtcgatatctataattgcgtcaaggctctgcgctcacggcggattaatatggtccaaacagaagagcagtacatctttatccacgatgcgatcctggaagcctgtctctgcggcgagactgctattccggtgtgcgaatttaaagcagcctacttcgatatgataagaatcgactctcagacgaactccagccacctgaaggatgagttccagacccttaactcggtgactccaagactccaggccgaggattgctccattgcctgtctacctagaaaccatgacaagaatcggtttatggacatgcttcctcccgatcgatgtctacccttcctgatcaccatagatggcgaaagttcaaactatatcaatgccgccctcatggacagctaccggcagccagcagccttcattgtcacccagtatcccctaccgaatacggtgaaagacttttggcggctggtgtatgattatggttgcaccagtattgtgatgcttaacgaagtcgacctcagccagggttgtccccaatattggccagaggagggaatgctcagatacggaccaattcaagtggagtgcatgtcctgttcaatggactgcgacgtaattaacaggatcttccgcatctgtaatctcacccgacctcaggaaggatacttaatggtgcagcagttccagtatcttggatgggcctctcaccgcgaggtacctgggtcaaagagatcattcctgaaactgatcctccaggtcgagaagtggcaggaggagtgcgaagagggcgagggccggaccatcatacactgcttgaacggcggagggcggtcagggatgttctgcgctatcggtatagttgttgagatggtcaagaggcagaatgtcgttgacgtctttcatgcagttaaaaccctccgcaactccaagccaaacatggttgaggccccggaacagtaccgattttgctacgacgtagccttggaatatctagagagttcatag

SEQ ID NO: 132643 - DNA, 4323 bp, Artificial Sequence
  derived and/or modified sequence
atggacactacagccgctgcagcacttcctgcatttgtggctctccttttgctcagcccctggcctttgctcggatctgcacagggacaattctctgcaggcggatgcacctttgacgatggacctggcgcttgcgactaccatcaggacctctacgatgactttgagtgggtgcatgttagcgcccaggaaccacactatctgccgcctgaaatgccccaggggagctatatgatcgtcgacagcagcgatcacgacccaggagaaaaagccagactccagcttccaaccatgaaagagaacgatacacactgcatagattttagttatctcttgtacagccagaagggactcaatcctggaactttaaacattctcgtgcgggttaataaaggccctcttgcaaaccccatctggaacgtgacggggtttaccggtcgcgattggctgcgggctgagctggcagtttcaaccttctggcccaacgagtaccaagtgattttcgaggctgaagtatctggtggccgttctggatacattgccattgacgatatacaagtcctgtcttacccttgtgataagtcaccacactttttgagactcggagacgtagaagttaatgctggccagaacgccacctttcaatgcatcgctaccggcagggacgctgtgcacaataagctctggctgcagagaaggaacggcgaagacatacccgtggcccagacaaaaaacatcaaccataggaggtttgcagccagtttccgtttgcaagaagttactaaaaccgaccaggacctttaccgctgtgtgactcaaagcgaaagggggtcaggtgtatcgaatttcgcacagttgatcgtgcgagagccaccccgtcccattgcacctccccagttactgggcgtcggccctacctatctattgattcaactgaacgccaacagtataataggggacggacccattattctgaaagaggtagaataccgtatgaccagcggcagctggacagagactcacgcagtgaatgctccaacgtacaaactatggcacctcgacccagatactgaatatgaaatccgtgtcttactgactagaccgggagaggggggaacgggactgcccggtcccccattgatcacccggacaaaatgcgcagagcctatgcgtacccctaagaccttgaaaattgccgaaatccaggcacgaaggattgccgtggactgggagtccttgggatataatatcaccaggtgccatactttcaatgtgactatctgctaccactactttagaggccataatgaatctaaagccgattgtctcgatatggaccctaaagccccacagcatgtggtaaaccatctgcctccctatacaaacgtgtcactgaaaatgatcttaactaatccagagggtaggaaggagagtgaagagactatcattcaaacagatgaagatgtccctgggcctgtgcctgtcaagagtctccaaggaactagcttcgagaataaaatattcctgaattggaaagaacctcttgaccccaacggaattatcacccagtatgaaatttcgtactctagtatccgttcatttgatccagccgtgccagtcgctggacctccacagactgtgtctaatctttggaacagtacacatcatgtattcatgcaccttcacccaggtaccacatatcagtttttcatcagggcctctaccgttaagggcttcggtcccgcaaccgccattaatgtgacaaccaatatctcagcacccaccctgcccgactatgaaggagtggatgcctcactgaatgaaacagccactaccatcaccgtgttgctacggccagcccaagctaaaggggctcctatcagcgcatatcagatcgtcgtggaagagttgcacccccacagaaccaagcgggaagccggagcaatggagtgttaccaggtgccggttacataccagaacgcaatgtccggaggtgccccatactattttgctgccgagttgcctccaggcaacctgccagagccggctcctttcaccgtcggagacaaccggacgtaccaggggttctggaatccccctctggcaccaagaaagggctacaacatctatttccaggccatgtctagcgtggagaaggagaccaagacccagtgtgtccgtatcgccactaaggcagccgcaactgaggagccagaagtcatccccgacccagccaagcagacggaccgagttgtcaagatcgcagggataagcgcaggcattctagtcttcatccttttgctcctcgttgtgatcctcattgtcaaaaagtctaaattagccaagaagcgcaaggatgcaatgggaaataccagacaagagatgactcatatggtgaacgcgatggaccgcagctatgccgatcagtccacattacatgccgaggacccactgagcataaccttcatggaccaacataacttctcccctaggtatgaaaaccacagcgctacagccgaatctagccgcctgctcgatgttccccgatacctgtgcgaaggcaccgagagcccgtaccaaaccggccagctgcatccggctatccgagtcgctgatctgcttcagcacattaacttaatgaaaacatcggactcatacggatttaaagaggagtatgaaagtttcttcgagggacagagcgcttcttgggacgtggcaaaaaaggatcagaaccgagctaagaacagatacggtaacattatcgcctatgaccattcgagagtgatcctgcagcccgtagaggatgatccttctagcgattacatcaatgcaaactacatagacggctatcaaagaccatctcattatatagctacacaaggtcccgtccacgagacagtctacgatttttggcgcatgatctggcaggagcagtccgcatgcatcgtgatggtcacaaacttggtggaggttgggagagtaaagtgttataagtactggccagacgataccgaagtttacggcgattttaaggtcacgtgcgtggagatggagcccctcgctgagtatgtcgtgcggacctttaccttggagagacgtggctataatgagattagggaagtcaaacagtttcacttcacggggtggccagaccatggtgtcccgtatcatgctaccggcctgctctctttcattcgcagggtcaagttgagtaatcctccgagtgccggacccatcgtggtgcattgtagcgcaggggctggccgaaccgggtgttacatagtgatagacataatgctggacatggcggagcgagagggcgtagttgacatttataactgtgtaaaagctctccgatctagaaggatcaacatggtgcagaccgaggagcagtacatcttcattcacgacgccatcttggaagcatgcctctgtggagaaactgccattcccgtgtgtgagttcaaggcggcatattttgacatgatccgaatcgactcacagacaaactcttcgcaccttaaagacgagtttcagactctaaatagtgtcactcctcgacttcaggctgaagactgttcgattgcttgcctccctcgaaatcacgacaaaaacagatttatggacatgctgcctcctgatcgctgtctccccttcttgatcaccatcgacggcgagagtagtaattatatcaatgccgctctcatggatagttatagacagccagctgctttcattgtgacccagtacccccttcccaatactgtcaaggatttttggcgcttggtgtatgattacggctgcacctctattgtaatgctcaacgaggtcgacctttcacaaggttgcccccagtattggcctgaggagggcatgctgagatacggcccaatccaagtggagtgcatgtcttgctccatggactgcgatgtcatcaacagaatctttagaatttgtaacctgaccagaccacaggagggttacctgatggtccagcaattccaatacttgggttgggctagccatcgagaagtacccggatctaagagatcttttcttaaactgatactgcaggtagagaagtggcaggaggaatgcgaagagggggaaggaagaactataatccattgcctcaatgggggaggcagaagtggtatgttctgcgcgatcggtatcgtggtggaaatggtcaaacggcagaacgttgtggacgtctttcacgctgtgaaaaccctcaggaattctaagcccaacatggtggaggctcccgagcagtaccgcttttgttatgacgtagcactggagtacctcgaaagtagttag

SEQ ID NO: 132644 - DNA, 6087 bp, Artificial Sequence
  derived and/or modified sequence
agaagcgcccggagcccgcggggcgacgtcacccccggctccgcccccgtccctccccgagcaaagtaactcttgactaacaggagcagcctccgccgagcatggagagctgccgccgcggccggccggcgacgctggcgacgctttcgcccctgaggtagtttggcgaccgcgaagaaggaaaaagggcgggcgggcggctgtcctctcaccgtcctcaccccgcgaggcccggcccgctcctccgtcgtggatttcgcggcgatccccccggcagctctttgcaaagctgcttgaaacttctcccaaactcggcatggatacgactgcggcggcggcgctgcctgcttttgtggcgctcttgctcctctctccttggcctctcctgggatcggcccaaggccagttctccgcaggtggctgtacttttgatgatggtccaggggcctgtgattaccaccaggatctgtatgatgactttgaatgggtgcatgttagtgctcaagagcctcattatctaccacccgagatgccccaaggttcctatatgatagtggactcttcagatcacgaccctggagaaaaagccagacttcagctgcctacaatgaaggagaacgacactcactgcattgatttcagttacctattatatagccagaaaggactgaatcctggcactttgaacatattagttagggtgaataaaggacctcttgccaatccaatttggaatgtgactggattcacgggtagagattggcttcgggctgagctagcagtgagcaccttttggcccaatgaatatcaggtaatatttgaagctgaagtctcaggagggagaagtggttatattgccattgatgacatccaagtactgagttatccttgtgataaatctcctcatttcctccgtctaggggatgtagaggtgaatgcagggcaaaacgctacatttcagtgcattgccacagggagagatgctgtgcataacaagttatggctccagagacgaaatggagaagatataccagtagcccagactaagaacatcaatcatagaaggtttgccgcttccttcagattgcaagaagtgacaaaaactgaccaggatttgtatcgctgtgtaactcagtcagaacgaggttccggtgtgtccaattttgctcaacttattgtgagagaaccgccaagacccattgctcctcctcagcttcttggtgttgggcctacatatttgctgatccaactaaatgccaactcgatcattggcgatggtcctatcatcctgaaagaagtagagtaccgaatgacatcaggatcctggacagaaacccatgcagtcaatgctccaacttacaaattatggcatttagatccagataccgaatatgagatccgagttctacttacaagacctggtgaaggtggaacggggctcccaggacctccactaatcaccagaacaaaatgtgcagaacctatgagaaccccaaagacattaaagattgctgaaatacaggcaagacggattgctgtggactgggaatccttgggttacaacattacgcgttgccacacttttaatgtcactatctgctaccattacttccgtggtcacaacgagagcaaggcagactgtttggacatggaccccaaagcccctcagcatgttgtgaaccatctgccaccttatacaaatgtcagcctcaagatgatcctaaccaatccagagggaaggaaggagagtgaagagacaattattcaaactgatgaagatgtgcctggtcccgtaccagtaaaatctcttcaaggaacatcctttgaaaataagatcttcttgaactggaaagaacctttggatccaaatggaatcatcactcaatatgagatcagctatagcagtataagatcatttgatcctgcagttccagtggctggacctccccagactgtatcaaatttatggaacagtacacaccatgtctttatgcatctccaccctggaaccacgtaccagtttttcataagagccagcacggtcaaaggctttggtccagccacagccatcaatgtcaccaccaatatctcagctccaactttacctgactatgaaggagttgatgcctctctcaatgaaactgccaccacaataactgtattgttgagaccagcacaagccaaaggtgctcctatcagtgcttatcagattgttgtggaagaactgcacccacaccgaaccaagagagaagccggagccatggaatgctaccaggttcctgtcacataccaaaatgccatgagtgggggtgcaccgtattactttgctgcagaactccccccgggaaacctacctgagcctgccccgttcactgtgggtgacaatcggacctaccaaggcttttggaaccctcctttggctccgcgcaaaggatacaacatctatttccaggcgatgagcagtgtggagaaggaaactaaaacccagtgcgtacgcattgctacaaaagcagcagcaacagaagaaccagaagtgatcccagatcccgccaagcagacagacagagtggtgaaaatagcaggaattagtgctggaattttggtgttcatcctccttctcctagttgtcatattaattgtaaaaaagagcaaacttgctaaaaaacgcaaagatgccatggggaatacccggcaggagatgactcacatggtgaatgcaatggatcgaagttatgctgatcagagcactctgcatgcagaagatcctctttccatcaccttcatggaccaacataactttagtccaagatatgagaaccacagtgctacagcagagtccagtcgccttctagacgtacctcgctacctctgtgaggggacggaatccccttaccagacaggacagctgcatccagccatcagggtagctgatttactgcagcacattaatctcatgaagacatcagacagctatgggttcaaagaggaatatgagagcttttttgaaggacagtcagcatcttgggatgtagctaaaaaagatcaaaatagagcaaaaaaccgatatggaaacattatagcatatgatcactccagagtgattttgcaacccgtagaggatgatccttcctcagattatattaatgccaactatattgatggctaccagagaccaagtcattacattgcaacccaaggtcccgttcatgaaacagtgtatgatttctggaggatgatttggcaagaacaatctgcttgcattgtgatggttacaaatttagttgaggttggccgggttaaatgctataaatattggcctgatgatactgaagtttatggtgacttcaaagtaacgtgtgtagaaatggaaccacttgctgaatatgtagttaggacattcaccctggaaaggagggggtacaatgaaatccgtgaagttaaacagttccatttcacgggctggcctgaccatggagtgccctaccatgctacagggctgctttcctttatccggcgagtcaagttatcaaaccctcccagtgctggccccatcgttgtacattgcagtgctggtgctggacgaactggctgctacattgtgattgacatcatgctagacatggctgaaagagagggtgttgttgatatttacaattgtgtcaaagccttaagatctcggcgtattaatatggtccagacagaggaacagtacatttttattcatgatgccattttagaagcctgcttatgtggagaaactgccatacctgtctgtgaatttaaagctgcatattttgatatgattagaatagactcccagactaactcttcacatctcaaggatgaatttcagactctgaattcagtcacccctcgactacaagctgaagactgcagtatagcgtgcctgccaaggaaccatgacaagaaccgtttcatggacatgctgccacctgacagatgtctgccttttttaattacaattgatggggagagcagtaactacatcaatgctgctcttatggacagctacaggcaaccagctgctttcatcgtcacacaataccctctgccaaacactgtaaaagacttctggagattagtgtatgattatggctgtacctccattgtgatgttaaacgaagtcgacttgtcccagggctgccctcagtactggccagaggaagggatgctacgatatggccccatccaagtggaatgtatgtcttgttcaatggactgtgatgtgatcaaccggatttttaggatatgcaatctaacaagaccacaggaaggttatctgatggtgcaacagtttcagtacctaggatgggcttctcatcgagaagtgcctggatccaaaaggtcattcttgaaactgatacttcaggtggaaaagtggcaggaggaatgcgaggaaggggaaggccggacgattatccactgcctaaatggtggcgggcgaagtggcatgttctgtgctataggcatcgttgttgaaatggtgaaacggcaaaatgttgtcgatgttttccatgcagtaaagacactgaggaacagcaagccaaacatggtggaagccccggagcaataccgtttctgctatgatgtagctttggagtacctggaatcatcttagttgggtgagactctttaaagtgcatccatgaagaaacctgtccatctattgagccagcagctgttgtacctgttacacttgtgcagaaagattttaatgtggggggtgggagacttttacatttgagaggtaaaagtattttttttatgaagttgtgtatcttaataaaaaggactgaattagtttttattactatattaaagcatcaacatttcatgccacataaattatatttaataagaaccagattgaaatgagaacgtattggtgtttgtacagtgaacatgccaccttttttctcatggtttcagtagagcagctaccacatgttgcatgagttcatactttctacgtggcatttttctccctttctaaaatgaaagctgatgaatcttaaaaggaagaagaaaagaaaagctgtgcaaattcatagtaaagttcgttttttatatgtttccagtgtagcagatctctatataaatatataaatatatataactggcttattttcttttaatgtgcaatgatggctggatcatttaaagttctttttagaaaataacataagccaaagactcaagtgtaaatatgtctatatggagaaagcacattatatttattggttacttacattccttttttgatggctaaaatactaccaccacacaatcatcttttttttcctgaagaaagctttttctttagctaaaatcaattgtaaacgatttttgtagattattttttgtatgttttagtgtaagtagaagataaactttttattcataaaccaggaagcaatgttctttatagtgattctcttgtgtacatgcttgtgaattaaatttgtgtaaaatcccttggcaattgggtcttttaatataggaccaaattaaaacattttgctgaatatgtatagtttttcacaatttcattaggtaaataatggtttggtgatcatacatgagaaatgtacacattaaaaggccttgctgacaacttgcacaatgttgaacatagcctttaagcatcatttaaattttaaaggaatggagtttttcagcctgtggcccagcactggtcaagaaaacaagatggcaacatatatgctttcagggtcaaatttgagcaaactgtaaactgtcagggtgataaaatgtttctcttgatgtttacatgcacaagctttgcgttctgactataaaaagtgtgaacaaatcaatgccagattcctgttttgcgcattgtcatgggattcttaagtgaacctttctaaatgtggtcttgttcacatgctccacgtagctgtaacttcacatcatcagcttgcagtttgtaattgactaaagcattccagtgtcctctttctagattgccagctcatgacatggtgcttataaagatttaattaaagtaagaatgaaataaagtttttataattataacagtta

SEQ ID NO: 132645 - DNA, 4323 bp, Artificial Sequence
  derived and/or modified sequence
atggacaccaccgccgccgccgccctgcccgccttcgtggccctgctgctgctgagcccctggcccctgctgggcagcgcccagggccagttcagcgccggcggctgcaccttcgacgacggccccggcgcctgcgactaccaccaggacctgtacgacgacttcgagtgggtgcacgtgagcgcccaggagccccactacctgccccccgagatgccccagggcagctacatgatcgtggacagcagcgaccacgaccccggcgagaaggccagactgcagctgcccaccatgaaggagaacgacacccactgcatcgacttcagctacctgctgtacagccagaagggcctgaaccccggcaccctgaacatcctggtgagagtgaacaagggccccctggccaaccccatctggaacgtgaccggcttcaccggcagagactggctgagagccgagctggccgtgagcaccttctggcccaacgagtaccaggtgatcttcgaggccgaggtgagcggcggcagaagcggctacatcgccatcgacgacatccaggtgctgagctacccctgcgacaagagcccccacttcctgagactgggcgacgtggaggtgaacgccggccagaacgccaccttccagtgcatcgccaccggcagagacgccgtgcacaacaagctgtggctgcagagaagaaacggcgaggacatccccgtggcccagaccaagaacatcaaccacagaagattcgccgccagcttcagactgcaggaggtgaccaagaccgaccaggacctgtacagatgcgtgacccagagcgagagaggcagcggcgtgagcaacttcgcccagctgatcgtgagagagccccccagacccatcgcccccccccagctgctgggcgtgggccccacctacctgctgatccagctgaacgccaacagcatcatcggcgacggccccatcatcctgaaggaggtggagtacagaatgaccagcggcagctggaccgagacccacgccgtgaacgcccccacctacaagctgtggcacctggaccccgacaccgagtacgagatcagagtgctgctgaccagacccggcgagggcggcaccggcctgcccggcccccccctgatcaccagaaccaagtgcgccgagcccatgagaacccccaagaccctgaagatcgccgagatccaggccagaagaatcgccgtggactgggagagcctgggctacaacatcaccagatgccacaccttcaacgtgaccatctgctaccactacttcagaggccacaacgagagcaaggccgactgcctggacatggaccccaaggccccccagcacgtggtgaaccacctgcccccctacaccaacgtgagcctgaagatgatcctgaccaaccccgagggcagaaaggagagcgaggagaccatcatccagaccgacgaggacgtgcccggccccgtgcccgtgaagagcctgcagggcaccagcttcgagaacaagatcttcctgaactggaaggagcccctggaccccaacggcatcatcacccagtacgagatcagctacagcagcatcagaagcttcgaccccgccgtgcccgtggccggccccccccagaccgtgagcaacctgtggaacagcacccaccacgtgttcatgcacctgcaccccggcaccacctaccagttcttcatcagagccagcaccgtgaagggcttcggccccgccaccgccatcaacgtgaccaccaacatcagcgcccccaccctgcccgactacgagggcgtggacgccagcctgaacgagaccgccaccaccatcaccgtgctgctgagacccgcccaggccaagggcgcccccatcagcgcctaccagatcgtggtggaggagctgcacccccacagaaccaagagagaggccggcgccatggagtgctaccaggtgcccgtgacctaccagaacgccatgagcggcggcgccccctactacttcgccgccgagctgccccccggcaacctgcccgagcccgcccccttcaccgtgggcgacaacagaacctaccagggcttctggaacccccccctggcccccagaaagggctacaacatctacttccaggccatgagcagcgtggagaaggagaccaagacccagtgcgtgagaatcgccaccaaggccgccgccaccgaggagcccgaggtgatccccgaccccgccaagcagaccgacagagtggtgaagatcgccggcatcagcgccggcatcctggtgttcatcctgctgctgctggtggtgatcctgatcgtgaagaagagcaagctggccaagaagagaaaggacgccatgggcaacaccagacaggagatgacccacatggtgaacgccatggacagaagctacgccgaccagagcaccctgcacgccgaggaccccctgagcatcaccttcatggaccagcacaacttcagccccagatacgagaaccacagcgccaccgccgagagcagcagactgctggacgtgcccagatacctgtgcgagggcaccgagagcccctaccagaccggccagctgcaccccgccatcagagtggccgacctgctgcagcacatcaacctgatgaagaccagcgacagctacggcttcaaggaggagtacgagagcttcttcgagggccagagcgccagctgggacgtggccaagaaggaccagaacagagccaagaacagatacggcaacatcatcgcctacgaccacagcagagtgatcctgcagcccgtggaggacgaccccagcagcgactacatcaacgccaactacatcgacggctaccagagacccagccactacatcgccacccagggccccgtgcacgagaccgtgtacgacttctggagaatgatctggcaggagcagagcgcctgcatcgtgatggtgaccaacctggtggaggtgggcagagtgaagtgctacaagtactggcccgacgacaccgaggtgtacggcgacttcaaggtgacctgcgtggagatggagcccctggccgagtacgtggtgagaaccttcaccctggagagaagaggctacaacgagatcagagaggtgaagcagttccacttcaccggctggcccgaccacggcgtgccctaccacgccaccggcctgctgagcttcatcagaagagtgaagctgagcaacccccccagcgccggccccatcgtggtgcactgcagcgccggcgccggcagaaccggctgctacatcgtgatcgacatcatgctggacatggccgagagagagggcgtggtggacatctacaactgcgtgaaggccctgagaagcagaagaatcaacatggtgcagaccgaggagcagtacatcttcatccacgacgccatcctggaggcctgcctgtgcggcgagaccgccatccccgtgtgcgagttcaaggccgcctacttcgacatgatcagaatcgacagccagaccaacagcagccacctgaaggacgagttccagaccctgaacagcgtgacccccagactgcaggccgaggactgcagcatcgcctgcctgcccagaaaccacgacaagaacagattcatggacatgctgccccccgacagatgcctgcccttcctgatcaccatcgacggcgagagcagcaactacatcaacgccgccctgatggacagctacagacagcccgccgccttcatcgtgacccagtaccccctgcccaacaccgtgaaggacttctggagactggtgtacgactacggctgcaccagcatcgtgatgctgaacgaggtggacctgagccagggctgcccccagtactggcccgaggagggcatgctgagatacggccccatccaggtggagtgcatgagctgcagcatggactgcgacgtgatcaacagaatcttcagaatctgcaacctgaccagaccccaggagggctacctgatggtgcagcagttccagtacctgggctgggccagccacagagaggtgcccggcagcaagagaagcttcctgaagctgatcctgcaggtggagaagtggcaggaggagtgcgaggagggcgagggcagaaccatcatccactgcctgaacggcggcggcagaagcggcatgttctgcgccatcggcatcgtggtggagatggtgaagagacagaacgtggtggacgtgttccacgccgtgaagaccctgagaaacagcaagcccaacatggtggaggcccccgagcagtacagattctgctacgacgtggccctggagtacctggagagcagctag

SEQ ID NO: 132646 - protein, 1452 aa, Artificial Sequence
  derived and/or modified sequence
MRGLGTCLATLAGLLLTAAGETFSGGCLFDEPYSTCGYSQSEGDDFNWEQVNTLTKPTSDPWMPSGSFMLVNASGRPEGQRAHLLLPQLKENDTHCIDFHYFVSSKSNSPPGLLNVYVKVNNGPLGNPIWNISGDPTRTWNRAELAISTFWPNFYQVIFEVITSGHQGYLAIDEVKVLGHPCTRTPHFLRIQNVEVNAGQFATFQCSAIGRTVAGDRLWLQGIDVRDAPLKEIKVTSSRRFIASFNVVNTTKRDAGKYRCMIRTEGGVGISNYAELVVKEPPVPIAPPQLASVGATYLWIQLNANSINGDGPIVAREVEYCTASGSWNDRQPVDSTSYKIGHLDPDTEYEISVLLTRPGEGGTGSPGPALRTRTKCADPMRGPRKLEVVEVKSRQITIRWEPFGYNVTRCHSYNLTVHYCYQVGGQEQVREEVSWDTENSHPQHTITNLSPYTNVSVKLILMNPEGRKESQELIVQTDEDLPGAVPTESIQGSTFEEKIFLQWREPTQTYGVITLYEITYKAVSSFDPEIDLSNQSGRVSKLGNETHFLFFGLYPGTTYSFTIRASTAKGFGPPATNQFTTKISAPSMPAYELETPLNQTDNTVTVMLKPAHSRGAPVSVYQIVVEEERPRRTKKTTEILKCYPVPIHFQNASLLNSQYYFAAEFPADSLQAAQPFTIGDNKTYNGYWNTPLLPYKSYRIYFQAASRANGETKIDCVQVATKGAATPKPVPEPEKQTDHTVKIAGVIAGILLFVIIFLGVVLVMKKRKLAKKRKETMSSTRQEMTVMVNSMDKSYAEQGTNCDEAFSFMDTHNLNGRSVSSPSSFTMKTNTLSTSVPNSYYPDETHTMASDTSSLVQSHTYKKREPADVPYQTGQLHPAIRVADLLQHITQMKCAEGYGFKEEYESFFEGQSAPWDSAKKDENRMKNRYGNIIAYDHSRVRLQTIEGDTNSDYINGNYIDGYHRPNHYIATQGPMQETIYDFWRMVWHENTASIIMVTNLVEVGRVKCCKYWPDDTEIYKDIKVTLIETELLAEYVIRTFAVEKRGVHEIREIRQFHFTGWPDHGVPYHATGLLGFVRQVKSKSPPSAGPLVVHCSAGAGRTGCFIVIDIMLDMAEREGVVDIYNCVRELRSRRVNMVQTEEQYVFIHDAILEACLCGDTSVPASQVRSLYYDMNKLDPQTNSSQIKEEFRTLNMVTPTLRVEDCSIALLPRNHEKNRCMDILPPDRCLPFLITIDGESSNYINAALMDSYKQPSAFIVTQHPLPNTVKDFWRLVLDYHCTSVVMLNDVDPAQLCPQYWPENGVHRHGPIQVEFVSADLEEDIISRIFRIYNAARPQDGYRMVQQFQFLGWPMYRDTPVSKRSFLKLIRQVDKWQEEYNGGEGRTVVHCLNGGGRSGTFCAISIVCEMLRHQRTVDVFHAVKTLRNNKPNMVDLLDQYKFCYEVALEYLNSG

SEQ ID NO: 132647 - protein, 1390 aa, Artificial Sequence
  derived and/or modified sequence
MPSGSFMLVNASGRPEGQRAHLLLPQLKENDTHCIDFHYFVSSKSNSPPGLLNVYVKVNNGPLGNPIWNISGDPTRTWNRAELAISTFWPNFYQVIFEVITSGHQGYLAIDEVKVLGHPCTRTPHFLRIQNVEVNAGQFATFQCSAIGRTVAGDRLWLQGIDVRDAPLKEIKVTSSRRFIASFNVVNTTKRDAGKYRCMIRTEGGVGISNYAELVVKEPPVPIAPPQLASVGATYLWIQLNANSINGDGPIVAREVEYCTASGSWNDRQPVDSTSYKIGHLDPDTEYEISVLLTRPGEGGTGSPGPALRTRTKCADPMRGPRKLEVVEVKSRQITIRWEPFGYNVTRCHSYNLTVHYCYQVGGQEQVREEVSWDTENSHPQHTITNLSPYTNVSVKLILMNPEGRKESQELIVQTDEDLPGAVPTESIQGSTFEEKIFLQWREPTQTYGVITLYEITYKAVSSFDPEIDLSNQSGRVSKLGNETHFLFFGLYPGTTYSFTIRASTAKGFGPPATNQFTTKISAPSMPAYELETPLNQTDNTVTVMLKPAHSRGAPVSVYQIVVEEERPRRTKKTTEILKCYPVPIHFQNASLLNSQYYFAAEFPADSLQAAQPFTIGDNKTYNGYWNTPLLPYKSYRIYFQAASRANGETKIDCVQVATKGAATPKPVPEPEKQTDHTVKIAGVIAGILLFVIIFLGVVLVMKKRKLAKKRKETMSSTRQEMTVMVNSMDKSYAEQGTNCDEAFSFMDTHNLNGRSVSSPSSFTMKTNTLSTSVPNSYYPDETHTMASDTSSLVQSHTYKKREPADVPYQTGQLHPAIRVADLLQHITQMKCAEGYGFKEEYESFFEGQSAPWDSAKKDENRMKNRYGNIIAYDHSRVRLQTIEGDTNSDYINGNYIDGYHRPNHYIATQGPMQETIYDFWRMVWHENTASIIMVTNLVEVGRVKCCKYWPDDTEIYKDIKVTLIETELLAEYVIRTFAVEKRGVHEIREIRQFHFTGWPDHGVPYHATGLLGFVRQVKSKSPPSAGPLVVHCSAGAGRTGCFIVIDIMLDMAEREGVVDIYNCVRELRSRRVNMVQTEEQYVFIHDAILEACLCGDTSVPASQVRSLYYDMNKLDPQTNSSQIKEEFRTLNMVTPTLRVEDCSIALLPRNHEKNRCMDILPPDRCLPFLITIDGESSNYINAALMDSYKQPSAFIVTQHPLPNTVKDFWRLVLDYHCTSVVMLNDVDPAQLCPQYWPENGVHRHGPIQVEFVSADLEEDIISRIFRIYNAARPQDGYRMVQQFQFLGWPMYRDTPVSKRSFLKLIRQVDKWQEEYNGGEGRTVVHCLNGGGRSGTFCAISIVCEMLRHQRTVDVFHAVKTLRNNKPNMVDLLDQYKFCYEVALEYLNSG

SEQ ID NO: 132648 - DNA, 4359 bp, Artificial Sequence
  derived and/or modified sequence
atgcgcggactgggtacgtgtttggccaccctcgctgggctcctactaaccgcagctggagagacatttagtggaggctgtctcttcgacgagccctactcaacatgtgggtatagtcagtctgaaggggacgattttaactgggagcaagtgaataccttgaccaagccaacatccgacccctggatgcccagcggttcctttatgctggtgaatgcatcaggacgccccgagggacagagagcccacctcctacttccacagctgaaggaaaacgatacgcattgcatagatttccattatttcgtgagctccaaaagcaattcgcctcctgggctccttaatgtatatgttaaggtcaacaatggcccgttaggaaacccaatttggaacatctctggcgaccctacacggacgtggaaccgcgctgaactggccatcagtaccttctggcctaatttttatcaggtgatatttgaggtcattacctccgggcatcagggctaccttgccattgacgaggtgaaggttctcggtcatccctgcactagaacccctcacttcctcaggattcagaatgtcgaagtcaacgctgggcagttcgccacattccaatgctccgctattggcagaacagtggctggggatcggctctggcttcagggcatcgatgtacgggacgcacccctcaaggaaatcaaggtgaccagtagccgcaggttcattgcatcctttaatgtcgtgaatacaactaagagagatgctgggaaataccgctgtatgattagaacagagggtggcgttggaattagtaattacgccgagctggtggtcaaagagccgccagttcccatcgcgcctccacagctggcctccgttggtgcaacctacctttggatccaactgaatgccaattctattaatggcgatggcccaattgtggcacgcgaggtggagtactgcacagcttctggaagctggaatgacaggcaacctgtggatagcaccagctataaaattggtcaccttgaccccgatacagagtacgagatttccgtgctgctaactcgacctggcgaaggcggtaccgggtcccccggccccgcgttgagaacaagaacaaaatgtgctgaccccatgcgagggccgcggaaactggaggtggtcgaggtcaagagcaggcaaataactattcggtgggaaccgttcggatacaatgtgacgaggtgtcattcctataacctgacggtccactactgctatcaagttggcggccaagaacaggttcgcgaagaggtttcctgggacaccgagaactctcacccacaacacacgataacaaacttgtcaccttacaccaatgtgtcagtcaagctgatcctcatgaatccagaaggtaggaaagaatctcaggagctgatcgtccaaacagacgaagacctgcccggcgccgttcctaccgaatctattcagggctcgactttcgaagagaaaattttcctgcagtggcgggagccaacacagacctacggagtgatcaccctgtatgaaatcacatacaaagcagtgtcatctttcgatcctgagatagatctgagtaaccaatccggaagggtatccaaattgggaaatgagacgcatttcctcttcttcggattgtaccctgggacaacttactccttcactattcgtgctagcacagcaaaggggttcggcccccctgccacaaaccagtttactacgaagatcagcgccccaagcatgcctgcgtatgagctggagacacctctcaatcagactgacaatactgtgaccgtgatgcttaagccagcacactcgcgtggcgcccccgtctctgtttaccagatagtggtggaggaagaacggccacgccgcactaaaaaaacaacagagatattaaagtgctatccagtgccaattcatttccagaatgcaagtctgcttaactcacagtattacttcgctgcagaatttcccgcagattcgctgcaggctgcccagccattcactattggggacaacaaaacatacaacggatattggaacacccctctgctgccctataagagctatcggatttactttcaggctgcatctagagctaacggtgagacaaaaatcgactgcgttcaggtggcgactaaaggtgccgctactccgaaaccggtgccagagcctgagaagcagactgaccacactgtcaaaatcgccggggtgatcgctgggattttacttttcgtgatcatatttcttggcgtggtcctggtaatgaagaagcggaagcttgccaagaagcgaaaagagacgatgtcatcgactagacaggaaatgactgtcatggtcaactcgatggacaagtcatacgccgaacagggaactaattgcgatgaagccttcagttttatggacacccacaaccttaatggcaggtcagtttcctcaccaagctctttcaccatgaagaccaatactctgagtaccagtgttcctaactcatactatcccgacgagactcacacgatggcatcggacacctcctcccttgtacagtcccatacatataagaaaagggagcctgcagatgtgccctaccaaacaggacaacttcatccagccatcagagtggcagacctgctccagcatattacacagatgaaatgcgccgaggggtacggtttcaaggaggaatatgagagcttcttcgaggggcaatccgcgccatgggattcagctaagaaagatgagaataggatgaagaacagatacgggaacatcattgcctatgatcactccagagttaggctgcagaccatcgagggggacaccaattcggattacattaacggcaactacatcgacggataccaccgacctaaccactacattgccacgcagggccccatgcaggagactatctatgacttctggcgaatggtgtggcatgagaacaccgcaagcatcatcatggtaacaaacctggtggaagtgggccgtgtgaagtgctgcaaatattggcctgacgacaccgagatttacaaagacattaaggtaaccctcatcgagaccgaactgctggccgaatacgtgattaggacatttgctgttgagaaacgcggtgtgcacgaaattcgggagatcaggcagttccacttcacaggatggcccgaccatggtgtcccttaccacgcgaccggtctgttaggattcgtgaggcaggtgaagagtaagtcacctccatctgccggccctctggtcgtccactgcagtgccggggccggacgaactggttgctttatcgtgattgatatcatgctcgacatggcggaaagggaaggggtggttgacatctataactgcgtgagagaactgcgatcaaggagagtcaatatggtgcaaaccgaggagcaatatgtcttcatacacgatgctattttggaagcatgcctctgtggcgacacttctgttcccgcaagccaggttcggagcctgtactatgatatgaataaactcgatccgcagactaactcatcgcagataaaggaagaatttagaacactaaatatggttaccccaacgctgagggtggaggattgctcaatcgcgcttctacccagaaaccatgaaaaaaacagatgtatggatatccttccaccggatcgttgcctcccctttctgatcacaattgatggcgaaagctcgaactatataaacgccgcgctgatggattcctacaaacaaccttcagctttcatagtgacacagcaccctctgccaaacactgtgaaggacttctggaggctggtcctggactaccattgtaccagcgtggtgatgctgaacgatgtggaccctgcccagctgtgcccacaatactggccagagaatggcgtccaccgtcatggaccaatacaggtagagttcgtgagcgcggatttggaagaggatatcatatctcgtatctttcggatatacaacgctgcaaggcctcaagatggctaccgcatggtccaacagtttcagttcctgggttggccgatgtatcgagatacccctgtcagtaaacggtcgttcctgaaattaattcgtcaagtggacaaatggcaggaagaatacaacggcggcgaagggcgaacagtggtccactgtttgaatgggggaggtcgttccggaacgttctgtgccatttccattgtctgtgagatgttgcgtcatcagaggaccgtggacgtctttcacgccgtgaagactctgagaaataacaaacctaatatggtggacttgctcgaccagtacaaattttgctacgaagtggccctggagtatctgaatagcggctag

SEQ ID NO: 132649 - DNA, 4173 bp, Artificial Sequence
  derived and/or modified sequence
atgccgtcaggatccttcatgctggtgaatgctagtggccgaccagagggtcagcgggcccacttgctcctgccccagttaaaggagaacgatacacactgcatcgactttcactactttgtgagctcaaagagcaatagccctccaggtctcctgaacgtctacgtgaaggtgaacaacggaccactagggaatcctatctggaacatatccggggaccccacaaggacctggaatcgagctgaattagctatttccacattctggcccaacttctaccaagtgatttttgaggtcattacaagtggtcatcagggctatctagccatcgacgaggtcaaagtgctgggacacccgtgtacccggaccccccattttctgcggatacaaaacgttgaggtgaatgctggacagtttgccacctttcaatgctccgctatcgggcggaccgttgcgggtgatcgcctgtggctgcaggggattgatgtacgcgacgctcccctcaaagagatcaaggttaccagctctcgcagatttatcgcctcctttaacgtagtcaacaccaccaaacgagacgcaggaaagtacagatgtatgatccggaccgaaggcggcgttgggattagtaattacgccgaattggttgtgaaggagccccccgtcccaattgccccaccccaacttgcctcggttggggccacttacctatggatccaattgaatgctaacagcatcaatggtgatggaccgattgtcgcccgagaggtcgaatattgtaccgcttccggctcatggaatgataggcagcctgtagacagcaccagttacaaaatcgggcacctggaccctgataccgagtacgagatcagcgtgctgctgactaggccgggagaaggcggtactggatctcctggtccagcgctccgcactagaaccaagtgcgctgatcccatgagggggccgcgcaaactagaagtggtagaagtgaaatcacgccagattaccataagatgggaacctttcgggtacaacgtgaccaggtgtcactcttataacttaacggtgcactattgctaccaggtgggcggccaagagcaggtgcgagaggaggtttcttgggacaccgagaacagccacccgcaacacactattacaaatttgagtccttatacaaacgtatctgttaagttgatcctgatgaaccccgagggtaggaaagaatcccaggagctgatcgtccagactgacgaggatctccccggagccgtccccaccgaatcaattcaaggctccacctttgaggaaaaaattttcctacagtggcgtgagcccacacagacatatggagtgatcacactgtatgagattacctataaggcggtgtctagctttgaccccgaaattgatttgtctaaccagtcaggccgagtctccaaattgggtaacgagactcacttcttgttcttcggcctgtatcccggcacgacgtactccttcacaattcgcgcctccacggctaagggttttggtccccctgccacgaaccagttcaccaccaaaatctctgccccatccatgcccgcttatgagctggagactcctttgaaccagacagataacaccgttacagtgatgttaaagcctgcccatagcaggggtgcccccgtgtctgtataccagattgtggtcgaggaggagagaccaaggcggaccaagaaaaccactgagattctgaaatgctacccagttccaatccatttccagaacgcctctttattgaactcgcagtactacttcgcagccgaatttccagccgattccctacaggcagcccaacccttcacaatcggggataacaagacttacaatggctactggaacacacctctgttaccctataaatcgtaccgaatttatttccaggcagcatcccgcgctaacggggagacaaaaattgattgcgtgcaggtggccaccaagggggccgctacccccaagcccgtcccagaaccagaaaagcaaacagatcacactgtgaaaattgcaggcgtgatcgccggcatactcctgtttgtgattattttcctgggagttgtgctggtgatgaagaaaaggaaactggctaagaagaggaaggagacaatgtcgagcacaagacaagaaatgaccgtcatggtgaatagcatggataaatcatatgccgaacaaggcacgaattgcgacgaggctttctcattcatggatacccacaatctcaatggcagatccgtgagctccccatcaagcttcacaatgaaaacaaataccctttcaacctctgttcccaacagctactatccagatgagactcacaccatggcctctgacactagctcccttgtgcaaagccacacctataagaaacgcgagccagcggacgtcccctatcagacgggtcagctgcaccccgcaattagagtggctgaccttcttcaacacatcacacagatgaaatgtgccgagggctatgggttcaaagaggaatatgagtctttctttgagggccaaagcgcaccttgggatagtgccaagaaggatgagaatcgaatgaaaaataggtacgggaacattattgcatatgatcattccagagttagacttcaaaccattgagggagacaccaattctgactatattaatggaaactatattgatgggtatcacagacctaaccactacattgctactcaggggccgatgcaggagactatctacgacttttggaggatggtgtggcatgagaataccgcctcgatcataatggtaaccaatcttgtcgaggtcggacgcgtgaagtgctgtaaatactggcccgatgatactgaaatctacaaagatatcaaggtcacactgatcgaaaccgagctgctggctgagtatgtgataagaaccttcgccgtcgaaaaacggggagtgcacgaaatccgggagattcgtcaattccacttcacagggtggcccgatcacggggtgccctaccatgcaactggactcttgggttttgtgcgtcaagttaaaagcaaaagccctccctccgcaggtccattggtagttcactgctccgcgggggctgggcgtaccggctgtttcatagtcatcgacataatgctggacatggccgagagagaaggagtagtggacatatacaattgtgttagagaattacgatcaagacgagtcaatatggtgcagacagaagagcagtatgtttttatccatgacgctatcctggaagcctgtctctgtggtgacacctccgttcccgccagccaggtgagatctctgtattacgacatgaacaaactggacccacaaaccaattctagtcagataaaagaagagtttcgaacactgaatatggtaacaccaacactaagagttgaagactgctccatcgccctgctgccacggaaccacgaaaaaaacaggtgtatggacatcctaccccccgacaggtgtctgccctttctgattactattgatggtgaaagctccaactacattaatgcagcactgatggactcgtataaacagccatcagccttcattgtcacacagcatcccttgcccaataccgtgaaggacttttggagactcgtactagattatcattgtaccagcgtagtgatgctgaacgacgtagaccctgcgcagctttgtcctcagtattggcctgagaacggtgtccaccggcacggacccatccaggtcgagttcgtctcggccgatctggaggaagacattatctcaagaatctttcggatctacaacgccgctcgcccacaagatggataccggatggtgcagcagtttcaatttctcggctggccaatgtatcgcgacactccggtttctaagcgcagtttcctgaaactgattcgacaggtggataaatggcaggaagagtacaatgggggcgagggtaggaccgtcgtccactgtttgaacggaggcggcagatccgggaccttctgcgcaatatccatcgtctgcgaaatgctgaggcaccagcggaccgtggatgtcttccacgctgtgaagacactgcgcaacaataagcccaatatggtggatctcctggatcagtacaaattctgttatgaggtcgccttggaatacctaaatagcggatag

SEQ ID NO: 132650 - DNA, 4359 bp, Artificial Sequence
  derived and/or modified sequence
atgaggggcctgggcacctgcctggccaccctggccggcctgctgctgacagctgctggggagaccttcagcggcggctgcctgtttgatgagccctacagcacctgtggctacagccagagtgaaggagatgacttcaactgggagcaggtgaacaccctgaccaagcccaccagtgacccctggatgcccagcggcagcttcatgctggtgaatgccagcggccggcctgagggccagagggcccacctgctgctgccccagctgaaggaaaatgacacccactgcatcgacttccactactttgtgagcagcaagagcaacagccccccaggcctgctgaatgtgtatgtgaaggtgaacaacggccccctgggcaaccccatctggaacatcagcggggaccccaccaggacctggaacagagctgagctggccatcagcaccttctggcccaacttctaccaggtgatctttgaagtcatcaccagcggccaccagggctacctggccattgatgaggtgaaggtgctgggccacccctgcaccaggaccccccacttcctgcgcatccagaatgtggaggtgaatgccggccagtttgccaccttccagtgcagcgccatcggccgcacagtggccggggaccggctgtggctgcagggcattgatgtgagagatgcccccctgaaggagatcaaggtgaccagcagccgccgcttcatcgccagcttcaacgtggtgaacaccaccaagagagatgctgggaagtaccgctgcatgatcagaacagagggcggcgtgggcatcagcaactatgcagagctggtggtgaaggagccccctgtgcccatcgccccaccccagctggcctctgtgggcgccacctacctgtggatccagctgaatgccaacagcatcaatggagatggccccatcgtggcccgggaggtggagtactgcacagccagcggctcctggaatgaccggcagcctgtggacagcaccagctacaagattggccacctggaccctgacacagaatatgagatctctgtgctgctgaccaggcctggagagggcggcaccggcagccctggccctgccctgcggaccaggaccaagtgtgccgaccccatgaggggccccaggaagctggaggtggtggaggtgaagagccggcagatcaccatccgctgggagcccttcggctacaacgtgacccgctgccacagctacaacctgactgtgcactactgctaccaggtgggcggccaggagcaggtgcgggaggaggtgtcctgggacacagagaacagccacccccagcacaccatcaccaacctgagcccctacaccaacgtgtctgtgaagctgatcctgatgaaccctgagggcaggaaggagagccaggagctgattgtgcagacagatgaggacctgcccggggctgtgcccacagagagcatccagggcagcacctttgaggagaagatcttcctgcagtggagggagcccacccagacctacggcgtcatcaccctgtatgagatcacctacaaggctgtgtcctcctttgatcctgagattgacctgagcaaccagagcggccgggtgtccaagctgggcaatgagacccacttcctgttcttcggcctgtacccaggcaccacctacagcttcaccatccgggccagcacagccaagggctttggacctccagccaccaaccagttcaccaccaagatcagcgcccccagcatgcctgcctatgagctggagacccccctgaaccagacagacaacacagtgacagtgatgctgaagccagcccacagcagaggagcccctgtgtctgtgtaccagatcgtggtggaggaggagcggcccaggaggaccaagaagaccacagagatcctgaagtgctaccctgtgcccatccacttccagaatgccagcctgctgaacagccagtactactttgctgctgagttccctgctgacagcctgcaggccgcccagcccttcaccatcggggacaacaagacctacaacggctactggaacacccccctgctgccctacaagagctaccgcatctacttccaggccgccagccgggccaatggagagaccaagattgactgtgtgcaggtggccaccaagggggccgccacccccaagcctgtgcctgagcctgagaagcagacagaccacacagtgaagattgctggggtgattgctggcatcctgctgtttgtgatcatcttcctgggcgtggtgctggtgatgaagaagaggaagctggccaagaagaggaaggagaccatgagcagcacccggcaggagatgacagtgatggtgaacagcatggacaagagctatgcagagcagggcaccaactgtgatgaggccttctccttcatggacacccacaacctgaatggccgctctgtgagcagccccagcagcttcaccatgaagaccaacaccctgagcacctctgtgcccaacagctactacccagatgagacccacaccatggccagtgacaccagcagcctggtgcagagccacacctacaagaagcgggagccagcagatgtgccctaccagacaggccagctgcacccagccatccgggtggccgacctgctgcagcacatcacccagatgaagtgtgccgagggctacggcttcaaggaggagtatgagagcttctttgagggccagagcgccccctgggacagcgccaagaaggatgagaacaggatgaagaacagatatggcaacatcatcgcctatgaccacagccgggtgcggctgcagaccattgaaggagacaccaacagcgactacatcaatggaaactacattgatggctaccaccggcccaaccactacatcgccacccagggccccatgcaggagaccatctatgacttctggaggatggtgtggcatgaaaatacagccagcatcatcatggtgaccaacctggtggaggtgggccgggtgaagtgctgcaagtactggccagatgacacagagatctacaaggacatcaaggtgaccctgattgaaacagagctgctggccgagtatgtgatccgcacctttgctgtggagaagaggggcgtgcatgagatccgggagatccggcagttccacttcaccggctggccagaccacggcgtgccctaccacgccaccggcctgctgggctttgtgcggcaggtgaagagcaagagccccccatctgctggccccctggtggtgcactgcagcgctggagctggccgcacaggctgcttcatcgtcatcgacatcatgctggacatggccgagcgggagggcgtggtggacatctacaactgtgtgcgggagctgcggagcagaagagtgaacatggtgcagacagaggagcagtatgtgttcatccatgatgccatcctggaggcctgcctgtgtggggacacctctgtgcctgccagccaggtgcgcagcctgtactatgacatgaacaagctggacccccagaccaacagcagccagatcaaggaggagttccgcaccctgaacatggtgacccccaccctgcgggtggaggactgcagcatcgccctgctgcccaggaaccacgagaagaaccgctgcatggacatcctgcccccagaccgctgcctgcccttcctgatcaccattgatggagagagcagcaactacatcaatgctgccctgatggacagctacaagcagcccagcgccttcatcgtgacccagcaccccctgcccaacacagtgaaggacttctggaggctggtgctggactaccactgcacctctgtggtgatgctgaatgatgtggaccctgcccagctgtgcccccagtactggccagaaaatggagtgcacagacatggccccatccaggtggagtttgtgtctgctgacctggaggaggacatcatcagccgcatcttccgcatctacaatgctgcccggccccaggacggctacaggatggtgcagcagttccagttcctgggctggcccatgtacagagacacccctgtgtccaagaggagcttcctgaagctgatccggcaggtggacaagtggcaggaggagtacaatggaggagagggccgcacagtggtgcactgcctgaatggaggcggccgcagcggcaccttctgtgccatcagcatcgtgtgtgagatgctgcggcaccagaggacagtggatgtgttccacgctgtgaagaccctgaggaacaacaagcccaacatggtggacctgctggaccagtacaagttctgctatgaggtggccctggagtacctgaacagcggctag

SEQ ID NO: 132651 - DNA, 4173 bp, Artificial Sequence
  derived and/or modified sequence
atgcccagcggcagcttcatgctggtgaatgccagcggccggcctgagggccagagggcccacctgctgctgccccagctgaaggaaaatgacacccactgcatcgacttccactactttgtgagcagcaagagcaacagccccccaggcctgctgaatgtgtatgtgaaggtgaacaacggccccctgggcaaccccatctggaacatcagcggggaccccaccaggacctggaacagagctgagctggccatcagcaccttctggcccaacttctaccaggtgatctttgaagtcatcaccagcggccaccagggctacctggccattgatgaggtgaaggtgctgggccacccctgcaccaggaccccccacttcctgcgcatccagaatgtggaggtgaatgccggccagtttgccaccttccagtgcagcgccatcggccgcacagtggccggggaccggctgtggctgcagggcattgatgtgagagatgcccccctgaaggagatcaaggtgaccagcagccgccgcttcatcgccagcttcaacgtggtgaacaccaccaagagagatgctgggaagtaccgctgcatgatcagaacagagggcggcgtgggcatcagcaactatgcagagctggtggtgaaggagccccctgtgcccatcgccccaccccagctggcctctgtgggcgccacctacctgtggatccagctgaatgccaacagcatcaatggagatggccccatcgtggcccgggaggtggagtactgcacagccagcggctcctggaatgaccggcagcctgtggacagcaccagctacaagattggccacctggaccctgacacagaatatgagatctctgtgctgctgaccaggcctggagagggcggcaccggcagccctggccctgccctgcggaccaggaccaagtgtgccgaccccatgaggggccccaggaagctggaggtggtggaggtgaagagccggcagatcaccatccgctgggagcccttcggctacaacgtgacccgctgccacagctacaacctgactgtgcactactgctaccaggtgggcggccaggagcaggtgcgggaggaggtgtcctgggacacagagaacagccacccccagcacaccatcaccaacctgagcccctacaccaacgtgtctgtgaagctgatcctgatgaaccctgagggcaggaaggagagccaggagctgattgtgcagacagatgaggacctgcccggggctgtgcccacagagagcatccagggcagcacctttgaggagaagatcttcctgcagtggagggagcccacccagacctacggcgtcatcaccctgtatgagatcacctacaaggctgtgtcctcctttgatcctgagattgacctgagcaaccagagcggccgggtgtccaagctgggcaatgagacccacttcctgttcttcggcctgtacccaggcaccacctacagcttcaccatccgggccagcacagccaagggctttggacctccagccaccaaccagttcaccaccaagatcagcgcccccagcatgcctgcctatgagctggagacccccctgaaccagacagacaacacagtgacagtgatgctgaagccagcccacagcagaggagcccctgtgtctgtgtaccagatcgtggtggaggaggagcggcccaggaggaccaagaagaccacagagatcctgaagtgctaccctgtgcccatccacttccagaatgccagcctgctgaacagccagtactactttgctgctgagttccctgctgacagcctgcaggccgcccagcccttcaccatcggggacaacaagacctacaacggctactggaacacccccctgctgccctacaagagctaccgcatctacttccaggccgccagccgggccaatggagagaccaagattgactgtgtgcaggtggccaccaagggggccgccacccccaagcctgtgcctgagcctgagaagcagacagaccacacagtgaagattgctggggtgattgctggcatcctgctgtttgtgatcatcttcctgggcgtggtgctggtgatgaagaagaggaagctggccaagaagaggaaggagaccatgagcagcacccggcaggagatgacagtgatggtgaacagcatggacaagagctatgcagagcagggcaccaactgtgatgaggccttctccttcatggacacccacaacctgaatggccgctctgtgagcagccccagcagcttcaccatgaagaccaacaccctgagcacctctgtgcccaacagctactacccagatgagacccacaccatggccagtgacaccagcagcctggtgcagagccacacctacaagaagcgggagccagcagatgtgccctaccagacaggccagctgcacccagccatccgggtggccgacctgctgcagcacatcacccagatgaagtgtgccgagggctacggcttcaaggaggagtatgagagcttctttgagggccagagcgccccctgggacagcgccaagaaggatgagaacaggatgaagaacagatatggcaacatcatcgcctatgaccacagccgggtgcggctgcagaccattgaaggagacaccaacagcgactacatcaatggaaactacattgatggctaccaccggcccaaccactacatcgccacccagggccccatgcaggagaccatctatgacttctggaggatggtgtggcatgaaaatacagccagcatcatcatggtgaccaacctggtggaggtgggccgggtgaagtgctgcaagtactggccagatgacacagagatctacaaggacatcaaggtgaccctgattgaaacagagctgctggccgagtatgtgatccgcacctttgctgtggagaagaggggcgtgcatgagatccgggagatccggcagttccacttcaccggctggccagaccacggcgtgccctaccacgccaccggcctgctgggctttgtgcggcaggtgaagagcaagagccccccatctgctggccccctggtggtgcactgcagcgctggagctggccgcacaggctgcttcatcgtcatcgacatcatgctggacatggccgagcgggagggcgtggtggacatctacaactgtgtgcgggagctgcggagcagaagagtgaacatggtgcagacagaggagcagtatgtgttcatccatgatgccatcctggaggcctgcctgtgtggggacacctctgtgcctgccagccaggtgcgcagcctgtactatgacatgaacaagctggacccccagaccaacagcagccagatcaaggaggagttccgcaccctgaacatggtgacccccaccctgcgggtggaggactgcagcatcgccctgctgcccaggaaccacgagaagaaccgctgcatggacatcctgcccccagaccgctgcctgcccttcctgatcaccattgatggagagagcagcaactacatcaatgctgccctgatggacagctacaagcagcccagcgccttcatcgtgacccagcaccccctgcccaacacagtgaaggacttctggaggctggtgctggactaccactgcacctctgtggtgatgctgaatgatgtggaccctgcccagctgtgcccccagtactggccagaaaatggagtgcacagacatggccccatccaggtggagtttgtgtctgctgacctggaggaggacatcatcagccgcatcttccgcatctacaatgctgcccggccccaggacggctacaggatggtgcagcagttccagttcctgggctggcccatgtacagagacacccctgtgtccaagaggagcttcctgaagctgatccggcaggtggacaagtggcaggaggagtacaatggaggagagggccgcacagtggtgcactgcctgaatggaggcggccgcagcggcaccttctgtgccatcagcatcgtgtgtgagatgctgcggcaccagaggacagtggatgtgttccacgctgtgaagaccctgaggaacaacaagcccaacatggtggacctgctggaccagtacaagttctgctatgaggtggccctggagtacctgaacagcggctag

SEQ ID NO: 132652 - DNA, 4359 bp, Artificial Sequence
  derived and/or modified sequence
atgcggggcctgggcacctgcctggccaccctggccggcctgctgctcacagcagccggggagacgttctcaggaggctgtctattcgatgagccctattctacatgcggctactcccagtccgaaggagatgacttcaattgggagcaagtgaatactctgacgaagcccactagtgacccctggatgccgagcgggtcctttatgctggtgaacgctagcggtcgccctgaggggcagcgggcccacctcctgctcccccagctgaaggaaaacgacacccattgcatcgacttccactactttgtgtcatctaagtctaattcaccacctggtttgctcaatgtgtatgtgaaagtgaataacggcccacttggtaaccccatttggaatataagcggggatcccactaggacatggaacagagcagagctcgcaatcagtacgttctggcccaacttctaccaggtaatatttgaggtgattacatctggacatcaagggtacttagctatcgatgaggtgaaggtacttggccatccctgcaccaggacccctcattttcttcgaattcagaatgtggaggtcaatgccggccagttcgctacttttcaatgctccgccatcgggcgcaccgttgccggggatcggctttggctacagggtattgatgtcagagatgccccactgaaagagatcaaagtgacttcctctcgtcgatttatcgcctcctttaacgtagtgaataccacaaaaagagacgccggtaagtaccgatgcatgattcgcacagaaggaggtgtgggtatcagtaactacgctgagctcgtggtcaaagagcctcccgtgccaattgcaccaccgcaactcgctagcgtgggcgcgacttatctctggatccagctgaacgccaattctatcaatggggacggccctattgtcgcccgcgaagttgagtactgtacagctagtggctcttggaatgacagacagccagtggattcaacctcttacaaaatcggtcatctcgaccctgacaccgagtatgagatcagcgtgctccttacacgaccaggtgagggaggaacaggcagcccagggccagctcttcggaccaggacaaagtgcgctgacccaatgcgcggccccagaaagcttgaggtcgttgaggtcaagtctcggcagattactataaggtgggagccattcggctacaatgtgacaaggtgtcattcctataatctaaccgtacactattgctaccaggtcggtggtcaggagcaggtgcgagaagaggtcagctgggacaccgaaaactctcaccctcagcataccattacaaatctctccccctatacgaacgttagcgtcaaactcattttgatgaatcctgaaggtaggaaggaaagccaagaactcatcgtccaaaccgacgaggatttaccgggcgcggtgccaactgaatctattcagggttccacgttcgaagaaaagatatttctccaatggcgggagcccactcagacctatggagttatcaccctgtacgaaattacctacaaggccgtttcttcctttgatcccgagatcgacctgtccaatcagtccggcagagtcagtaagctcggtaatgaaactcattttctgttctttggactgtaccctggcaccacgtacagcttcactatcagggctagcacagcaaaggggttcgggccacccgccactaaccagttcactaccaagatttcggctccttccatgccagcctatgaacttgagactccacttaaccaaactgacaacaccgtaaccgttatgctcaagcctgcccacagtagaggggcacccgtgtctgtgtaccagatcgtcgtggaagaagagcgtcccaggagaaccaaaaaaacaaccgagatcctgaaatgttacccagtcccaatccatttccagaatgcttcacttctgaacagtcagtattacttcgctgccgagttccccgctgattccctccaggccgcacaaccctttactatcggggataacaaaacttacaacgggtactggaatactcccttgctcccttataagagctacaggatctactttcaggccgccagccgtgctaacggtgaaactaaaatagattgtgtgcaagtggccaccaagggggcggccacaccaaaacctgtgcctgaacctgaaaaacagactgatcatacagtcaaaatagcgggagtgatcgctgggattctgctattcgtgatcatattcctgggggtggtgctagtaatgaaaaagaggaagcttgccaagaagagaaaagaaaccatgagtagtacacggcaggagatgacggtgatggtgaatagtatggataagtcctacgcggaacagggaaccaactgtgatgaggctttcagttttatggatactcacaaccttaatggcaggtcggttagcagcccgtcgtctttcacgatgaaaacaaacactctctctactagcgtgcccaattcttattatcccgacgaaacccataccatggctagcgacaccagcagtctcgtccagagccacacgtacaaaaagagggagcccgctgacgttccctatcagaccggtcagctccaccccgcaatcagagtggctgacttactgcagcacattacacagatgaagtgcgctgagggctacgggttcaaagaggaatacgagtctttcttcgagggacagtccgccccatgggactctgctaagaaggatgaaaatcgcatgaaaaaccgctacggcaacattattgcctatgaccactcgcgagtgcgactgcagacgattgaaggtgatactaattccgattacattaatggcaattacattgacggctaccacaggccgaaccattatattgccacgcagggccctatgcaggagactatatatgacttctggcgcatggtctggcatgagaatacggcgtcaatcattatggtgacgaacctggtcgaggtgggccgggttaagtgctgcaagtattggcccgacgatacagagatatacaaagatattaaagtgacattgattgaaactgaattgctggccgaatatgttatcaggacatttgctgtagagaaacggggcgttcacgaaatccgggaaattcgccagtttcattttaccggatggcccgaccacggagtcccttaccatgctacgggtctgttgggatttgtccgccaagtgaagtctaagtcaccgcctagcgccggaccactcgtggtccactgtagcgccggggcaggcagaacaggatgctttatcgtcattgacatcatgctcgatatggcagaacgggagggagtcgtggacatctataattgtgtgcgcgagctcaggagcagacgcgttaatatggtccagaccgaggagcagtatgtcttcatacatgacgccattttggaggcttgtctttgcggtgatacaagtgtgcctgcatcgcaggtaaggagcctttattacgatatgaataagctggacccacaaaccaacagctcgcagatcaaggaggaatttcggacacttaatatggtcacccctaccttgagggtggaggactgttccattgcccttttgccgcgtaatcacgaaaagaatcgctgcatggatatcctgcccccagatagatgtctccctttcctgataaccattgacggggagagctccaactacattaacgccgcactgatggacagttacaagcagccctcagcgttcattgttacccagcaccccctacctaataccgtgaaagatttttggaggctggtcctggactaccactgtacttcagtggtgatgcttaatgacgttgacccagcccaactttgtcctcagtattggccagagaatggcgttcacagacacgggccgattcaagtagagttcgtatctgccgacctggaggaggatatcatttcgagaatctttcggatttacaatgccgcacgcccacaggacggatacaggatggtgcagcaattccaatttttgggatggcccatgtaccgggacacccccgtttcaaagcgctcttttttgaagctcattaggcaggtagacaagtggcaagaggaatataacggcggagaggggcgcactgtggttcactgtctcaatggtgggggtcgctccggcactttctgcgccatctccatcgtgtgcgagatgctgcgccaccagagaacggtggacgtctttcacgctgttaagactctgcgtaataataaaccgaacatggttgacctcctggatcagtataaattctgctacgaggtggctttggagtatcttaattctggctag

SEQ ID NO: 132653 - DNA, 4173 bp, Artificial Sequence
  derived and/or modified sequence
atgcccagcggcagcttcatgctggtgaacgccagcggccggcccgagggccagagagctcacctgttactgcctcaactgaaggagaatgatacacactgcattgacttccactatttcgtcagctctaagtccaatagcccacctggactgctcaacgtgtatgtcaaagttaacaatgggcccctaggtaatccaatctggaacatctccggggatccaacacggacctggaacagggcagagctagcaatttcaaccttctggccgaacttctaccaggtaatatttgaggtgatcacatcgggtcatcaaggttacctggccatcgacgaggtgaaagtccttggccacccctgtacaaggaccccgcacttcttaaggattcaaaatgtagaagtgaacgctggccagttcgcaacttttcagtgcagcgccattgggagaacagtggctggggaccgtctgtggctgcaggggattgacgtccgcgacgctcctctcaaagaaattaaagtgacttccagtaggcgcttcatcgcttcctttaacgtggtgaacacaactaagagggacgccggcaagtaccgctgcatgattcgaacagaagggggcgtgggtatctccaattacgcggagctggtcgtaaaggagcccccagtcccaatagccccccctcagttggcctctgtgggagcgacctatctatggattcagctaaacgccaattccattaacggcgatggtcccatcgtggctcgggaagttgaatactgtactgcgagcggctcctggaacgatagacaacccgttgattccaccagctataagattggacatttagacccagatacggaatacgaaatcagcgtgctgcttactagacctggcgaaggcggcacaggatcacctgggcctgctctccggacacgtaccaaatgtgccgatcccatgaggggaccaagaaaattagaggtagtcgaagtgaaatccaggcaaatcactatacggtgggagccatttggatacaacgtgacaaggtgtcacagctataacctaactgtgcactactgctatcaggttggcgggcaggaacaagtgcgcgaggaagtctcatgggatactgagaactcacaccctcaacataccattactaacctctccccgtacaccaacgtctccgttaagctgattctgatgaacccagagggacgtaaggaatcccaggagctgatcgtacagactgatgaggatctcccgggagctgttccgacggagagcattcagggatcaacattcgaagagaaaatatttcttcaatggagggagccaactcagacatacggagtaatcacactgtacgagataacctataaagctgtgtcctcctttgacccagagatcgatctgtccaatcagagtggtagagtttctaaactgggcaacgagacccacttcttatttttcggcctttatcctgggaccacatattcttttactatcagggcttccacggctaaaggatttgggccaccggcaaccaaccagttcacgaccaagataagcgcccccagtatgcctgcctatgagttggagacacctctaaatcagacagataacaccgtgactgtaatgctgaaacctgcccacagcagaggcgctcctgtctcagtgtatcagatcgtggtcgaggaggagcgtccgaggcggacgaagaagacaactgaaattctaaagtgctatcctgtgccgatccattttcagaacgctagtctactgaattctcagtactatttcgcggcagagttccccgctgatagtctccaagcggcacagccttttactatcggtgataacaaaacatacaatggatactggaatacacccttgttaccttacaagagttatagaatttactttcaggcagcatctagagccaacggtgagacaaaaatcgactgtgtgcaggtggctaccaagggtgctgcaacccccaaacccgtccctgaacccgaaaagcagacagatcacacggttaagatcgccggcgtgatcgcaggcattttgctatttgtcatcatatttcttggcgtggtgctggtgatgaagaaaaggaagctagcaaaaaagaggaaggagaccatgagctctacacgccaggagatgactgtgatggtcaattcaatggataagtcttatgctgagcagggcactaactgcgacgaggccttctcctttatggacacccacaatctgaacggacgctcagtgtcttcaccctcatcttttacaatgaagacaaacacgctgtcaaccagcgtgccaaacagctactacccggacgaaacccatactatggcgagcgataccagcagtttagtccaatcgcacacttataaaaagcgcgaacccgccgacgtgccctatcagacaggccagttacatccagccatcagagtagccgatctactccaacacatcacacagatgaagtgtgccgagggatacggcttcaaggaagagtatgaaagcttctttgaggggcagtccgccccctgggactcagctaaaaaggacgagaacagaatgaagaacagatatgggaacattattgcctatgaccatagccgcgttagactccagactattgaaggggacaccaacagcgattatattaacggaaattacatcgatgggtaccacagacccaatcattacattgctacccagggccctatgcaagaaaccatatatgacttttggcgtatggtgtggcacgagaatacagctagcataatcatggtgaccaacctcgtggaagttggcagagtgaagtgttgcaagtattggcctgacgacacagaaatatacaaagatattaaagtgaccctgatcgaaacagaacttctggcggaatacgtgatcagaacctttgccgtggagaaacgcggtgtccacgaaatccgggagattagacagttccactttaccggttggccagaccacggggtcccttatcatgctacgggcctcctgggcttcgtccggcaggtcaagtccaagagtcctccaagcgcgggtcctcttgtcgtgcattgtagcgcaggcgcggggcgaacagggtgttttattgtcattgatataatgcttgacatggccgagagagaaggcgtggttgatatttataattgtgtcagagaactgcggtctaggagggtgaatatggttcaaactgaggagcagtatgtgtttattcacgacgctatcctggaggcatgcctgtgcggcgacacttctgtgcccgctagccaagtgagaagtctgtactacgacatgaataagctcgatccccagaccaactcatcccagataaaagaagagttccgcacactcaatatggttacgcctacattaagagtcgaggattgcagcattgcactcctacctagaaaccacgaaaagaacaggtgcatggacatactgcccccagaccgatgccttccattcttaattactattgacggagagagcagtaattatataaatgctgctctcatggatagttacaaacaaccttcagcgtttattgtgacccagcaccccttacctaatacagtcaaagacttctggcgcctggtgctggactaccattgtacttctgtggtgatgctgaatgatgtggatcccgcccagttgtgccctcagtactggcctgaaaatggcgtgcacagacatggtccgatacaagtggagttcgtgagtgctgacttagaggaagacatcataagcagaatctttcggatttacaacgccgcgcggccacaagacggctacagaatggtccagcaatttcagtttctgggttggccgatgtacagggatacccctgtgtcaaaacgatccttccttaagttgattcgccaggtggacaaatggcaggaggagtataacgggggggaggggaggactgtcgtgcactgccttaacggaggcggcagaagcgggaccttttgcgcaatctctattgtatgcgagatgttgcgtcaccagcggaccgtggacgtttttcatgccgtgaaaacgctgcgtaataataagccaaatatggttgacctgctggatcaatataaattctgctatgaggtggctcttgaatatctaaatagtggttag

SEQ ID NO: 132654 - DNA, 4359 bp, Artificial Sequence
  derived and/or modified sequence
atgaggggtctgggcacatgtcttgcaacactggccggtctactgctcacagctgctggcgagactttttccggcggttgcctgtttgacgagccttacagcacctgcggttacagccagtcggagggtgacgactttaattgggagcaggtaaacacactcacaaaaccaacttcagatccatggatgccctcgggctcttttatgctagtcaacgcatcaggacggccagaaggtcagcgggcacatctgctcctgcctcagctgaaagaaaatgatactcactgcatcgatttccactatttcgtgtccagcaaatccaatagcccaccgggacttctcaatgtgtacgtgaaggtcaataacggtcctcttggcaacccaatttggaatattagcggtgatccaactcgcacttggaaccgcgctgagctagcaatctcaaccttctggcctaacttttaccaggtgatctttgaggtgattacgtctgggcaccagggctatctcgccattgacgaggtcaaggtgctgggccatccatgcacgagaaccccgcacttcctccgcattcagaatgtcgaagtgaatgccggacagtttgcgacattccagtgttccgcaattgggagaaccgtcgctggtgatcgactgtggctgcaggggattgacgtcagggacgcacccctcaaggagatcaaagtgacttctagccgacggtttatcgcttccttcaacgtcgttaatactactaaaagggacgcaggtaagtacagatgtatgatacggacagaaggaggggtaggtatctctaactacgctgaactcgtggtcaaggagccgcctgtccccatagctcctccccagctagcttccgttggtgccacttatctgtggatccagcttaacgcaaacagtattaatggggatggcccaattgttgcacgcgaggtggaatattgcaccgctagcggatcatggaacgaccggcaacctgtcgactctacctcatacaaaataggacatttggatcccgataccgagtatgaaatctcagtgcttttgaccaggcctggggaaggaggaaccgggtcccccggacccgcactcagaactcgtactaaatgcgcggatcccatgcgagggccacgtaagctggaggtggtcgaagttaaatccagacagatcactatcagatgggaaccttttggatacaacgttactaggtgccattcctataacctcactgtgcactattgctaccaagtcggtggacaggagcaggtccgcgaagaagtgtcctgggatactgagaacagccacccccagcacaccattaccaacctaagcccttacacaaacgtgtcagtgaaactcattctcatgaaccctgagggcaggaaagaaagccaggagttaatagttcaaactgacgaggaccttcccggtgctgttcctaccgagagcattcagggcagtaccttcgaggaaaagatattcctgcagtggcgggagccaacgcaaacatacggtgtcattaccctgtatgagattacttataaggccgttagttcttttgacccagaaatcgacctttcgaatcagtcaggacgcgtgtctaaactcgggaatgagacccatttcctgttcttcggcctctatccagggactacatattccttcaccatacgcgcaagtaccgccaagggcttcggtccccctgccactaatcagttcaccacaaagatcagcgcaccatccatgccagcttacgaactggaaaccccactgaaccaaacagacaacactgtcaccgtcatgctgaagcccgctcacagccgcggtgctcccgtgtcagtctaccaaattgtcgtagaagaagaaagaccacgcagaactaagaagactacagagatcttgaaatgctaccctgtccctatccattttcaaaacgcatccctgctgaattcccagtattacttcgcagctgagtttccagccgatagtttgcaggctgctcagccttttacgattggtgacaataagacttataatggatactggaacactccacttctgccctacaaaagctaccggatttactttcaagctgcaagccgcgcaaatggggagactaaaattgactgcgtacaggtcgccacaaaaggagctgcaacacctaaacctgtgccagaacctgagaaacagacagaccacacagtcaagatagccggagtgatcgccggtattctcctgttcgtgattatcttcctgggagtggtgttggtcatgaaaaagcgcaaactggctaagaaaaggaaagagaccatgtccagtacaagacaggagatgacggtgatggtgaactcgatggataagagctacgccgagcaggggacaaattgcgacgaggccttctcgttcatggatacacataatctaaatggacgttcagtctccagtccatcatcattcactatgaaaaccaatacactgagcaccagcgtgccgaattcttactacccagatgaaacccacactatggcctccgatacctcttcgctggtgcagagccacacctataagaagcgagaaccagccgatgttccttaccagactggccaactacaccccgctattcgcgtggctgacttactccagcacataactcagatgaagtgcgcagaaggctacggattcaaggaagagtacgaaagtttctttgaaggtcaatccgctccatgggacagcgcaaaaaaggatgaaaaccggatgaagaaccgatacggaaatatcattgcctacgatcattcccgcgtcaggttgcagaccatcgagggtgacactaactccgactacatcaacggaaactacatcgatggttatcataggcctaatcactatatcgcaacgcaaggccctatgcaagagaccatctacgacttttggcgaatggtgtggcatgaaaacactgcgtcaattataatggtgacaaacctagttgaagtcggcagagtgaaatgttgtaagtactggcctgacgacactgagatctacaaggatattaaggtgactctcattgagactgaactgctagcagaatacgtgattagaacatttgccgtggagaagagaggcgtgcatgagattcgggagatcagacagtttcattttacaggttggccagaccatggggtgccctaccacgccactggactcctgggttttgttcgtcaggtcaagtccaaaagccctccctctgctggtcccttggtggtgcattgcagtgccggagccggtcggaccggttgtttcatagtgatcgatatcatgctggacatggctgaaagggaaggcgtggtggacatctataattgtgtccgtgaactgaggagcagaagagtgaatatggtccagacagaggaacagtacgtgtttattcatgatgctatccttgaggcatgcctgtgcggcgatacatcggtgcctgcttcccaggttcgcagtttgtattacgatatgaataagctggacccccagacaaactcctcacaaataaaggaagagtttagaaccttaaacatggtgacgccaaccttgagagtggaagattgttccatagccctgctgcccagaaatcacgaaaagaacagatgtatggatattctgccccctgatcgctgtctgccttttctgattaccatcgatggtgaatccagtaactacatcaacgccgcactcatggatagctataagcagccctcggcctttatcgtgacccagcatccactgcctaataccgtaaaagacttctggagactagttctggattaccactgtaccagtgttgtaatgctgaatgatgtggatcctgctcagctctgtccgcagtattggcctgagaacggcgtccatagacacggacccatccaagtcgagttcgtgagtgccgacctggaggaggatattatcagcagaatcttccggatatacaacgccgcaaggcctcaggatggctacagaatggtgcaacaatttcaattcctaggttggccaatgtaccgggacacaccagtctcaaaacggtcgtttctgaaacttatccgacaggtggacaaatggcaagaggagtacaacgggggagaaggcagaactgtagttcactgcctgaacggtgggggtaggtccggtactttttgtgccatcagcatcgtatgtgaaatgctgaggcatcagaggaccgtggatgtttttcacgccgtcaaaacactaaggaacaataagcccaatatggtggatctgttagatcagtataagttttgctatgaagtggctctggaatacttaaattccggctag

SEQ ID NO: 132655 - DNA, 4173 bp, Artificial Sequence
  derived and/or modified sequence
atgcccagtggctctttcatgttggtgaacgcctctggcaggccagaggggcagcgtgcacacctcctgcttccacaactcaaggagaatgatacacattgtattgactttcactatttcgttagctccaagagcaattcccccccagggctccttaatgtgtatgttaaggtcaataacggcccactcggcaaccctatttggaatatcagtggtgatcccacgcgaacatggaacagagcggaactggcgatctctacattttggcctaatttctatcaggtgatcttcgaagtgatcacctctgggcaccaagggtatctggctatagacgaggttaaagtgctcggtcatccgtgcacgcgcacaccccactttttgcggattcagaacgtggaagttaacgcgggtcagttcgcaaccttccagtgttccgccatcggacggaccgtcgctggcgatagactctggcttcagggcattgatgtgagagatgcaccactcaaagaaatcaaggttacaagttcaaggaggtttattgcttcgtttaacgtcgtcaatactacgaagcgcgatgccggaaaatatagatgtatgatcagaacagagggcggtgttggaatttctaattatgcagaacttgttgtgaaggagccccctgtccccatcgcaccacctcagctggcatcagtgggggcaacctacctatggattcaactaaacgctaattccatcaatggagacggtccaattgtggcacgcgaagtggaatactgcactgcatcaggtagctggaatgatcgtcagcctgtggattccacatcatacaagatcggccatctggatcccgacaccgagtacgagatttccgttttgttaacaaggcctggagaagggggaactggcagcccagggccagcacttcgcacacgaactaagtgcgccgaccctatgagggggcctcgcaaactggaggttgtggaggtgaagtccaggcagattaccatacgatgggaaccgtttggctacaacgtgaccaggtgtcactcatacaacctgaccgtgcactactgctatcaagtaggcggacaggagcaggtaagagaggaggtgagttgggacaccgagaactcccatccgcagcatacaatcacaaacctgtccccatacaccaacgtatccgtgaaactcatcctcatgaaccccgagggtcgaaaagaatcacaggaactcattgtacagaccgatgaagacctgcccggagctgttcccacagaatcgattcaaggctctacttttgaggagaagattttcttgcagtggagggaacccacgcagacatatggtgtcatcacactttatgagatcacgtacaaggctgtgtcatcctttgacccagaaatcgacctatcaaaccagagtggcagggtgagtaaactcgggaatgaaacccacttcctgttcttcggtctctaccccggtactacctattccttcacaatccgcgcatccaccgccaagggtttcggaccacctgcgacaaaccaattcaccactaaaataagcgcgccttcaatgcctgcctatgagctggagactcccctgaatcagaccgacaacaccgtcaccgtgatgctgaagccagctcatagtcggggagctccagtgtcggtctatcagattgtggtagaggaggaacggccacggaggaccaagaagactacggagatcttaaagtgttatccagtacccatacacttccagaacgcaagccttctcaactcacagtactactttgcagccgaattccccgcagacagtcttcaggctgcccagccctttactattggcgacaataaaacctataacggctactggaatactcccttgctgccgtacaaatcttataggatctactttcaggccgcaagccgcgctaacggagagactaagatcgattgtgtccaggtagccacgaaaggcgcagccacccccaagcccgtgcccgaaccagagaagcagaccgatcataccgtgaaaatcgcaggcgtaattgccggaattctcctgtttgttatcatcttcctcggcgtcgtgctggtgatgaaaaagcgtaagctcgctaaaaagagaaaggaaaccatgtcatccactcgtcaggagatgacagtgatggtgaatagtatggacaagtcatacgccgagcaaggaactaattgtgacgaagctttcagttttatggatacacacaacctcaatgggagatccgtcagttccccctcgtcctttaccatgaagactaatactctctcaacatctgttccaaatagctattatcctgatgagacgcacacaatggcatccgatacctcttctctggtacagagtcatacgtacaaaaagcgagagcctgcagatgtgccataccagacaggccaactccacccagccatccgtgtcgctgacttgctgcagcacattacccagatgaagtgtgccgagggctatggcttcaaggaggagtacgagtcattcttcgagggacagtcagctccgtgggactccgccaaaaaagatgagaacagaatgaagaaccgttatggcaatatcattgcttacgatcattcacgagtgcgactgcaaaccatcgagggagataccaactcagactacatcaatggaaactacattgacggttaccacagaccgaatcattacatcgctacgcagggaccaatgcaggaaactatttatgatttttggaggatggtgtggcacgagaatacggctagtataattatggtgacaaacttggttgaggtgggcagggtgaaatgttgcaagtactggccagatgacacagagatctacaaggatattaaggtaaccctcattgagactgagttactggctgaatacgtgatacgtacctttgccgtcgagaaacgcggtgtgcatgagatacgcgaaattaggcaatttcatttcacaggctggcccgaccacggagtcccctaccatgcaactggtttgctcgggtttgttcggcaggtgaaaagcaaaagcccccctagtgcgggtcccttagtggtacactgttcagccggagcgggtcggacaggctgttttattgtcattgacatcatgttggatatggccgagcgggagggagttgtcgacatctataattgcgtgcgcgagctgaggtcccggagagttaatatggtgcagacagaggaacaatatgtgtttatccatgacgctattctggaggcctgcctgtgcggggatacctctgtccctgcctcccaggtgcgatcgctatactacgatatgaacaaactagacccacagacaaattctagccagattaaggaagaatttagaaccctaaacatggtgacaccgacactgagagtggaggactgctccatcgccctgctgccacggaaccacgaaaagaaccggtgtatggacattttgccccctgatcggtgcttgcctttcctgatcactattgacggcgaatccagcaactatatcaatgccgctttgatggattcatataagcagcctagcgctttcattgtgacccagcaccctctgccgaatacggttaaggatttctggagattggtgcttgactaccactgcactagcgtggtcatgctaaacgacgtcgatcccgctcagctgtgcccccagtattggcccgagaacggtgttcaccgtcatggaccgattcaagtcgaattcgtatccgctgatcttgaagaggatattatcagtcgtattttcaggatatataatgctgcccgaccacaggatggctacagaatggttcagcaatttcagtttctggggtggccaatgtatcgggatacccctgtatcaaagcggtcttttctaaaactaattaggcaggttgacaagtggcaggaggagtacaacgggggagagggacgcacagtggttcactgcttgaatggagggggacggagcggaactttttgcgctatctccattgtctgcgaaatgctgagacaccaacgtaccgtggacgtgtttcatgccgtgaaaacgctccggaacaataagcccaatatggtagacctgctggatcagtacaaattttgctatgaggtggcactcgaatacctgaattcagggtag

SEQ ID NO: 132656 - DNA, 5058 bp, Artificial Sequence
  derived and/or modified sequence
atgaggggacttgggacttgcctggcgactttggccggacttttgctaactgcggcgggcgagacgttctcaggtggctgcctctttgatgagccgtatagcacatgtggatatagtcaatctgaaggtgatgacttcaattgggagcaagtgaacaccttgactaaaccgacttctgatccatggatgccatcaggttctttcatgctggtgaatgcctctgggagacctgaggggcagagagcccacctgctcttaccccaacttaaagaaaatgacacccactgcatcgattttcactattttgtgtccagcaagagtaattctcctccggggttactcaatgtctacgtgaaggtcaataacgggccactggggaatcctatctggaatatatctggagacccaacacgtacatggaacagggcagaactggccattagtactttctggcctaacttttatcaggtgatttttgaagtgataacttctggacatcaaggctatctcgctatcgatgaggtgaaggtgttaggacatccatgtaccaggactcctcacttcctgcggattcagaatgtggaagttaatgctggccagtttgctaccttccagtgcagtgccatcggcaggaccgtggcaggagacaggctctggttacagggcattgatgtgcgagatgctcctctgaaggaaatcaaggtgaccagctcccgacgcttcattgcttcatttaatgttgtgaataccaccaaacgagatgctggaaagtaccgctgcatgattcgcactgaaggaggtgttggaatatcaaactatgcagagttggtagttaaagaaccacccgttcctattgccccacctcagctcgcctctgtaggagccacctacctgtggatacagctcaacgccaactccatcaatggggatgggcccattgtggcccgagaggtggagtactgcacggccagtgggagctggaatgaccggcagccagtcgattccacgagctataaaattggacaccttgacccagatacagaatatgagattagtgtgctcctgaccaggccaggggagggtggcactggctctcctggtccagctctcaggacaagaacaaagtgtgctgatcccatgcgaggcccaagaaaactagaagtagtggaggtcaaatctcggcaaatcactatccgctgggagccatttggatataatgtaactcgttgccacagttataatctcactgtccactactgttaccaagttggaggacaagaacaagtgcgagaagaagtaagctgggatacagaaaactcacaccctcaacacacgatcactaacctgtcaccatacaccaatgtcagtgtgaaactgatcctcatgaacccagagggccggaaggaaagccaagaactcatagtgcagacagatgaagacctcccaggtgctgttcccactgaatccatacaaggaagtacctttgaagagaagatatttcttcagtggagagaaccaactcaaacatatggtgtaatcactttatatgagatcacctacaaagcagtcagttcctttgacccagaaatagatttatccaatcagagtggaagagtttcaaagctgggaaatgaaacccattttctgttttttggactgtatccggggaccacatactcctttaccatccgagctagcacagctaagggttttgggcctccagcaacaaaccagttcaccaccaaaatatcagcaccctctatgccagcttatgaacttgagacacctttgaatcaaactgacaataccgtgacagtcatgctgaaacctgcccacagcagaggagcacctgtcagtgtctatcaaatagttgttgaggaagaacgtcctcgaagaactaaaaagacgacagaaatcttaaagtgctacccagtgccaattcacttccagaatgcttctctgctgaactcacagtactactttgctgcagaatttcctgcagacagcctccaagctgcgcagccttttacaattggtgataataagacatataatggatactggaacactccccttctcccctataaaagctacagaatttatttccaagctgctagtagagccaatggggaaaccaaaatagactgtgtccaagtggccacaaaaggagctgccactccgaaaccagtcccagaacccgagaaacagacagaccatacagttaaaattgctggagtcatcgcgggcatcttgctgttcgtgattatatttcttggagttgtgttggtaatgaagaaaaggaaactggccaagaagcggaaagagaccatgagcagcacccgacaggagatgactgtgatggtgaactcaatggacaagagctatgctgagcagggcacaaactgcgacgaggctttctcattcatggacacgcacaatctgaatgggagatctgtgtcttcaccatcgtccttcacaatgaaaacaaatacactgagcacatcggtgcctaattcctattacccagatgaaacccacacaatggccagcgataccagcagcctggtgcagtcccatacttacaagaagcgagagccggccgacgtgccctatcagactgggcagctccaccccgccatccgggtggcagacctccttcagcacatcacacagatgaagtgtgcggagggctacggcttcaaggaggaatacgagagcttctttgaagggcagtctgcaccatgggactcggctaagaaagatgagaacagaatgaagaacagatacgggaatatcattgcatacgatcattcccgagtgaggctgcagacaatagaaggagacacaaactcagactatatcaatggcaattatatcgatggttatcatcgacccaatcattacattgctacccaagggccaatgcaggaaaccatctatgacttctggaggatggtgtggcacgaaaacactgcaagtatcatcatggtgaccaatcttgtggaagtgggaagggtcaaatgctgcaaatactggccagatgacacagagatatataaagacattaaagttaccctaatagaaacagaactactggcagaatatgtgataagaacatttgctgttgaaaagagaggtgtgcatgaaatccgagagatcagacagtttcacttcactggctggccggatcatggggtcccctaccatgccaccggcctgctgggattcgtgcggcaagtcaagtccaagagcccgcccagtgcaggcccactggtggtgcactgcagtgctggtgcagggaggactggctgtttcatcgtcattgatatcatgttggacatggccgaaagggaaggggtcgtagacatctacaactgcgtcagggagctgcggtcacggagggtgaacatggtgcaaacagaggagcagtatgtgtttatccacgatgcgatcctggaagcctgtctttgtggggacacctctgtgcctgcttcccaagttaggtctctgtattatgacatgaacaaactggatccacagacaaactcaagccagattaaagaggaattccggacgctaaacatggtgacaccaacgctgcgagtagaggactgcagcatcgcactgttgccccggaaccatgagaaaaaccggtgcatggacatcctgcccccagaccgctgcctgcccttcctcatcaccatcgatggggagagcagcaactacatcaatgctgccctcatggacagctataaacagccttcagcttttatagtcacccagcatcctttgccaaacacagtgaaagacttttggagactggtcctggattatcactgcacatccgtagttatgctaaatgatgtggatcctgcccagttgtgtccacagtactggccagaaaacggagtacacagacacggccccatccaggtggaatttgtctctgctgacctggaagaggacatcatcagcaggatattccgcatttacaatgccgccagaccccaagatggatatcggatggtgcagcaattccagttcctgggctggccgatgtacagggacacaccagtgtctaagcgctccttcttgaagctcattcgccaggtggacaagtggcaagaggagtacaatggcggggaaggccgcacggttgtgcactgcttgaacgggggaggccgcagtgggacgttctgcgccatcagcatcgtatgtgagatgctccggcaccagagaaccgtggatgtctttcacgctgtgaagacactgaggaacaacaagcccaacatggtcgacctcctggatcagtacaagttctgctacgaggtggccctggaatacttgaattctggctgatggtgtaaacagctctgcaaacaatccctttcataccacaaagccaagacgttccatggtatttgtgcaaaagagatgaagacttctcaatatgcttattttgctttgcataattggctctttttaagagcccaagaaagtgtttctaaaattgcttgcactgcccaatcccagtaatgctgctgcctgacagaaacacacacacagccacagttgccaaatcccgtactccttgccaccggcttcctagagcagcgtagacagctggtaaactgaagagcacaactatattcttatgaaggaatttgtacctttggggtattattttgtggcccgtgaccctcgttattgttacagctgagtgtatgtttttgttctgtggagaatgctatctggcattatggtaatatattattttaggtaatatttgtactttaacatgttgcataatatatgcttatgtagctttccaggactaacagataaatgtgtaatgaacaaagatatgttgtatgagtcgtcgtttctgtcagatttgtattgtttccaagggaaaagcttgggggaggactcagttcacaaaatgcaaaactcaacgatcagattcacggacccagagcttttccatgtgtttatattgtaaatatttttgatttcatcaaattatttattcattaaaagaaatttttgtgaagcaca

SEQ ID NO: 132657 - DNA, 5292 bp, Artificial Sequence
  derived and/or modified sequence
gtgctgtggcccaatcctgtgcgtgtctcctcttcaggctcctgccggagcatgcttctctaatcttaccatttatcactgacccttcggtgaaactctcttctgtttaaatttaccagggtacactttgtaatacttgggaccaagaatttgaagatagtaatcagacaaatcaaacaactagtagtagtggagagacacgtagccctacaggaaggggtagaattatcattaaaaacacagacaaaccagagactgcctgaaaaaaaaaaaaagatgaactggaaagattcaaagtaggctctattggaggtggctgcctctttgatgagccgtatagcacatgtggatatagtcaatctgaaggtgatgacttcaattgggagcaagtgaacaccttgactaaaccgacttctgatccatggatgccatcaggttctttcatgctggtgaatgcctctgggagacctgaggggcagagagcccacctgctcttaccccaacttaaagaaaatgacacccactgcatcgattttcactattttgtgtccagcaagagtaattctcctccggggttactcaatgtctacgtgaaggtcaataacgggccactggggaatcctatctggaatatatctggagacccaacacgtacatggaacagggcagaactggccattagtactttctggcctaacttttatcaggtgatttttgaagtgataacttctggacatcaaggctatctcgctatcgatgaggtgaaggtgttaggacatccatgtaccaggactcctcacttcctgcggattcagaatgtggaagttaatgctggccagtttgctaccttccagtgcagtgccatcggcaggaccgtggcaggagacaggctctggttacagggcattgatgtgcgagatgctcctctgaaggaaatcaaggtgaccagctcccgacgcttcattgcttcatttaatgttgtgaataccaccaaacgagatgctggaaagtaccgctgcatgattcgcactgaaggaggtgttggaatatcaaactatgcagagttggtagttaaagaaccacccgttcctattgccccacctcagctcgcctctgtaggagccacctacctgtggatacagctcaacgccaactccatcaatggggatgggcccattgtggcccgagaggtggagtactgcacggccagtgggagctggaatgaccggcagccagtcgattccacgagctataaaattggacaccttgacccagatacagaatatgagattagtgtgctcctgaccaggccaggggagggtggcactggctctcctggtccagctctcaggacaagaacaaagtgtgctgatcccatgcgaggcccaagaaaactagaagtagtggaggtcaaatctcggcaaatcactatccgctgggagccatttggatataatgtaactcgttgccacagttataatctcactgtccactactgttaccaagttggaggacaagaacaagtgcgagaagaagtaagctgggatacagaaaactcacaccctcaacacacgatcactaacctgtcaccatacaccaatgtcagtgtgaaactgatcctcatgaacccagagggccggaaggaaagccaagaactcatagtgcagacagatgaagacctcccaggtgctgttcccactgaatccatacaaggaagtacctttgaagagaagatatttcttcagtggagagaaccaactcaaacatatggtgtaatcactttatatgagatcacctacaaagcagtcagttcctttgacccagaaatagatttatccaatcagagtggaagagtttcaaagctgggaaatgaaacccattttctgttttttggactgtatccggggaccacatactcctttaccatccgagctagcacagctaagggttttgggcctccagcaacaaaccagttcaccaccaaaatatcagcaccctctatgccagcttatgaacttgagacacctttgaatcaaactgacaataccgtgacagtcatgctgaaacctgcccacagcagaggagcacctgtcagtgtctatcaaatagttgttgaggaagaacgtcctcgaagaactaaaaagacgacagaaatcttaaagtgctacccagtgccaattcacttccagaatgcttctctgctgaactcacagtactactttgctgcagaatttcctgcagacagcctccaagctgcgcagccttttacaattggtgataataagacatataatggatactggaacactccccttctcccctataaaagctacagaatttatttccaagctgctagtagagccaatggggaaaccaaaatagactgtgtccaagtggccacaaaaggagctgccactccgaaaccagtcccagaacccgagaaacagacagaccatacagttaaaattgctggagtcatcgcgggcatcttgctgttcgtgattatatttcttggagttgtgttggtaatgaagaaaaggaaactggccaagaagcggaaagagaccatgagcagcacccgacaggagatgactgtgatggtgaactcaatggacaagagctatgctgagcagggcacaaactgcgacgaggctttctcattcatggacacgcacaatctgaatgggagatctgtgtcttcaccatcgtccttcacaatgaaaacaaatacactgagcacatcggtgcctaattcctattacccagatgaaacccacacaatggccagcgataccagcagcctggtgcagtcccatacttacaagaagcgagagccggccgacgtgccctatcagactgggcagctccaccccgccatccgggtggcagacctccttcagcacatcacacagatgaagtgtgcggagggctacggcttcaaggaggaatacgagagcttctttgaagggcagtctgcaccatgggactcggctaagaaagatgagaacagaatgaagaacagatacgggaatatcattgcatacgatcattcccgagtgaggctgcagacaatagaaggagacacaaactcagactatatcaatggcaattatatcgatggttatcatcgacccaatcattacattgctacccaagggccaatgcaggaaaccatctatgacttctggaggatggtgtggcacgaaaacactgcaagtatcatcatggtgaccaatcttgtggaagtgggaagggtcaaatgctgcaaatactggccagatgacacagagatatataaagacattaaagttaccctaatagaaacagaactactggcagaatatgtgataagaacatttgctgttgaaaagagaggtgtgcatgaaatccgagagatcagacagtttcacttcactggctggccggatcatggggtcccctaccatgccaccggcctgctgggattcgtgcggcaagtcaagtccaagagcccgcccagtgcaggcccactggtggtgcactgcagtgctggtgcagggaggactggctgtttcatcgtcattgatatcatgttggacatggccgaaagggaaggggtcgtagacatctacaactgcgtcagggagctgcggtcacggagggtgaacatggtgcaaacagaggagcagtatgtgtttatccacgatgcgatcctggaagcctgtctttgtggggacacctctgtgcctgcttcccaagttaggtctctgtattatgacatgaacaaactggatccacagacaaactcaagccagattaaagaggaattccggacgctaaacatggtgacaccaacgctgcgagtagaggactgcagcatcgcactgttgccccggaaccatgagaaaaaccggtgcatggacatcctgcccccagaccgctgcctgcccttcctcatcaccatcgatggggagagcagcaactacatcaatgctgccctcatggacagctataaacagccttcagcttttatagtcacccagcatcctttgccaaacacagtgaaagacttttggagactggtcctggattatcactgcacatccgtagttatgctaaatgatgtggatcctgcccagttgtgtccacagtactggccagaaaacggagtacacagacacggccccatccaggtggaatttgtctctgctgacctggaagaggacatcatcagcaggatattccgcatttacaatgccgccagaccccaagatggatatcggatggtgcagcaattccagttcctgggctggccgatgtacagggacacaccagtgtctaagcgctccttcttgaagctcattcgccaggtggacaagtggcaagaggagtacaatggcggggaaggccgcacggttgtgcactgcttgaacgggggaggccgcagtgggacgttctgcgccatcagcatcgtatgtgagatgctccggcaccagagaaccgtggatgtctttcacgctgtgaagacactgaggaacaacaagcccaacatggtcgacctcctggatcagtacaagttctgctacgaggtggccctggaatacttgaattctggctgatggtgtaaacagctctgcaaacaatccctttcataccacaaagccaagacgttccatggtatttgtgcaaaagagatgaagacttctcaatatgcttattttgctttgcataattggctctttttaagagcccaagaaagtgtttctaaaattgcttgcactgcccaatcccagtaatgctgctgcctgacagaaacacacacacagccacagttgccaaatcccgtactccttgccaccggcttcctagagcagcgtagacagctggtaaactgaagagcacaactatattcttatgaaggaatttgtacctttggggtattattttgtggcccgtgaccctcgttattgttacagctgagtgtatgtttttgttctgtggagaatgctatctggcattatggtaatatattattttaggtaatatttgtactttaacatgttgcataatatatgcttatgtagctttccaggactaacagataaatgtgtaatgaacaaagatatgttgtatgagtcgtcgtttctgtcagatttgtattgtttccaagggaaaagcttgggggaggactcagttcacaaaatgcaaaactcaacgatcagattcacggacccagagcttttccatgtgtttatattgtaaatatttttgatttcatcaaattatttattcattaaaagaaatttttgtgaa

SEQ ID NO: 132658 - DNA, 4359 bp, Artificial Sequence
  derived and/or modified sequence
atgagaggcctgggcacctgcctggccaccctggccggcctgctgctgaccgccgccggcgagaccttcagcggcggctgcctgttcgacgagccctacagcacctgcggctacagccagagcgagggcgacgacttcaactgggagcaggtgaacaccctgaccaagcccaccagcgacccctggatgcccagcggcagcttcatgctggtgaacgccagcggcagacccgagggccagagagcccacctgctgctgccccagctgaaggagaacgacacccactgcatcgacttccactacttcgtgagcagcaagagcaacagcccccccggcctgctgaacgtgtacgtgaaggtgaacaacggccccctgggcaaccccatctggaacatcagcggcgaccccaccagaacctggaacagagccgagctggccatcagcaccttctggcccaacttctaccaggtgatcttcgaggtgatcaccagcggccaccagggctacctggccatcgacgaggtgaaggtgctgggccacccctgcaccagaaccccccacttcctgagaatccagaacgtggaggtgaacgccggccagttcgccaccttccagtgcagcgccatcggcagaaccgtggccggcgacagactgtggctgcagggcatcgacgtgagagacgcccccctgaaggagatcaaggtgaccagcagcagaagattcatcgccagcttcaacgtggtgaacaccaccaagagagacgccggcaagtacagatgcatgatcagaaccgagggcggcgtgggcatcagcaactacgccgagctggtggtgaaggagccccccgtgcccatcgcccccccccagctggccagcgtgggcgccacctacctgtggatccagctgaacgccaacagcatcaacggcgacggccccatcgtggccagagaggtggagtactgcaccgccagcggcagctggaacgacagacagcccgtggacagcaccagctacaagatcggccacctggaccccgacaccgagtacgagatcagcgtgctgctgaccagacccggcgagggcggcaccggcagccccggccccgccctgagaaccagaaccaagtgcgccgaccccatgagaggccccagaaagctggaggtggtggaggtgaagagcagacagatcaccatcagatgggagcccttcggctacaacgtgaccagatgccacagctacaacctgaccgtgcactactgctaccaggtgggcggccaggagcaggtgagagaggaggtgagctgggacaccgagaacagccacccccagcacaccatcaccaacctgagcccctacaccaacgtgagcgtgaagctgatcctgatgaaccccgagggcagaaaggagagccaggagctgatcgtgcagaccgacgaggacctgcccggcgccgtgcccaccgagagcatccagggcagcaccttcgaggagaagatcttcctgcagtggagagagcccacccagacctacggcgtgatcaccctgtacgagatcacctacaaggccgtgagcagcttcgaccccgagatcgacctgagcaaccagagcggcagagtgagcaagctgggcaacgagacccacttcctgttcttcggcctgtaccccggcaccacctacagcttcaccatcagagccagcaccgccaagggcttcggcccccccgccaccaaccagttcaccaccaagatcagcgcccccagcatgcccgcctacgagctggagacccccctgaaccagaccgacaacaccgtgaccgtgatgctgaagcccgcccacagcagaggcgcccccgtgagcgtgtaccagatcgtggtggaggaggagagacccagaagaaccaagaagaccaccgagatcctgaagtgctaccccgtgcccatccacttccagaacgccagcctgctgaacagccagtactacttcgccgccgagttccccgccgacagcctgcaggccgcccagcccttcaccatcggcgacaacaagacctacaacggctactggaacacccccctgctgccctacaagagctacagaatctacttccaggccgccagcagagccaacggcgagaccaagatcgactgcgtgcaggtggccaccaagggcgccgccacccccaagcccgtgcccgagcccgagaagcagaccgaccacaccgtgaagatcgccggcgtgatcgccggcatcctgctgttcgtgatcatcttcctgggcgtggtgctggtgatgaagaagagaaagctggccaagaagagaaaggagaccatgagcagcaccagacaggagatgaccgtgatggtgaacagcatggacaagagctacgccgagcagggcaccaactgcgacgaggccttcagcttcatggacacccacaacctgaacggcagaagcgtgagcagccccagcagcttcaccatgaagaccaacaccctgagcaccagcgtgcccaacagctactaccccgacgagacccacaccatggccagcgacaccagcagcctggtgcagagccacacctacaagaagagagagcccgccgacgtgccctaccagaccggccagctgcaccccgccatcagagtggccgacctgctgcagcacatcacccagatgaagtgcgccgagggctacggcttcaaggaggagtacgagagcttcttcgagggccagagcgccccctgggacagcgccaagaaggacgagaacagaatgaagaacagatacggcaacatcatcgcctacgaccacagcagagtgagactgcagaccatcgagggcgacaccaacagcgactacatcaacggcaactacatcgacggctaccacagacccaaccactacatcgccacccagggccccatgcaggagaccatctacgacttctggagaatggtgtggcacgagaacaccgccagcatcatcatggtgaccaacctggtggaggtgggcagagtgaagtgctgcaagtactggcccgacgacaccgagatctacaaggacatcaaggtgaccctgatcgagaccgagctgctggccgagtacgtgatcagaaccttcgccgtggagaagagaggcgtgcacgagatcagagagatcagacagttccacttcaccggctggcccgaccacggcgtgccctaccacgccaccggcctgctgggcttcgtgagacaggtgaagagcaagagcccccccagcgccggccccctggtggtgcactgcagcgccggcgccggcagaaccggctgcttcatcgtgatcgacatcatgctggacatggccgagagagagggcgtggtggacatctacaactgcgtgagagagctgagaagcagaagagtgaacatggtgcagaccgaggagcagtacgtgttcatccacgacgccatcctggaggcctgcctgtgcggcgacaccagcgtgcccgccagccaggtgagaagcctgtactacgacatgaacaagctggacccccagaccaacagcagccagatcaaggaggagttcagaaccctgaacatggtgacccccaccctgagagtggaggactgcagcatcgccctgctgcccagaaaccacgagaagaacagatgcatggacatcctgccccccgacagatgcctgcccttcctgatcaccatcgacggcgagagcagcaactacatcaacgccgccctgatggacagctacaagcagcccagcgccttcatcgtgacccagcaccccctgcccaacaccgtgaaggacttctggagactggtgctggactaccactgcaccagcgtggtgatgctgaacgacgtggaccccgcccagctgtgcccccagtactggcccgagaacggcgtgcacagacacggccccatccaggtggagttcgtgagcgccgacctggaggaggacatcatcagcagaatcttcagaatctacaacgccgccagaccccaggacggctacagaatggtgcagcagttccagttcctgggctggcccatgtacagagacacccccgtgagcaagagaagcttcctgaagctgatcagacaggtggacaagtggcaggaggagtacaacggcggcgagggcagaaccgtggtgcactgcctgaacggcggcggcagaagcggcaccttctgcgccatcagcatcgtgtgcgagatgctgagacaccagagaaccgtggacgtgttccacgccgtgaagaccctgagaaacaacaagcccaacatggtggacctgctggaccagtacaagttctgctacgaggtggccctggagtacctgaacagcggctag

SEQ ID NO: 132659 - DNA, 4173 bp, Artificial Sequence
  derived and/or modified sequence
atgcccagcggcagcttcatgctggtgaacgccagcggcagacccgagggccagagagcccacctgctgctgccccagctgaaggagaacgacacccactgcatcgacttccactacttcgtgagcagcaagagcaacagcccccccggcctgctgaacgtgtacgtgaaggtgaacaacggccccctgggcaaccccatctggaacatcagcggcgaccccaccagaacctggaacagagccgagctggccatcagcaccttctggcccaacttctaccaggtgatcttcgaggtgatcaccagcggccaccagggctacctggccatcgacgaggtgaaggtgctgggccacccctgcaccagaaccccccacttcctgagaatccagaacgtggaggtgaacgccggccagttcgccaccttccagtgcagcgccatcggcagaaccgtggccggcgacagactgtggctgcagggcatcgacgtgagagacgcccccctgaaggagatcaaggtgaccagcagcagaagattcatcgccagcttcaacgtggtgaacaccaccaagagagacgccggcaagtacagatgcatgatcagaaccgagggcggcgtgggcatcagcaactacgccgagctggtggtgaaggagccccccgtgcccatcgcccccccccagctggccagcgtgggcgccacctacctgtggatccagctgaacgccaacagcatcaacggcgacggccccatcgtggccagagaggtggagtactgcaccgccagcggcagctggaacgacagacagcccgtggacagcaccagctacaagatcggccacctggaccccgacaccgagtacgagatcagcgtgctgctgaccagacccggcgagggcggcaccggcagccccggccccgccctgagaaccagaaccaagtgcgccgaccccatgagaggccccagaaagctggaggtggtggaggtgaagagcagacagatcaccatcagatgggagcccttcggctacaacgtgaccagatgccacagctacaacctgaccgtgcactactgctaccaggtgggcggccaggagcaggtgagagaggaggtgagctgggacaccgagaacagccacccccagcacaccatcaccaacctgagcccctacaccaacgtgagcgtgaagctgatcctgatgaaccccgagggcagaaaggagagccaggagctgatcgtgcagaccgacgaggacctgcccggcgccgtgcccaccgagagcatccagggcagcaccttcgaggagaagatcttcctgcagtggagagagcccacccagacctacggcgtgatcaccctgtacgagatcacctacaaggccgtgagcagcttcgaccccgagatcgacctgagcaaccagagcggcagagtgagcaagctgggcaacgagacccacttcctgttcttcggcctgtaccccggcaccacctacagcttcaccatcagagccagcaccgccaagggcttcggcccccccgccaccaaccagttcaccaccaagatcagcgcccccagcatgcccgcctacgagctggagacccccctgaaccagaccgacaacaccgtgaccgtgatgctgaagcccgcccacagcagaggcgcccccgtgagcgtgtaccagatcgtggtggaggaggagagacccagaagaaccaagaagaccaccgagatcctgaagtgctaccccgtgcccatccacttccagaacgccagcctgctgaacagccagtactacttcgccgccgagttccccgccgacagcctgcaggccgcccagcccttcaccatcggcgacaacaagacctacaacggctactggaacacccccctgctgccctacaagagctacagaatctacttccaggccgccagcagagccaacggcgagaccaagatcgactgcgtgcaggtggccaccaagggcgccgccacccccaagcccgtgcccgagcccgagaagcagaccgaccacaccgtgaagatcgccggcgtgatcgccggcatcctgctgttcgtgatcatcttcctgggcgtggtgctggtgatgaagaagagaaagctggccaagaagagaaaggagaccatgagcagcaccagacaggagatgaccgtgatggtgaacagcatggacaagagctacgccgagcagggcaccaactgcgacgaggccttcagcttcatggacacccacaacctgaacggcagaagcgtgagcagccccagcagcttcaccatgaagaccaacaccctgagcaccagcgtgcccaacagctactaccccgacgagacccacaccatggccagcgacaccagcagcctggtgcagagccacacctacaagaagagagagcccgccgacgtgccctaccagaccggccagctgcaccccgccatcagagtggccgacctgctgcagcacatcacccagatgaagtgcgccgagggctacggcttcaaggaggagtacgagagcttcttcgagggccagagcgccccctgggacagcgccaagaaggacgagaacagaatgaagaacagatacggcaacatcatcgcctacgaccacagcagagtgagactgcagaccatcgagggcgacaccaacagcgactacatcaacggcaactacatcgacggctaccacagacccaaccactacatcgccacccagggccccatgcaggagaccatctacgacttctggagaatggtgtggcacgagaacaccgccagcatcatcatggtgaccaacctggtggaggtgggcagagtgaagtgctgcaagtactggcccgacgacaccgagatctacaaggacatcaaggtgaccctgatcgagaccgagctgctggccgagtacgtgatcagaaccttcgccgtggagaagagaggcgtgcacgagatcagagagatcagacagttccacttcaccggctggcccgaccacggcgtgccctaccacgccaccggcctgctgggcttcgtgagacaggtgaagagcaagagcccccccagcgccggccccctggtggtgcactgcagcgccggcgccggcagaaccggctgcttcatcgtgatcgacatcatgctggacatggccgagagagagggcgtggtggacatctacaactgcgtgagagagctgagaagcagaagagtgaacatggtgcagaccgaggagcagtacgtgttcatccacgacgccatcctggaggcctgcctgtgcggcgacaccagcgtgcccgccagccaggtgagaagcctgtactacgacatgaacaagctggacccccagaccaacagcagccagatcaaggaggagttcagaaccctgaacatggtgacccccaccctgagagtggaggactgcagcatcgccctgctgcccagaaaccacgagaagaacagatgcatggacatcctgccccccgacagatgcctgcccttcctgatcaccatcgacggcgagagcagcaactacatcaacgccgccctgatggacagctacaagcagcccagcgccttcatcgtgacccagcaccccctgcccaacaccgtgaaggacttctggagactggtgctggactaccactgcaccagcgtggtgatgctgaacgacgtggaccccgcccagctgtgcccccagtactggcccgagaacggcgtgcacagacacggccccatccaggtggagttcgtgagcgccgacctggaggaggacatcatcagcagaatcttcagaatctacaacgccgccagaccccaggacggctacagaatggtgcagcagttccagttcctgggctggcccatgtacagagacacccccgtgagcaagagaagcttcctgaagctgatcagacaggtggacaagtggcaggaggagtacaacggcggcgagggcagaaccgtggtgcactgcctgaacggcggcggcagaagcggcaccttctgcgccatcagcatcgtgtgcgagatgctgagacaccagagaaccgtggacgtgttccacgccgtgaagaccctgagaaacaacaagcccaacatggtggacctgctggaccagtacaagttctgctacgaggtggccctggagtacctgaacagcggctag

SEQ ID NO: 132660 - protein, 979 aa, Artificial Sequence
  derived and/or modified sequence
MRRPRRPGGLGGSGGLRLLLCLLLLSSRPGGCSAVSAHGCLFDRRLCSHLEVCIQDGLFGQCQVGVGQARPLLQVTSPVLQRLQGVLRQLMSQGLSWHDDLTQYVISQEMERIPRLRPPEPRPRDRSGLAPKRPGPAGELLLQDIPTGSAPAAQHRLPQPPVGKGGAGASSSLSPLQAELLPPLLEHLLLPPQPPHPSLSYEPALLQPYLFHQFGSRDGSRVSEGSPGMVSVGPLPKAEAPALFSRTASKGIFGDHPGHSYGDLPGPSPAQLFQDSGLLYLAQELPAPSRARVPRLPEQGSSSRAEDSPEGYEKEGLGDRGEKPASPAVQPDAALQRLAAVLAGYGVELRQLTPEQLSTLLTLLQLLPKGAGRNPGGVVNVGADIKKTMEGPVEGRDTAELPARTSPMPGHPTASPTSSEVQQVPSPVSSEPPKAARPPVTPVLLEKKSPLGQSQPTVAGQPSARPAAEEYGYIVTDQKPLSLAAGVKLLEILAEHVHMSSGSFINISVVGPALTFRIRHNEQNLSLADVTQQAGLVKSELEAQTGLQILQTGVGQREEAAAVLPQTAHSTSPMRSVLLTLVALAGVAGLLVALAVALCVRQHARQQDKERLAALGPEGAHGDTTFEYQDLCRQHMATKSLFNRAEGPPEPSRVSSVSSQFSDAAQASPSSHSSTPSWCEEPAQANMDISTGHMILAYMEDHLRNRDRLAKEWQALCAYQAEPNTCATAQGEGNIKKNRHPDFLPYDHARIKLKVESSPSRSDYINASPIIEHDPRMPAYIATQGPLSHTIADFWQMVWESGCTVIVMLTPLVEDGVKQCDRYWPDEGASLYHVYEVNLVSEHIWCEDFLVRSFYLKNVQTQETRTLTQFHFLSWPAEGTPASTRPLLDFRRKVNKCYRGRSCPIIVHCSDGAGRTGTYILIDMVLNRMAKGVKEIDIAATLEHVRDQRPGLVRSKDQFEFALTAVAEEVNAILKALPQ

SEQ ID NO: 132661 - protein, 162 aa, Artificial Sequence
  derived and/or modified sequence
MRRPRRPGGLGGSGGLRLLLCLLLLSSRPGGCSAVSAHGCLFDRRLCSHLEVCIQDGLFGQCQVGVGQARPLLQVTSPVLQRLQGVLRQLMSQGLSWHDDLTQYVISQEMERIPRLRPPEPRPRDRSGLAPKRPGPAGELLLQDIPTGSAPAAQLLSVPSAG

SEQ ID NO: 132662 - DNA, 2940 bp, Artificial Sequence
  derived and/or modified sequence
atgagaaggccgcgaaggcctgggggcctggggggcagcgggggcctccgtttactcctctgtttgctgctgctgagctccagacctgggggatgcagcgctgtcagcgcacacgggtgtctgtttgacaggcggctgtgcagccacctcgaagtctgcatccaggatggcctctttggccaatgtcaggtgggagtggggcaggcaagacctttgcttcaggtgacctcccctgtactgcagcgtctgcagggggtgttaaggcagctgatgagtcaggggctgagttggcatgatgacttgacccagtacgtgataagccaggaaatggaaagaatacctcgactccgtccaccagagccacgcccacgcgacaggagcggccttgcacccaagaggcctggacccgccggagaacttctgcttcaggatatacccacaggttctgctccagcagcgcagcaccgtctccctcaacctccagtgggcaaagggggtgcaggggcctcttctagcctttccccactccaggccgagctgctgccacccctactagaacacttgctgctgccaccacagcctccgcatccttcactctcttacgagcctgccctcctgcagccttacttgtttcaccagtttggctctcgcgatggctctcgggtttccgaaggatcacctgggatggtttctgttggccctctgccaaaggccgaagcccctgcgctcttcagccgcacagcaagcaaggggattttcggggaccatcccggccactcttacggggaccttcccggtccttcccctgcgcagctatttcaagatagtgggctgctttaccttgcccaggaacttccagccccctcccgcgctagagtgccacgtctccctgagcaggggtcgagctcacgggccgaggatagccccgaggggtacgagaaagagggactgggcgacaggggagaaaagcctgcttcccctgccgtgcagcctgatgctgctctccagagactcgctgctgttctagcaggatatggcgtggagctgaggcagctcacacctgaacagctttcgactttgctgacgttattgcagctgctgccgaaaggcgctggaaggaatcccgggggtgttgtgaacgtgggggctgatatcaagaagactatggaaggccccgtggaaggccgggatacagccgagcttcctgccagaacttccccaatgccggggcatccgaccgctagtcccacgtcttcggaggtccagcaggtgccctctccggtgtcttccgagccaccaaaagctgctcgccccccggtgactccggtgctgctggaaaagaaatctccgctcggccagagtcagcccacagtggccggacagccaagcgcgaggcctgctgccgaggaatacggatacatagtgaccgaccaaaagcccctcagcctggccgcaggcgttaagctactggaaattctcgcagaacatgttcacatgagtagcggatccttcatcaacatttccgtggtcggtccagcacttacattccggatcagacataacgaacagaacctctctctagccgatgtgacacaacaggcaggtctggtgaagtcggaactcgaggctcagacagggctgcagattctgcagaccggggtcgggcaacgcgaggaggctgcggctgttctgccacagacggctcacagtaccagtccaatgcgctcggtgctcttgactcttgtagctctcgctggggtggccggactcctcgtggccctggcagtcgccctgtgcgtgaggcaacatgcacgacagcaggacaaagagagattagcagccctcggtccggagggtgcccatggcgatacgacgtttgaatatcaggatctctgtcggcagcatatggctacgaagagcttgtttaacagggctgagggccccccagagccgtcccgcgtttcttcagtgtcaagccaattcagcgatgcagcacaagcatcccctagctcacactcctcaacgccctcttggtgcgaggaaccagcacaggctaacatggacatttccaccggacacatgatacttgcttatatggaagaccacctgaggaaccgggatcgcctggctaaggagtggcaagccttgtgtgcttaccaagcagaacccaacacctgtgctacggcacaaggcgagggcaatattaagaagaacaggcacccggactttttgccgtatgatcatgcacgtatcaaacttaaagttgaaagctccccgtcccggtctgattacatcaacgcttctcctatcattgaacacgacccaagaatgcccgcctacatcgctactcaagggcccctgtctcataccatcgcggatttttggcagatggtatgggagtctgggtgcaccgtgatcgtgatgttgacccccctggtggaagacggggtaaagcagtgtgaccgctactggccagatgagggggccagcctttatcatgtctatgaagtaaacctggtgtcagaacatatatggtgtgaggattttctggtcagatccttctatttgaaaaacgtccagactcaggaaactcgtactctgacccagtttcattttctttcatggcccgccgaaggcactcctgcttccaccagacccctacttgatttccggcgaaaggttaacaaatgttacagaggacgctcctgtcctatcatagtgcactgcagtgacggggcaggacgtactggcacttatattctcatcgatatggtgctcaataggatggcaaaaggcgtcaaagaaattgacatagcagccacgcttgagcacgtgcgcgaccagcggccaggcctggtgcggtctaaagaccagttcgagtttgctctaactgctgttgccgaggaggtcaacgctatactaaaagccctgccgcagtag

SEQ ID NO: 132663 - DNA, 2940 bp, Artificial Sequence
  derived and/or modified sequence
atgaggcggcccaggaggcctgggggcctgggcggcagcggcggcctgcggctgctgctgtgcctgctgctgctgagcagcaggcctgggggctgcagcgctgtgtctgcccacggctgcctgtttgaccggcggctgtgcagccacctggaggtgtgcatccaggacggcctgtttggccagtgccaggtgggcgtgggccaggcccggcccctgctgcaggtgaccagccctgtgctgcagaggctgcagggcgtgctgcggcagctgatgagccagggcctgtcctggcatgatgacctgacccagtatgtgatcagccaggagatggagcgcatcccccggctgcggcccccagagccccggccccgggacagaagtggcctggcccccaagaggcctggccctgctggggagctgctgctgcaggacatccccactggaagtgccccagctgcccagcaccggctgccccagccccctgtgggcaagggcggggccggggccagcagcagcctgagccccctgcaggccgagctgctgccccccctgctggagcacctgctgctgcccccccagcccccccaccccagcctgtcctatgagcccgccctgctgcagccctacctgttccaccagtttggcagcagagatggcagccgggtgtctgagggcagccctggcatggtgtctgtgggccccctgcccaaggccgaggccccagccctcttcagcaggacagccagcaagggcatctttggagaccaccctggccacagctatggagacctgcccggccccagccctgcccagctgttccaggacagcggcctgctgtacctggcccaggagctgcctgcccccagccgggcccgggtgccccggctgcctgagcagggcagcagcagcagagctgaggacagccctgagggctatgagaaggagggcctgggggacagaggagagaagccagccagccctgctgtgcagccagatgctgccctgcagaggctggccgctgtgctggccggctatggagtggagctgcggcagctgaccccagagcagctgagcaccctgctgaccctgctgcagctgctgcccaagggagctggaagaaatcctggaggagtggtgaatgtgggcgctgacatcaagaagaccatggagggccctgtggagggccgggacacagctgagctgcctgcccggaccagccccatgcctggccaccccacagccagccccaccagcagcgaggtgcagcaggtgcccagccctgtgagcagcgagccccccaaggccgcccggccccctgtgacccctgtgctgctggagaagaagagccccctgggccagagccagcccaccgtggccggccagcccagcgcccggcctgctgctgaggagtatggctacatcgtgacagaccagaagcccctgagcctggccgccggcgtgaagctgctggagatcctggccgagcacgtgcacatgagcagcggcagcttcatcaacatctctgtggtgggccctgccctgaccttccgcatccgccacaatgagcagaacctgagcctggctgatgtgacccagcaggccggcctggtgaagtctgagctggaggcccagacaggcctgcagatcctgcagacaggagtgggccagcgggaggaggccgctgctgtgctgccccagacagcccacagcaccagccccatgaggtctgtgctgctgaccctggtggccctggccggcgtggccggcctgctggtggccctggccgtggccctgtgtgtgcggcagcacgcccggcagcaggacaaggagcggctggccgccctgggccctgagggcgcccatggagacaccacctttgagtaccaggacctgtgccggcagcacatggccaccaagagcctcttcaacagagctgagggccccccagagcccagccgggtgtcctctgtgagcagccagttcagtgatgctgcccaggccagccccagcagccacagcagcacccccagctggtgtgaggagcccgcccaggccaacatggacatcagcacaggccacatgatcctggcctacatggaggaccacctgaggaacagagaccggctggccaaggagtggcaggccctgtgtgcctaccaggccgagcccaacacctgtgccacagcccagggcgagggcaacatcaagaagaacagacacccagacttcctgccctatgaccacgcccgcatcaagctgaaggtggagagcagccccagcagaagtgactacatcaatgccagccccatcattgaacatgaccccaggatgcctgcctacatcgccacccagggccccctgagccacaccatcgctgacttctggcagatggtgtgggagagcggctgcaccgtcatcgtgatgctgacccccctggtggaggatggagtgaagcagtgtgaccgctactggccagatgagggcgccagcctgtaccacgtgtatgaggtgaacctggtgtctgagcacatctggtgtgaggacttcctggtgcgctccttctacctgaagaatgtgcagacccaggagaccaggaccctgacccagttccacttcctgtcctggccagctgagggcaccccagccagcacccggcccctgctggacttccggaggaaggtgaacaagtgctaccggggccgcagctgccccatcatcgtgcactgcagtgatggagctggccgcacaggcacctacatcctgattgacatggtgctgaacaggatggccaagggcgtgaaggagattgatattgctgccaccctggagcacgtgcgggaccagaggcctggcctggtgcgcagcaaggaccagtttgaatttgccctgacagctgtggccgaggaggtgaatgccatcctgaaggccctgccccagtag

SEQ ID NO: 132664 - DNA, 2940 bp, Artificial Sequence
  derived and/or modified sequence
atgcggcggccccggcggcccggcggcctgggcggcagcggcggccttcgactcctgttgtgcttactgctgttgagttctcggcctggaggttgctccgcggtgagcgcacacggctgccttttcgaccggagactgtgcagccacctggaggtctgcatccaggacggactgttcggccaatgtcaggttggcgtaggtcaggccagacccttactgcaggtcacgagcccagtgctgcagcggctgcagggggttcttcgacagctcatgagccagggcctatcttggcacgatgatctgacacagtacgtgatctctcaagagatggagcggattcccaggctccgccctccagagcctcgccctcgggatcgaagcggactggcgccgaagcgcccaggccccgctggtgaattattattacaagacatccctacaggtagcgctcctgctgcgcaacaccgtttaccgcaaccaccggtgggcaagggcggagcaggggcttcttcctcgctcagtccccttcaagccgaactcctcccacctctgctcgaacacctcctgctgcccccccagcctccccatccgtctcttagctacgagcctgcccttttgcagccatacctcttccatcagtttggatctcgcgatggctctagagtgtcagagggatcacccggaatggtgtccgtaggcccgttacctaaggcagaagctccggcactattttctcgtactgcgagtaaagggattttcggtgatcaccctggtcattcctacggggacctgcccggccctagtcccgcccagctgttccaggactctggtctgctttacctggcacaggaactccctgccccgagtagagccagggtgccgcggttgccagagcagggctcttcatccagggcggaagactcacctgaagggtacgagaaggagggactgggtgaccgcggcgaaaaacctgcgagtccggcagtgcagccagacgccgcccttcaaagactcgccgccgtgctggccgggtatggcgttgagctaaggcagttgaccccagaacaactctcaactctgctgaccctgttgcagctgcttccgaaaggtgccggaaggaaccctggcggagttgtgaatgtaggcgccgacattaaaaagacaatggagggccctgtggagggaagggacactgctgagctaccagctcggactagccccatgcccggccatcctacagcaagtccgacaagcagtgaagtgcagcaggtcccttctccagtgtcttccgaaccgcccaaagctgccagacccccagtcactcccgtgctgctggagaaaaaatctcctctgggacagagccagccgaccgtcgccggtcagccctctgcgcgccccgccgcagaggaatacggatatatagtgactgaccaaaaaccactctctctcgccgcaggtgtcaagcttttggagattcttgccgaacatgtgcacatgtcttctggcagttttatcaacatctcggtggtgggacccgcgctcactttcagaatccgacataacgagcagaacttgagcctggctgatgtcacccagcaggcgggactggtgaaaagcgagcttgaggcccagacaggcctgcagattttacagactggagtgggacaaagagaagaggctgctgctgtgctgccccagacggcgcacagtaccagccctatgaggagcgttcttctaacgctggtggcccttgccggtgtggcgggactgctggtcgccctagccgtggcgctctgtgtcagacaacatgctagacagcaggataaagagcgccttgctgccctgggaccggagggggcccacggagacacaacttttgaatatcaagatttgtgcaggcagcacatggccaccaaatcactgtttaaccgtgccgagggtccgcctgaaccttctcgggtgagtagcgtatcaagccaattttctgacgccgcgcaagctagcccgagttcacattctagtaccccatcctggtgtgaagagcctgcgcaggcgaatatggacatttccacgggacatatgatcctggcctatatggaagaccacctgaggaatcgggatcggctggctaaagaatggcaggctctgtgcgcctaccaagcagagcccaacacctgcgccaccgcccaaggagaggggaacatcaagaagaatcgccatccggacttcctgccttatgatcatgctaggatcaaactgaaggtcgagtcctctcctagcaggagcgattacatcaatgccagccctatcatcgaacacgaccctcggatgcctgcttatattgccacacagggtcctctaagccatactatcgccgatttttggcagatggtgtgggaatccgggtgtacagttattgtgatgttgactcccctggtggaggatggggtcaagcagtgcgataggtattggccggatgaaggcgcctcactttatcacgtgtatgaggtgaatcttgtgtccgaacacatttggtgtgaggatttcttggttagaagtttttatttgaaaaatgtgcagacccaggagacgcggacactcacccagttccatttcctgtcctggccagcggagggaactcctgccagtaccagacctctccttgactttaggaggaaagtaaacaagtgctatagaggcaggtcgtgtcctatcatagtccattgttctgatggcgctgggagaactggtacgtatatcctgattgatatggtgttgaatcgcatggccaagggggttaaggagattgatatcgctgctacgttagagcacgtccgggatcagagacctggtctagttcgtagtaaggaccaattcgagttcgcgctgaccgccgttgccgaggaggtgaatgccattttgaaggctctcccacagtag

SEQ ID NO: 132665 - DNA, 2940 bp, Artificial Sequence
  derived and/or modified sequence
atgcgcaggcccaggcgcccagggggacttggcggatctggaggtctccgcttgctgttgtgtttgctgttactctcatccaggcccggaggctgcagcgctgtctcagctcatggttgtctgttcgataggagactttgcagccaccttgaggtgtgcatccaagatggactcttcggccagtgccaggtgggcgtgggccaggctagaccgctcttgcaggttacctcaccagttttgcagcgtctccagggagtactgcgacagttaatgagccagggactctcttggcatgacgatctgacgcagtatgtcatctcacaggaaatggaacggatccccaggctccgtccacccgaacctagaccaagagaccgatctggactggctccgaagagaccgggacctgcaggcgaactgctgctgcaggatatcccaacagggtccgctcccgcagctcaacataggctgccgcagcctccagttgggaagggcggagctggagcttctagtagcctttccccgctacaggcagagctgctgcctccactgcttgagcaccttttgcttcccccacagcctcctcacccttcactatcctatgagcctgctctgcttcagccatatttgttccaccagttcggcagcagggacggctcgagagtgtcagaagggagccccggaatggtgagcgtaggcccactccctaaagccgaagctcccgcactgttctctagaactgccagcaaaggaattttcggcgaccaccccggtcattcatatggggatttgcctgggccaagtcccgcacaacttttccaggattccgggttgctgtatctggctcaagaactgccagccccttccagagctagggtacctaggctgcccgagcaggggagctcgagccgcgcagaggattctcccgagggatacgaaaaggagggcctcggtgacaggggtgagaagccagcatctcctgcagtccagcctgacgctgctcttcagaggctcgcagcagtcctggcaggctatggtgtcgagctgagacagctgacccctgaacagctgagcacactgcttaccctccttcaactgctgcccaaaggagccggacgaaatcccggaggagtggtgaatgtaggagcagacattaagaagaccatggagggccctgtcgaaggtagggacactgctgagctccccgctcggacttcaccgatgcctgggcatccgactgctagccccacttccagcgaggtacagcaggtgccatccccagtgagcagcgagccccctaaggcagctagacctcctgtgacccccgtcctgctggagaagaaaagcccgctgggccagtcacagccgacagtcgccggacaacctagtgcccgacctgcggcagaagaatacgggtatattgtgacggatcagaaacccctttccttagcggctggcgtgaaacttttggaaatcttggctgagcacgtgcacatgtcttcgggctcctttattaacatctctgtggtgggcccagcacttacatttcgcatacgccataatgagcagaacctgtctctggctgatgtgacacaacaggccggacttgttaagtccgagctcgaggcacagaccggcctacagattttgcagaccggcgtgggacagagggaggaagccgctgcggttctgccacagaccgctcactcaacaagcccaatgcgaagcgtgctcttgaccctcgttgccctcgcaggggtcgccggattacttgtggctctggccgtggccctgtgtgtacgacagcacgcacggcagcaagataaggaacgcctcgccgctctagggcctgagggggcacatggagacactacctttgagtaccaggatctgtgccgccagcatatggcaactaaatccctgttcaatagagccgaaggaccaccagaaccttctcgagtgagcagtgtcagttcacagttctcagacgccgctcaggcatctccgtcctcgcactctagcaccccgagttggtgtgaggagcctgctcaggctaatatggatatatcaacagggcacatgatcctggcttatatggaagaccatctcaggaatcgagatcgtctggctaaagagtggcaggccctgtgcgcctatcaggccgagccgaatacgtgtgctacggctcagggggagggcaatattaagaagaatcggcaccccgactttctcccatatgatcatgctaggataaagctgaaggtagaaagctccccaagtcgtagcgattatatcaacgctagcccaatcatcgagcacgaccctagaatgcccgcttacatagccacccagggcccattatcgcacaccattgcggacttctggcagatggtgtgggagagcggttgtaccgtcatcgtgatgcttactccactggttgaggacggcgtgaagcagtgcgacaggtactggccagacgaaggagccagtctgtaccacgtttacgaagtgaacctggtgtcggaacatatttggtgcgaagattttctggtccgctccttctatctcaaaaacgtccagacccaggagactaggacacttacccagttccacttcctgagctggcctgcggagggaaccccagctagcacgcgtcctctactggatttccggaggaaggttaacaagtgctaccgaggacgttcttgccccataatcgtccattgttctgatggagcaggacggactggcacttacattcttatagatatggtcctaaacaggatggccaaaggcgtgaaggaaatcgatatcgcagctacgctcgagcacgtacgcgatcagagacccggattggtcaggtcaaaagatcaattcgagtttgccttgaccgcagtggccgaggaggtgaacgcaatactgaaggccctgccccagtag

SEQ ID NO: 132666 - DNA, 3784 bp, Artificial Sequence
  derived and/or modified sequence
aggtaggtcccccgctccgacagggctcttacgccatatgtgacgcaaattagcttacgagccgggggtggaggtgtcgtcagcacccgcctgcggttggccgcgttgcagcgagaggggcatgtagaccccgcctcgtagggaggtggggagcggcaagccccgcctcagcccctctggcaggctcccgccagcgtcgctgcggctccggcccgggagcgagcgcccggagctcggaaagatgcggcgcccgcggcggcctgggggtctcgggggatccgggggtctccggctgctcctctgcctcctgctgctgagcagccgcccggggggctgcagcgccgttagtgcccacggctgtctatttgaccgcaggctctgctctcacctggaagtctgtattcaggatggcttgtttgggcagtgccaggtgggagtggggcaggcccggccccttttgcaagtcacctccccagttctccaacgcttacaaggtgtgctccgacaactcatgtcccaaggattgtcctggcacgatgacctcacccagtatgtgatctctcaggagatggagcgcatccccaggcttcgccccccagagccccgtccaagggacaggtctggcttggcacccaagagacctggtcctgctggagagctgcttttacaggacatccccactggctccgcccctgctgcccagcatcggcttccacaaccaccagtgggcaaaggtggagctggggccagctcctctctgtcccctctgcaggctgagctgctcccgcctctcttggagcacctgctgctgcccccacagcctccccacccttcactgagttacgaacctgccttgctgcagccctacctgttccaccagtttggctcccgtgatggctccagggtctcagagggctccccagggatggtcagtgtcggccccctgcccaaggctgaagcccctgccctcttcagcagaactgcctccaagggcatatttggggaccaccctggccactcctacggggaccttccagggccttcacctgcccagctttttcaagactctgggctgctctatctggcccaggagttgccagcacccagcagggccagggtgccaaggctgccagagcaagggagcagcagccgggcagaggactccccagagggctatgagaaggaaggactaggggatcgtggagagaagcctgcttccccagctgtgcagccagatgcggctctgcagaggctggccgctgtgctggcgggctatggggtagagctgcgtcagctgacccctgagcagctctccacactcctgaccctgctgcagctactgcccaagggtgcaggaagaaatccgggaggggttgtaaatgttggagctgatatcaagaaaacaatggaggggccggtggagggcagagacacagcagagcttccagcccgcacatcccccatgcctggacaccccactgccagccctacctccagtgaagtccagcaggtgccaagccctgtctcctctgagcctcccaaagctgccagaccccctgtgacacctgtcctgctagagaagaaaagcccactgggccagagccagcccacggtggcaggacagccctcagcccgcccagcagcagaggaatatggctacatcgtcactgatcagaagcccctgagcctggctgcaggagtgaagctgctggagatcctggctgagcatgtgcacatgtcctcaggcagcttcatcaacatcagtgtggtgggaccagccctcaccttccgcatccggcacaatgagcagaacctgtctttggctgatgtgacccaacaagcagggctggtgaagtctgaactggaagcacagacagggctccaaatcttgcagacaggagtgggacagagggaggaggcagctgcagtccttccccaaactgcgcacagcacctcacccatgcgctcagtgctgctcactctggtggccctggcaggtgtggctgggctgctggtggctctggctgtggctctgtgtgtgcggcagcatgcgcggcagcaagacaaggagcgcctggcagccctggggcctgagggggcccatggtgacactacctttgagtaccaggacctgtgccgccagcacatggccacgaagtccttgttcaaccgggcagagggtccaccggagccttcacgggtgagcagtgtgtcctcccagttcagcgacgcagcccaggccagccccagctcccacagcagcaccccgtcctggtgcgaggagccggcccaagccaacatggacatctccacgggacacatgattctggcatacatggaggatcacctgcggaaccgggaccgccttgccaaggagtggcaggccctctgtgcctaccaagcagagccaaacacctgtgccaccgcgcagggggagggcaacatcaaaaagaaccggcatcctgacttcctgccctatgaccatgcccgcataaaactgaaggtggagagcagcccttctcggagcgattacatcaacgccagccccattattgagcatgaccctcggatgccagcctacatagccacgcagggcccgctgtcccataccatcgcagacttctggcagatggtgtgggagagcggctgcaccgtcatcgtcatgctgaccccgctggtggaggatggtgtcaagcagtgtgaccgctactggccagatgagggtgcctccctctaccacgtatatgaggtgaacctggtgtcggagcacatctggtgcgaggactttctggtgcggagcttctacctgaagaacgtgcagacccaggagacgcgcacgctcacgcagttccacttcctcagctggccggcagagggcacaccggcctccacgcggcccctgctggacttccgcaggaaggtgaacaagtgctaccggggccgctcctgccccatcatcgtgcactgcagtgatggtgcggggaggaccggcacctacatcctcatcgacatggtcctgaaccgcatggcaaaaggagtgaaggagattgacatcgctgccaccctggagcatgtccgtgaccagcggcctggccttgtccgctctaaggaccagtttgaatttgccctgacagccgtggcggaggaagtgaatgccatcctcaaggccctgccccagtgagaccctggggccccttggcgggcagcccagcctctgtccctctttgcctgtgtgagcatctctgtgtacccactcctcactgccccaccagccacctcttgggcatgctcagcccttcctagaagagtcaggaagggaaagccagaaggggcacgcctgcccagcctcgcatgccagagcctggggcatcccagagcccagggcatcccatgggggtgctgcagccaggaggagaggaaaggacatgggtagcaattctacccagagccttctcctgcctacattccctggcctggctctcctgtagctctcctggggttctgggagttccctgaacatctgtgtgtgtccccctatgctccagtatggaagaatggggtggagggtcgccacacccggctccccctgcttctcagccccgggcctgcctctgactcacacttgggcgctctgccctccctggcctcacgcccagcctcctcccaccaccctcccaccatgcgctgctcaacctctctccttctggcgcaagagaacatttctagaaaaaactacttttgtaccagtgtgaataaagttagtgtgttgtctgtgcagctgcaa

SEQ ID NO: 132667 - DNA, 3313 bp, Artificial Sequence
  derived and/or modified sequence
attgcaggttcgggagaaggacacggggtgcatgtgggcagagggacttagagaccggctgcgagaccacaggagaagccacttgctccgaggcgcctgggaggctgtctatttgaccgcaggctctgctctcacctggaagtctgtattcaggatggcttgtttgggcagtgccaggtgggagtggggcaggcccggccccttttgcaagtcacctccccagttctccaacgcttacaaggtgtgctccgacaactcatgtcccaaggattgtcctggcacgatgacctcacccagtatgtgatctctcaggagatggagcgcatccccaggcttcgccccccagagccccgtccaagggacaggtctggcttggcacccaagagacctggtcctgctggagagctgcttttacaggacatccccactggctccgcccctgctgcccagcatcggcttccacaaccaccagtgggcaaaggtggagctggggccagctcctctctgtcccctctgcaggctgagctgctcccgcctctcttggagcacctgctgctgcccccacagcctccccacccttcactgagttacgaacctgccttgctgcagccctacctgttccaccagtttggctcccgtgatggctccagggtctcagagggctccccagggatggtcagtgtcggccccctgcccaaggctgaagcccctgccctcttcagcagaactgcctccaagggcatatttggggaccaccctggccactcctacggggaccttccagggccttcacctgcccagctttttcaagactctgggctgctctatctggcccaggagttgccagcacccagcagggccagggtgccaaggctgccagagcaagggagcagcagccgggcagaggactccccagagggctatgagaaggaaggactaggggatcgtggagagaagcctgcttccccagctgtgcagccagatgcggctctgcagaggctggccgctgtgctggcgggctatggggtagagctgcgtcagctgacccctgagcagctctccacactcctgaccctgctgcagctactgcccaagggtgcaggaagaaatccgggaggggttgtaaatgttggagctgatatcaagaaaacaatggaggggccggtggagggcagagacacagcagagcttccagcccgcacatcccccatgcctggacaccccactgccagccctacctccagtgaagtccagcaggtgccaagccctgtctcctctgagcctcccaaagctgccagaccccctgtgacacctgtcctgctagagaagaaaagcccactgggccagagccagcccacggtggcaggacagccctcagcccgcccagcagcagaggaatatggctacatcgtcactgatcagaagcccctgagcctggctgcaggagtgaagctgctggagatcctggctgagcatgtgcacatgtcctcaggcagcttcatcaacatcagtgtggtgggaccagccctcaccttccgcatccggcacaatgagcagaacctgtctttggctgatgtgacccaacaagcagggctggtgaagtctgaactggaagcacagacagggctccaaatcttgcagacaggagtgggacagagggaggaggcagctgcagtccttccccaaactgcgcacagcacctcacccatgcgctcagtgctgctcactctggtggccctggcaggtgtggctgggctgctggtggctctggctgtggctctgtgtgtgcggcagcatgcgcggcagcaagacaaggagcgcctggcagccctggggcctgagggggcccatggtgacactacctttgagtaccaggacctgtgccgccagcacatggccacgaagtccttgttcaaccgggcagagggtccaccggagccttcacgggtgagcagtgtgtcctcccagttcagcgacgcagcccaggccagccccagctcccacagcagcaccccgtcctggtgcgaggagccggcccaagccaacatggacatctccacgggacacatgattctggcatacatggaggatcacctgcggaaccgggaccgccttgccaaggagtggcaggccctctgtgcctaccaagcagagccaaacacctgtgccaccgcgcagggggagggcaacatcaaaaagaaccggcatcctgacttcctgccctatgaccatgcccgcataaaactgaaggtggagagcagcccttctcggagcgattacatcaacgccagccccattattgagcatgaccctcggatgccagcctacatagccacgcagggcccgctgtcccataccatcgcagacttctggcagatggtgtgggagagcggctgcaccgtcatcgtcatgctgaccccgctggtggaggatggtgtcaagcagtgtgaccgctactggccagatgagggtgcctccctctaccacgtatatgaggtgaacctggtgtcggagcacatctggtgcgaggactttctggtgcggagcttctacctgaagaacgtgcagacccaggagacgcgcacgctcacgcagttccacttcctcagctggccggcagagggcacaccggcctccacgcggcccctgctggacttccgcaggaaggtgaacaagtgctaccggggccgctcctgccccatcatcgtgcactgcagtgatggtgcggggaggaccggcacctacatcctcatcgacatggtcctgaaccgcatggcaaaaggagtgaaggagattgacatcgctgccaccctggagcatgtccgtgaccagcggcctggccttgtccgctctaaggaccagtttgaatttgccctgacagccgtggcggaggaagtgaatgccatcctcaaggccctgccccagtgagaccctggggccccttggcgggcagcccagcctctgtccctctttgcctgtgtgagcatctctgtgtacccactcctcactgccccaccagccacctcttgggcatgctcagcccttcctagaagagtcaggaagggaaagccagaaggggcacgcctgcccagcctcgcatgccagagcctggggcatcccagagcccagggcatcccatgggggtgctgcagccaggaggagaggaaaggacatgggtagcaattctacccagagccttctcctgcctacattccctggcctggctctcctgtagctctcctggggttctgggagttccctgaacatctgtgtgtgtccccctatgctccagtatggaagaatggggtggagg

SEQ ID NO: 132668 - DNA, 2940 bp, Artificial Sequence
  derived and/or modified sequence
atgagaagacccagaagacccggcggcctgggcggcagcggcggcctgagactgctgctgtgcctgctgctgctgagcagcagacccggcggctgcagcgccgtgagcgcccacggctgcctgttcgacagaagactgtgcagccacctggaggtgtgcatccaggacggcctgttcggccagtgccaggtgggcgtgggccaggccagacccctgctgcaggtgaccagccccgtgctgcagagactgcagggcgtgctgagacagctgatgagccagggcctgagctggcacgacgacctgacccagtacgtgatcagccaggagatggagagaatccccagactgagaccccccgagcccagacccagagacagaagcggcctggcccccaagagacccggccccgccggcgagctgctgctgcaggacatccccaccggcagcgcccccgccgcccagcacagactgccccagccccccgtgggcaagggcggcgccggcgccagcagcagcctgagccccctgcaggccgagctgctgccccccctgctggagcacctgctgctgcccccccagcccccccaccccagcctgagctacgagcccgccctgctgcagccctacctgttccaccagttcggcagcagagacggcagcagagtgagcgagggcagccccggcatggtgagcgtgggccccctgcccaaggccgaggcccccgccctgttcagcagaaccgccagcaagggcatcttcggcgaccaccccggccacagctacggcgacctgcccggccccagccccgcccagctgttccaggacagcggcctgctgtacctggcccaggagctgcccgcccccagcagagccagagtgcccagactgcccgagcagggcagcagcagcagagccgaggacagccccgagggctacgagaaggagggcctgggcgacagaggcgagaagcccgccagccccgccgtgcagcccgacgccgccctgcagagactggccgccgtgctggccggctacggcgtggagctgagacagctgacccccgagcagctgagcaccctgctgaccctgctgcagctgctgcccaagggcgccggcagaaaccccggcggcgtggtgaacgtgggcgccgacatcaagaagaccatggagggccccgtggagggcagagacaccgccgagctgcccgccagaaccagccccatgcccggccaccccaccgccagccccaccagcagcgaggtgcagcaggtgcccagccccgtgagcagcgagccccccaaggccgccagaccccccgtgacccccgtgctgctggagaagaagagccccctgggccagagccagcccaccgtggccggccagcccagcgccagacccgccgccgaggagtacggctacatcgtgaccgaccagaagcccctgagcctggccgccggcgtgaagctgctggagatcctggccgagcacgtgcacatgagcagcggcagcttcatcaacatcagcgtggtgggccccgccctgaccttcagaatcagacacaacgagcagaacctgagcctggccgacgtgacccagcaggccggcctggtgaagagcgagctggaggcccagaccggcctgcagatcctgcagaccggcgtgggccagagagaggaggccgccgccgtgctgccccagaccgcccacagcaccagccccatgagaagcgtgctgctgaccctggtggccctggccggcgtggccggcctgctggtggccctggccgtggccctgtgcgtgagacagcacgccagacagcaggacaaggagagactggccgccctgggccccgagggcgcccacggcgacaccaccttcgagtaccaggacctgtgcagacagcacatggccaccaagagcctgttcaacagagccgagggcccccccgagcccagcagagtgagcagcgtgagcagccagttcagcgacgccgcccaggccagccccagcagccacagcagcacccccagctggtgcgaggagcccgcccaggccaacatggacatcagcaccggccacatgatcctggcctacatggaggaccacctgagaaacagagacagactggccaaggagtggcaggccctgtgcgcctaccaggccgagcccaacacctgcgccaccgcccagggcgagggcaacatcaagaagaacagacaccccgacttcctgccctacgaccacgccagaatcaagctgaaggtggagagcagccccagcagaagcgactacatcaacgccagccccatcatcgagcacgaccccagaatgcccgcctacatcgccacccagggccccctgagccacaccatcgccgacttctggcagatggtgtgggagagcggctgcaccgtgatcgtgatgctgacccccctggtggaggacggcgtgaagcagtgcgacagatactggcccgacgagggcgccagcctgtaccacgtgtacgaggtgaacctggtgagcgagcacatctggtgcgaggacttcctggtgagaagcttctacctgaagaacgtgcagacccaggagaccagaaccctgacccagttccacttcctgagctggcccgccgagggcacccccgccagcaccagacccctgctggacttcagaagaaaggtgaacaagtgctacagaggcagaagctgccccatcatcgtgcactgcagcgacggcgccggcagaaccggcacctacatcctgatcgacatggtgctgaacagaatggccaagggcgtgaaggagatcgacatcgccgccaccctggagcacgtgagagaccagagacccggcctggtgagaagcaaggaccagttcgagttcgccctgaccgccgtggccgaggaggtgaacgccatcctgaaggccctgccccagtag

SEQ ID NO: 132669 - protein, 1015 aa, Artificial Sequence
  derived and/or modified sequence
MGPPLPLLLLLLLLLPPRVLPAAPSSVPRGRQLPGRLGCLLEEGLCGASEACVNDGVFGRCQKVPAMDFYRYEVSPVALQRLRVALQKLSGTGFTWQDDYTQYVMDQELADLPKTYLRRPEASSPARPSKHSVGSERRYSREGGAALANALRRHLPFLEALSQAPASDVLARTHTAQDRPPAEGDDRFSESILTYVAHTSALTYPPGSRTQLREDLLPRTLGQLQPDELSPKVDSGVDRHHLMAALSAYAAQRPPAPPGEGSLEPQYLLRAPSRMPRPLLAPAAPQKWPSPLGDSEDPSSTGDGARIHTLLKDLQRQPAEVRGLSGLELDGMAELMAGLMQGVDHGVARGSPGRAALGESGEQADGPKATLRGDSFPDDGVQDDDDRLYQEVHRLSATLGGLLQDHGSRLLPGALPFARPLDMERKKSEHPESSLSSEEETAGVENVKSQTYSKDLLGQQPHSEPGAAAFGELQNQMPGPSKEEQSLPAGAQEALSDGLQLEVQPSEEEARGYIVTDRDPLRPEEGRRLVEDVARLLQVPSSAFADVEVLGPAVTFKVSANVQNVTTEDVEKATVDNKDKLEETSGLKILQTGVGSKSKLKFLPPQAEQEDSTKFIALTLVSLACILGVLLASGLIYCLRHSSQHRLKEKLSGLGGDPGADATAAYQELCRQRMATRPPDRPEGPHTSRISSVSSQFSDGPIPSPSARSSASSWSEEPVQSNMDISTGHMILSYMEDHLKNKNRLEKEWEALCAYQAEPNSSFVAQREENVPKNRSLAVLTYDHSRVLLKAENSHSHSDYINASPIMDHDPRNPAYIATQGPLPATVADFWQMVWESGCVVIVMLTPLAENGVRQCYHYWPDEGSNLYHIYEVNLVSEHIWCEDFLVRSFYLKNLQTNETRTVTQFHFLSWYDRGVPSSSRSLLDFRRKVNKCYRGRSCPIIVHCSDGAGRSGTYVLIDMVLNKMAKGAKEIDIAATLEHLRDQRPGMVQTKEQFEFALTAVAEEVNAILKALPQ

SEQ ID NO: 132670 - DNA, 3048 bp, Artificial Sequence
  derived and/or modified sequence
atgggtcctccattacccctgctgctgctgctcttgcttctactgcctccacgagtgttacctgccgccccctcatctgttccaaggggcagacaactgccaggtcgtttgggctgcctcctggaagaaggtctctgcggagctagcgaggcttgtgtcaatgacggtgttttcgggaggtgtcaaaaggtacccgctatggacttctacagatatgaagtgagccctgtggcgctgcagcgcctgagggtggctctgcagaaactgtctgggaccggttttacctggcaggacgactacactcaatatgtgatggaccaagagctggctgatcttccgaagacctaccttagacgccccgaagcctcctctcccgccaggcctagcaaacactcagtcggtagcgagcgaagatactctagagaaggcggtgcagccttggccaatgccctaaggaggcacctgccctttctggaagccttgagtcaagcaccggcatccgatgttctagcacggacacacactgcacaagatagacctccagcagagggcgacgatagattcagcgagagtatcctcacatatgtggcacacacctcagctctgacttacccacccgggtcgcggacacagctgcgggaggatcttctgcccaggaccttgggccagcttcagcctgacgagttgtctccaaaagtcgactctggagttgacagacatcacctcatggctgctctttctgcatatgccgcccagagaccgcccgccccccccggcgagggatcactggaaccccagtacctgcttcgcgccccctctcgaatgcctaggccactcctggcccccgccgccccacagaaatggccaagtccactaggcgacagcgaggatccctctagtactggtgatggcgctaggatccacaccttacttaaagatctgcaaaggcagccggccgaagtccggggacttagcggcttggaacttgatggcatggctgaactcatggcaggtctgatgcagggggtggaccatggtgtggcgagaggatcaccaggacgagcagccctaggggagtcaggagagcaagcagacggacccaaagccacgctaaggggggactccttccctgacgatggagtacaagacgatgatgaccgtctgtaccaggaagtgcatcgactgtcagcaacgctcggcggactcctgcaggaccacggatccagactgttgccaggagcgctgcccttcgcgcgtccgctggacatggagagaaagaagagcgagcaccctgagtcatctctgagctcagaggaggaaacagcaggagtagagaacgtgaagtcccagacatattccaaggatctcctcgggcagcagccccacagtgaaccaggggcagcagccttcggcgaactgcagaatcagatgccaggacccagtaaggaagaacagtctctgccagcaggtgcccaagaggctctgtcagacggcttgcagctggaagtgcagccatctgaagaagaggccaggggttacatcgtaacagacagggacccgctgagacccgaggagggtcgcaggttagttgaagatgtcgcacgcctgctgcaagtgccttcaagtgccttcgccgacgtggaggtcctggggccagctgtaaccttcaaagtttccgctaacgtgcagaatgtaactacggaagacgtggagaaggctaccgtggataataaggacaagttggaagaaacttcaggattgaaaatccttcagacgggggtgggttcaaaatccaagcttaaattcctccccccacaagcagagcaggaggactccaccaagttcatcgcattaacattagtcagtctcgcttgcatcctgggcgtgctactcgcttccgggctgatttactgcctgcggcattccagtcagcatagattgaaagaaaaactgagcgggttgggaggcgaccctggcgccgatgctactgctgcttaccaggagctctgtcgtcagcgaatggctacccggccgccggatcggccagagggaccacatacctctcggatttcgagcgtgtcgtcacagtttagcgacggacctattccatctccctccgctagatcttccgcgagctcctggtctgaggagcctgtccaaagtaacatggacataagcaccggccacatgatcctgagctatatggaggaccacctaaagaacaagaataggctagagaaggagtgggaagccctgtgtgcatatcaagctgagcccaatagctccttcgtggcgcaacgcgaagagaatgtgccaaagaatagatcgcttgcggtactcacatacgatcactctcgggtgctgctgaaggcagagaattctcattctcacagcgattatattaatgcttcgcccattatggatcatgaccctagaaatcctgcctacatcgcaacacaggggccccttcctgccaccgtggccgatttctggcagatggtttgggaatctggctgcgtcgtgatcgtgatgctcacccctctggcagagaatggtgtccgacagtgctaccactactggccagacgagggaagcaacctttaccatatctacgaggtcaacctagtctccgagcacatctggtgtgaagactttctggtgaggagtttctatctcaagaacttgcagactaacgaaacccggacggtcacacagtttcatttcctgtcgtggtacgacaggggagtgccctcctcttccagatctctgctagattttaggcgcaaggtaaataagtgctaccgtggacgctcttgtcctataattgtgcattgttcagacggcgcagggcgaagtgggacgtacgtcctgatcgacatggtcctgaataagatggccaagggagctaaagaaattgatattgccgccactttagaacatctcagggaccaacggccaggcatggtccaaaccaaggaacagttcgagttcgccttgacagcagtagccgaggaggtgaacgccatcctcaaggctctccctcagtag

SEQ ID NO: 132671 - DNA, 3048 bp, Artificial Sequence
  derived and/or modified sequence
atgggcccccccctgcccctgctgctgctgctgctgctgctgctgcccccccgggtgctgcctgctgcccccagctctgtgccccggggccggcagctgcccggccgcctgggctgcctgctggaggagggcctgtgtggggccagcgaggcctgtgtgaatgatggagtgtttggccgctgccagaaggtgcctgccatggacttctaccgctatgaggtgtcccctgtggccctgcagaggctgcgggtggccctgcagaagctgagcggcaccggcttcacctggcaggatgactacacccagtatgtgatggaccaggagctggccgacctgcccaagacctacctgcggcggcctgaggccagcagccctgcccggcccagcaagcacagcgtgggcagcgagcggcgctacagccgggagggcggggccgccctggccaatgccctgcggcggcacctgcccttcctggaggccctgagccaggccccagccagtgatgtgctggcccggacccacacagcccaggaccggcccccagcagaaggagatgaccgcttcagcgagagcatcctgacctacgtggcccacaccagcgccctgacctacccacctggcagcaggacccagctgcgggaggacctgctgcccaggaccctgggccagctgcagccagatgagctgagccccaaggtggacagcggcgtggacagacaccacctgatggccgccctgagcgcctatgctgcccagaggcccccagcccctcctggagagggcagcctggagccccagtacctgctgcgggcccccagcaggatgccccggcccctgctggccccagctgccccccagaagtggcccagccccctgggggacagcgaggaccccagcagcactggagatggagcccgcatccacaccctgctgaaggacctgcagaggcagcctgctgaggtgcggggcctgagcggcctggagctggatggcatggccgagctgatggccggcctgatgcagggcgtggaccatggagtggcccggggcagccctggccgggccgccctgggggagagcggggagcaggctgatggccccaaggccaccctgcggggggacagcttcccagatgatggagtgcaggatgatgatgaccggctgtaccaggaggtgcaccggctgagcgccaccctgggcggcctgctgcaggaccacggcagccggctgctgcccggggccctgccctttgcccggcccctggacatggagaggaagaagtctgagcaccctgagagcagcctgagcagcgaggaggagacagctggggtggagaatgtgaagagccagacctacagcaaggacctgctgggccagcagccccacagcgagcctggagctgctgccttcggggagctgcagaaccagatgcctggccccagcaaggaggagcagagcctgcctgctggggcccaggaggccctgagtgatggcctgcagctggaggtgcagcccagcgaggaggaggcccggggctacatcgtgacagaccgggaccccctgcggcctgaggagggccgccgcctggtggaggatgtggcccggctgctgcaggtgcccagcagcgcctttgctgatgtggaggtgctgggccctgctgtgaccttcaaggtgtctgccaacgtgcagaatgtgaccacagaagatgtggagaaggccaccgtggacaacaaggacaagctggaggagaccagcggcctgaagatcctgcagacaggagtgggcagcaagagcaagctgaagttcctgcccccccaggccgagcaggaggacagcaccaagttcatcgccctgaccctggtgtccctggcctgcatcctgggcgtgctgctggccagcggcctcatctactgcctgcggcacagcagccagcaccggctgaaggagaagctgagcggcctgggcggggaccccggggctgatgccacagctgcctaccaggagctgtgccggcagaggatggccacccggcccccagacaggcctgagggcccccacaccagccgcatcagctctgtgagcagccagttcagtgatggccccatccccagccccagcgcccggagcagcgccagctcctggagcgaggagcctgtgcagagcaacatggacatcagcacaggccacatgatcctgagctacatggaggaccacctgaagaacaagaaccggctggagaaggagtgggaggccctgtgtgcctaccaggccgagcccaacagcagctttgtggcccagcgggaggagaatgtgcccaagaacagaagcctggccgtgctgacctatgaccacagccgggtgctgctgaaggccgagaacagccacagccacagcgactacatcaatgccagccccatcatggaccatgaccccaggaacccagcctacatcgccacccagggccccctgcctgccaccgtggccgacttctggcagatggtgtgggagagcggctgtgtggtgattgtgatgctgacccccctggccgagaatggagtgcggcagtgctaccactactggccagatgagggcagcaacctgtaccacatctatgaggtgaacctggtgtctgagcacatctggtgtgaggacttcctggtgcgctccttctacctgaagaacctgcagaccaatgagaccaggacagtgacccagttccacttcctgtcctggtatgacagaggagtgcccagcagcagccgcagcctgctggacttccggaggaaggtgaacaagtgctaccggggccgcagctgccccatcatcgtgcactgcagtgatggagctggccgcagcggcacctacgtgctgattgacatggtgctgaacaagatggccaagggggccaaggagattgatattgctgccaccctggagcacctgcgggaccagaggcctggcatggtgcagaccaaggagcagtttgaatttgccctgacagctgtggccgaggaggtgaatgccatcctgaaggccctgccccagtag

SEQ ID NO: 132672 - DNA, 3048 bp, Artificial Sequence
  derived and/or modified sequence
atgggcccccccctgcccctgctgctgctgctgctgctgctgctgcctccgagagtgctacctgccgctcccagctccgtgcccaggggtaggcaactgcccgggcgcctcggctgcctcctagaagaagggctgtgtggggcaagcgaggcatgtgtgaacgatggcgtgtttggtaggtgccagaaggtgccggccatggacttttataggtatgaagtatccccagtcgccctgcagcggcttagggtggctctgcagaagctgagtgggacgggattcacttggcaggacgattatacgcagtacgttatggaccaagagctggcagacctgccaaaaacgtatctccgacgccctgaggcttcctccccggcaaggccatcaaaacacagcgtgggatcagaacggagatacagtcgggagggaggggccgcgctggctaacgcactccgcagacatttgccattcctggaggccctgagccaagcgccggcttcagatgtgttggcccgcacacatactgcccaggatcgaccccccgctgaaggcgacgatagattctctgagagtattctgacttatgtggcacacaccagcgccctcacctatccacccggctccagaactcagcttcgcgaggatctgctgccaaggacactggggcaattgcagcccgatgaattatcccccaaagtggattctggagtcgatcgacaccatctcatggctgctctcagcgcgtatgccgcgcagcgaccccccgccccccccggtgaaggctcactagagccacagtatctacttcgggccccaagtcgaatgccacggccactgctcgcgcctgccgcacctcagaaatggccatctccccttggcgactccgaagacccgtcgtcaactggggacggcgcccggatccacaccttgctgaaggacctgcagcgtcagcccgccgaagtgcgaggccttagcgggttagagctcgatggcatggccgagctcatggcgggcctaatgcagggtgtcgaccacggtgtcgcaagagggagtcccggcagagccgctctgggggagtcaggggagcaggcagacgggccaaaggccaccctgaggggggattcattccccgatgacggggtgcaagacgacgatgacagactatatcaggaggtacatcgcctctcagcaaccctggggggtcttctacaggaccacggatccagattattacccggcgccctgccatttgctcgccctctggatatggagagaaagaaaagcgagcacccagagtccagccttagtagcgaagaagagacggctggagtggagaacgttaaatcgcaaacctactcaaaagacctgttaggtcagcagcctcatagtgaacccggtgccgcagccttcggtgagctacagaaccaaatgcccggcccatctaaagaagaacagagtctgccagcaggagcccaagaagccctttcagacggactacaactggaggtgcaacccagtgaggaagaagccagaggctatatagttaccgaccgagatcctctccgacctgaggaagggaggagactcgtggaggatgtcgcccgacttttgcaagtgccatctagtgcctttgccgatgtcgaagtcttgggtccagccgtgacctttaaggtgtccgcaaacgtgcagaatgttacgaccgaagatgtcgagaaagccaccgttgacaataaggacaaactggaggagacgtctggtctcaaaattctccaaacaggggtgggttccaagtcaaagctgaaattcctccctccacaagccgaacaggaagattccactaagtttatagcccttactttggtgagccttgcctgcatcctgggagtgctgctggccagcggcctaatctactgcctgagacattcttctcagcatagactaaaagagaagctcagcggcctggggggcgaccccggcgccgacgccacagccgcctaccaggagttgtgtcggcaacgaatggcaacacgcccacctgacagacctgagggacctcatacttcaagaatctcaagcgtctcatctcaattttcggatggaccaatcccctctccgagcgctcgaagctctgcctcgagttggtccgaggaacctgtgcagtctaacatggatatcagtaccgggcatatgatcctctcgtatatggaggatcacctgaaaaataaaaataggttggaaaaagaatgggaagccctgtgtgcctatcaggcagagccgaactcctcctttgtagcccagcgcgaagaaaatgtgccaaaaaaccgatcactggccgtactaacatatgaccactctcgcgtcctattgaaggccgaaaactcacacagtcatagtgactacattaatgcatccccaatcatggaccatgatccacggaaccctgcctatatcgccactcagggccctctcccagccacagtagccgatttctggcagatggtctgggagagtgggtgcgtggtgattgtgatgctgacccctctggctgagaatggagtgaggcagtgctatcactactggcccgacgaggggagtaacttgtatcatatatatgaagtgaatctcgtaagcgagcatatctggtgcgaagattttctggtgcggtcattctacctgaaaaacctgcagaccaatgagacacggacagtcacccagttccattttctttcatggtatgacagaggggtgccatcatcatccaggtcattgcttgatttccggcgaaaggttaacaagtgttaccggggacggtcgtgtccgattatcgtacactgctcggatggggcgggcagaagtggaacgtacgtgctgatcgacatggtattgaataaaatggcaaagggggccaaggaaatagacatcgcagcaactcttgaacatctccgagatcaaaggcccggcatggtgcagaccaaagagcagtttgagtttgctctgaccgccgtggctgaggaggtcaatgccattctgaaagccctccctcaatag

SEQ ID NO: 132673 - DNA, 3048 bp, Artificial Sequence
  derived and/or modified sequence
atgggcccacccctacctctcttgttactcctgctgcttcttctgccaccccgagtcctgcccgcagctccttcttctgtgcccagggggcgacagttacctggacgcctcgggtgcctcctggaggagggtctttgtggagcctctgaggcctgcgtcaatgatggcgtgtttgggaggtgccagaaagtacccgcaatggatttctatagatatgaggtctcccccgtggcgctgcagaggcttagagtggcattgcagaagctttctggcaccggcttcacctggcaggacgattacacacagtacgtcatggaccaagagctggccgacctacccaagacatacttaaggaggccagaggcatccagtccagctagaccgtctaagcattccgtcggttcagaacgccgatatagccgggagggaggtgccgctttggccaacgcccttcgacgccatttgccctttctggaagctctgagccaggcaccagcttcagatgtgttggccagaactcataccgcacaggataggcctccagcagaaggggacgaccgtttcagtgaaagcatccttacatacgttgcacacacctccgccctgacttatcctccaggcagccgcacacaattgcgcgaagatctgctaccccgtacattgggccagttgcagcccgacgagttgagccccaaagtcgactcaggcgtcgacaggcatcaccttatggccgcactttccgcctacgcagcgcagcgcccacccgcaccgcctggggagggatccctagaaccccaataccttttgcgggcacctagtcggatgccccgaccacttctggctcctgctgcacctcagaaatggccctcacctcttggcgactctgaggatcccagctcgactggtgatggggctagaattcacactctactgaaggacctacagagacagccagccgaagttcgcggtttaagcgggctggaacttgatgggatggcagagctgatggccggactcatgcaaggagtagatcacggtgtggctcggggatcccctgggagggccgctctcggggagtccggcgagcaggccgacggacccaaagctaccctgcgcggagactccttccccgatgacggagttcaagacgatgacgaccgcctgtatcaggaagtgcaccggctttcagcaaccctgggagggcttctccaggaccacggttcaagactgttacccggagctctgcctttcgcacggcctcttgatatggaaaggaagaaatcagaacaccctgaaagctccctgtctagtgaggaagagaccgctggagtggaaaacgtcaaaagccagacttactcaaaggacctgttgggtcagcagcctcacagcgaaccaggagcagccgcttttggcgagcttcagaaccagatgcctggaccttctaaggaagaacagagccttcccgctggggcacaagaggctctgtccgacggcttacaattggaggtgcagccgagcgaggaggaggcccgaggatacatcgtgaccgatagggacccactcaggcccgaggaggggcgaaggcttgtggaggatgtggcacggctattgcaggtgccctcttcagccttcgccgacgttgaggtcctgggcccagcagtaacattcaaggtgtccgcgaacgtgcagaacgtcacgaccgaagatgtggagaaggccactgtggacaataaagacaagctggaggaaacatcaggtcttaaaatcctgcagacaggggtgggcagtaagtctaaacttaaatttctgcctcctcaagcggaacaagaggactccacaaaatttattgctctgactttggtatcactcgcgtgcatcctgggcgtccttctggcatctggtttgatttactgtcttcgtcatagctcgcagcatcggctcaaagagaaacttagtgggctggggggtgatcccggagcggacgccacggcggcttaccaagagttgtgtaggcagcggatggcaacccgcccacctgaccgtcccgagggccctcatacctctcgtatatccagtgttagcagtcagttctctgatggaccaataccttcaccatcagcgagatcatcggcttcaagctggtctgaggaacctgtgcagtcaaacatggatatcagtacaggacatatgatcctgagctacatggaggaccacttaaaaaataaaaatagactggagaaggagtgggaagccctctgcgcctaccaggctgagcctaacagctcctttgtggctcagcgtgaggaaaacgtccccaagaataggtctctcgcagtcctcacctacgatcactcacgtgtactcctgaaggccgagaactctcacagccatagtgattacatcaacgctagccctatcatggaccatgatccaaggaatcctgcctacattgccacccaaggtcctcttcccgctaccgtcgcggacttctggcaaatggtatgggagagcggatgcgtcgtaatcgtaatgctgactcctttggccgaaaatggggttagacagtgctatcattactggcccgatgaaggttctaacctctaccacatctatgaagtgaatctggtgtctgagcacatttggtgcgaggattttttagtgcggtctttttacctgaagaacctgcaaaccaatgaaactcgtacagtgacacagttccatttcctgtcatggtatgatcgtggcgtccctagcagcagtcgatccttgttggactttcggcgaaaggtaaacaaatgctaccgtgggagatcttgtcccattattgttcattgttctgacggcgcagggaggtccggcacctatgtactgatcgacatggtgcttaataagatggctaagggggctaaagaaattgatatcgcagcaacccttgaacatttgagggatcagcggcctggcatggttcagacgaaggaacagttcgaatttgctctgacggcagtggcagaagaggtaaatgctatcctcaaggccctgcctcaatag

SEQ ID NO: 132674 - DNA, 4706 bp, Artificial Sequence
  derived and/or modified sequence
ggccgcggggatggggccgccgctcccgctgctgctgctgctactgctgctgctgccgccacgcgtcctgcctgccgccccttcgtccgtcccccgcggccggcagctcccggggcgtctgggctgcctgctcgaggagggcctctgcggagcgtccgaggcctgtgtgaacgatggagtgtttggaaggtgccagaaggttccggcaatggacttttaccgctacgaggtgtcgcccgtggccctgcagcgcctgcgcgtggcgttgcagaagctttccggcacaggtttcacgtggcaggatgactatactcagtatgtgatggaccaggaacttgcagacctcccgaaaacctacctgaggcgtcctgaagcatccagcccagccaggccctcaaaacacagcgttggcagcgagaggaggtacagtcgggagggcggtgctgccctggccaacgccctccgacgccacctgcccttcctggaggccctgtcccaggccccagcctcagacgtgctcgccaggacccatacggcgcaggacagaccccccgctgagggtgatgaccgcttctccgagagcatcctgacctatgtggcccacacgtctgcgctgacctaccctcccgggtcccggacccagctccgcgaggacctcctgccgcggaccctcggccagctccagccagatgagctcagccctaaggtggacagtggtgtggacagacaccatctgatggcggccctcagtgcctatgctgcccagaggcccccagctccccccggggagggcagcctggagccacagtaccttctgcgtgcaccctcaagaatgcccaggcctttgctggcaccagccgccccccagaagtggccttcacctctgggagattccgaagacccctccagcacaggcgatggagcacggattcataccctcctgaaggacctgcagaggcagccggctgaggtgaggggcctgagtggcctggagctggacggcatggctgagctgatggctggcctgatgcaaggcgtggaccatggagtagctcgaggcagccctgggagagcggccctgggagagtctggagaacaggcggatggccccaaggccaccctccgtggagacagctttccagatgacggagtgcaggacgacgatgatagactttaccaagaggtccatcgtctgagtgccacactcgggggcctcctgcaggaccacgggtctcgactcttacctggagccctcccctttgcaaggcccctcgacatggagaggaagaagtccgagcaccctgagtcttccctgtcttcagaagaggagactgccggagtggagaacgtcaagagccagacgtattccaaagatctgctggggcagcagccgcattcggagcccggggccgctgcgtttggggagctccaaaaccagatgcctgggccctcgaaggaggagcagagccttccagcgggtgctcaggaggccctcagcgacggcctgcaattggaggtccagccttccgaggaagaggcgcggggctacatcgtgacagacagagaccccctgcgccccgaggaaggaaggcggctggtggaggacgtcgcccgcctcctgcaggtgcccagcagtgcgttcgctgacgtggaggttctcggaccagcagtgaccttcaaagtgagcgccaatgtccaaaacgtgaccactgaggatgtggagaaggccacagttgacaacaaagacaaactggaggaaacctctggactgaaaattcttcaaaccggagtcgggtcgaaaagcaaactcaagttcctgcctcctcaggcggagcaagaagactccaccaagttcatcgcgctcaccctggtctccctcgcctgcatcctgggcgtcctcctggcctctggcctcatctactgcctccgccatagctctcagcacaggctgaaggagaagctctcgggactagggggcgacccaggtgcagatgccactgccgcctaccaggagctgtgccgccagcgtatggccacgcggccaccagaccgacctgagggcccgcacacgtcacgcatcagcagcgtctcatcccagttcagcgacgggccgatccccagcccctccgcacgcagcagcgcctcatcctggtccgaggagcctgtgcagtccaacatggacatctccaccggccacatgatcctgtcctacatggaggaccacctgaagaacaagaaccggctggagaaggagtgggaagcgctgtgcgcctaccaggcggagcccaacagctcgttcgtggcccagagggaggagaacgtgcccaagaaccgctccctggccgtgctgacctatgaccactcccgggtcctgctgaaggcggagaacagccacagccactcagactacatcaacgctagccccatcatggatcacgacccgaggaaccccgcgtacatcgccacccagggaccgctgcccgccaccgtggctgacttttggcagatggtgtgggagagcggctgcgtggtgatcgtcatgctgacacccctcgcggagaacggcgtccggcagtgctaccactactggccggatgaaggctccaatctctaccacatctatgaggtgaacctggtctccgagcacatctggtgtgaggacttcctggtgaggagcttctatctgaagaacctgcagaccaacgagacgcgcaccgtgacgcagttccacttcctgagttggtatgaccgaggagtcccttcctcctcaaggtccctcctggacttccgcagaaaagtaaacaagtgctacaggggccgttcttgtccaataattgttcattgcagtgacggtgcaggccggagcggcacctacgtcctgatcgacatggttctcaacaagatggccaaaggtgctaaagagattgatatcgcagcgaccctggagcacttgagggaccagagacccggcatggtccagacgaaggagcagtttgagttcgcgctgacagccgtggctgaggaggtgaacgccatcctcaaggcccttccccagtgagcggcagcctcaggggcctcaggggagcccccaccccacggatgttgtcaggaatcatgatctgactttaattgtgtgtcttctattataactgcatagtaatagggcccttagctctcccgtagtcagcgcagtttagcagttaaaagtgtatttttgtttaatcaaacaataataaagagagatttgtggaaaaatccagttacgggtggaggggaatcggttcatcaattttcacttgcttaaaaaaaatactttttcttaaagcacccgttcaccttcttggttgaagttgtgttaacaatgcagtagccagcacgttcgaggcggtttccaggaagagtgtgcttgtcatctgccactttcgggagggtggatccactgtgcaggagtggccggggaagctggcagcactcagtgaggccgcccggcacacaaggcacgtttggcatttctctttgagagagtttatcattgggagaagccgcagggacagaactgaacgtcctgcagcttcggggcaagtgagacaatcacagctcctcgctgcgtctccatcaacactgcgccgggtaccatggacggccccgtcagccacacctgtcagcccaagcagagtgattcaggggctccccgggggcagacacctgtgcaccccatgagtagtgcccacttgaggctggcactcccctgacctcacctttgcaaagttacagatgcaccccaacattgagatgtgtttttaatgttaaaatattgatttctacgttatgaaaacagatgcccccgtgaatgcttacctgtgagataaccacaaccaggaagaacaaatctgggcattgagcaagctatgagggtccccgggagcacacgaaccctgccaggcccccgctggctcctccaggcacgtcccggacctgtggggccccagagaggggacatttccctcctgggagagaaggagatcagggcaactcggagagggctgcgagcatttccctcccgggagaggagatcagggcgacctgcacgcactgcgtagagcctggaagggaagtgagaaaccagccgaccggccctgcccctcttcccgggatcacttaatgaaccacgtgttttgacatcatgtaaacctaagcacgtagagatgattcggatttgacaaaataacatttgagtatccgattcgccatcaccccctaccccagaaataggacaattcacttcattgaccaagatgatcacatggaaggcggcacagaggcagctgtgtgggctgcagatttcctgtgtggggttcagcgtagaaaacgcacctccatcccgcccttcccacagcattcctccatcttagatagatggtactctccaaaggccctaccagagggaacacggcctactgagcggacagaatgatgccaaaatattgcttatgtctctacatggtattgtaatgaatatctgctttaatatagctatcatttcttttccaaaattacttctctctatctggaatttaattaatcgaaatgaatttatctgaatataggaagcatatgcctacttgtaatttctaactccttatgtttgaagagaaacctccggtgtgagatatacaaatatatttaattgtgtcatattaaacttc

SEQ ID NO: 132675 - DNA, 3048 bp, Artificial Sequence
  derived and/or modified sequence
atgggcccccccctgcccctgctgctgctgctgctgctgctgctgccccccagagtgctgcccgccgcccccagcagcgtgcccagaggcagacagctgcccggcagactgggctgcctgctggaggagggcctgtgcggcgccagcgaggcctgcgtgaacgacggcgtgttcggcagatgccagaaggtgcccgccatggacttctacagatacgaggtgagccccgtggccctgcagagactgagagtggccctgcagaagctgagcggcaccggcttcacctggcaggacgactacacccagtacgtgatggaccaggagctggccgacctgcccaagacctacctgagaagacccgaggccagcagccccgccagacccagcaagcacagcgtgggcagcgagagaagatacagcagagagggcggcgccgccctggccaacgccctgagaagacacctgcccttcctggaggccctgagccaggcccccgccagcgacgtgctggccagaacccacaccgcccaggacagaccccccgccgagggcgacgacagattcagcgagagcatcctgacctacgtggcccacaccagcgccctgacctacccccccggcagcagaacccagctgagagaggacctgctgcccagaaccctgggccagctgcagcccgacgagctgagccccaaggtggacagcggcgtggacagacaccacctgatggccgccctgagcgcctacgccgcccagagaccccccgccccccccggcgagggcagcctggagccccagtacctgctgagagcccccagcagaatgcccagacccctgctggcccccgccgccccccagaagtggcccagccccctgggcgacagcgaggaccccagcagcaccggcgacggcgccagaatccacaccctgctgaaggacctgcagagacagcccgccgaggtgagaggcctgagcggcctggagctggacggcatggccgagctgatggccggcctgatgcagggcgtggaccacggcgtggccagaggcagccccggcagagccgccctgggcgagagcggcgagcaggccgacggccccaaggccaccctgagaggcgacagcttccccgacgacggcgtgcaggacgacgacgacagactgtaccaggaggtgcacagactgagcgccaccctgggcggcctgctgcaggaccacggcagcagactgctgcccggcgccctgcccttcgccagacccctggacatggagagaaagaagagcgagcaccccgagagcagcctgagcagcgaggaggagaccgccggcgtggagaacgtgaagagccagacctacagcaaggacctgctgggccagcagccccacagcgagcccggcgccgccgccttcggcgagctgcagaaccagatgcccggccccagcaaggaggagcagagcctgcccgccggcgcccaggaggccctgagcgacggcctgcagctggaggtgcagcccagcgaggaggaggccagaggctacatcgtgaccgacagagaccccctgagacccgaggagggcagaagactggtggaggacgtggccagactgctgcaggtgcccagcagcgccttcgccgacgtggaggtgctgggccccgccgtgaccttcaaggtgagcgccaacgtgcagaacgtgaccaccgaggacgtggagaaggccaccgtggacaacaaggacaagctggaggagaccagcggcctgaagatcctgcagaccggcgtgggcagcaagagcaagctgaagttcctgcccccccaggccgagcaggaggacagcaccaagttcatcgccctgaccctggtgagcctggcctgcatcctgggcgtgctgctggccagcggcctgatctactgcctgagacacagcagccagcacagactgaaggagaagctgagcggcctgggcggcgaccccggcgccgacgccaccgccgcctaccaggagctgtgcagacagagaatggccaccagaccccccgacagacccgagggcccccacaccagcagaatcagcagcgtgagcagccagttcagcgacggccccatccccagccccagcgccagaagcagcgccagcagctggagcgaggagcccgtgcagagcaacatggacatcagcaccggccacatgatcctgagctacatggaggaccacctgaagaacaagaacagactggagaaggagtgggaggccctgtgcgcctaccaggccgagcccaacagcagcttcgtggcccagagagaggagaacgtgcccaagaacagaagcctggccgtgctgacctacgaccacagcagagtgctgctgaaggccgagaacagccacagccacagcgactacatcaacgccagccccatcatggaccacgaccccagaaaccccgcctacatcgccacccagggccccctgcccgccaccgtggccgacttctggcagatggtgtgggagagcggctgcgtggtgatcgtgatgctgacccccctggccgagaacggcgtgagacagtgctaccactactggcccgacgagggcagcaacctgtaccacatctacgaggtgaacctggtgagcgagcacatctggtgcgaggacttcctggtgagaagcttctacctgaagaacctgcagaccaacgagaccagaaccgtgacccagttccacttcctgagctggtacgacagaggcgtgcccagcagcagcagaagcctgctggacttcagaagaaaggtgaacaagtgctacagaggcagaagctgccccatcatcgtgcactgcagcgacggcgccggcagaagcggcacctacgtgctgatcgacatggtgctgaacaagatggccaagggcgccaaggagatcgacatcgccgccaccctggagcacctgagagaccagagacccggcatggtgcagaccaaggagcagttcgagttcgccctgaccgccgtggccgaggaggtgaacgccatcctgaaggccctgccccagtag

SEQ ID NO: 132676 - protein, 1188 aa, Artificial Sequence
  derived and/or modified sequence
MGHLPTGIHGARRLLPLLWLFVLFKNATAFHVTVQDDNNIVVSLEASDVISPASVYVVKITGESKNYFFEFEEFNSTLPPPVIFKASYHGLYYIITLVVVNGNVVTKPSRSITVLTKPLPVTSVSIYDYKPSPETGVLFEIHYPEKYNVFTRVNISYWEGKDFRTMLYKDFFKGKTVFNHWLPGMCYSNITFQLVSEATFNKSTLVEYSGVSHEPKQHRTAPYPPQNISVRIVNLNKNNWEEQSGNFPEESFMRSQDTIGKEKLFHFTEETPEIPSGNISSGWPDFNSSDYETTSQPYWWDSASAAPESEDEFVSVLPMEYENNSTLSETEKSTSGSFSFFPVQMILTWLPPKPPTAFDGFHIHIEREENFTEYLMVDEEAHEFVAELKEPGKYKLSVTTFSSSGSCETRKSQSAKSLSFYISPSGEWIEELTEKPQHVSVHVLSSTTALMSWTSSQENYNSTIVSVVSLTCQKQKESQRLEKQYCTQVNSSKPIIENLVPGAQYQVVIYLRKGPLIGPPSDPVTFAIVPTGIKDLMLYPLGPTAVVLSWTRPYLGVFRKYVVEMFYFNPATMTSEWTTYYEIAATVSLTASVRIANLLPAWYYNFRVTMVTWGDPELSCCDSSTISFITAPVAPEITSVEYFNSLLYISWTYGDDTTDLSHSRMLHWMVVAEGKKKIKKSVTRNVMTAILSLPPGDIYNLSVTACTERGSNTSMLRLVKLEPAPPKSLFAVNKTQTSVTLLWVEEGVADFFEVFCQQVGSSQKTKLQEPVAVSSHVVTISSLLPATAYNCSVTSFSHDSPSVPTFIAVSTMVTEMNPNVVVISVLAILSTLLIGLLLVTLIILRKKHLQMARECGAGTFVNFASLERDGKLPYNWSKNGLKKRKLTNPVQLDDFDAYIKDMAKDSDYKFSLQFEELKLIGLDIPHFAADLPLNRCKNRYTNILPYDFSRVRLVSMNEEEGADYINANYIPGYNSPQEYIATQGPLPETRNDFWKMVLQQKSQIIVMLTQCNEKRRVKCDHYWPFTEEPIAYGDITVEMISEEEQDDWACRHFRINYADEMQDVMHFNYTAWPDHGVPTANAAESILQFVHMVRQQATKSKGPMIIHCSAGVGRTGTFIALDRLLQHIRDHEFVDILGLVSEMRSYRMSMVQTEEQYIFIHQCVQLMWMKKKQQFCISDVIYENVSKS

SEQ ID NO: 132677 - protein, 377 aa, Artificial Sequence
  derived and/or modified sequence
MVTEMNPNVVVISVLAILSTLLIGLLLVTLIILRKKHLQMARECGAGTFVNFASLERDGKLPYNWSKNGLKKRKLTNPVQLDDFDAYIKDMAKDSDYKFSLQFEELKLIGLDIPHFAADLPLNRCKNRYTNILPYDFSRVRLVSMNEEEGADYINANYIPGYNSPQEYIATQGPLPETRNDFWKMVLQQKSQIIVMLTQCNEKRRVKCDHYWPFTEEPIAYGDITVEMISEEEQDDWACRHFRINYADEMQDVMHFNYTAWPDHGVPTANAAESILQFVHMVRQQATKSKGPMIIHCSAGVGRTGTFIALDRLLQHIRDHEFVDILGLVSEMRSYRMSMVQTEEQYIFIHQCVQLMWMKKKQQFCISDVIYENVSKS

SEQ ID NO: 132678 - DNA, 3567 bp, Artificial Sequence
  derived and/or modified sequence
atgggccacctgcctaccggcattcacggggcccgcagacttttgcctcttctctggctctttgttctattcaagaacgctacagctttccatgtgacggtgcaggatgataacaacatcgtggtctcccttgaggcgagcgacgtgatatccccggcgtccgtttacgtagtgaaaattaccggagagagtaaaaattactttttcgagttcgaagaattcaactctactctccctccacctgttatcttcaaagcttcttaccatggactatactacatcattactctggtggttgtcaatggcaatgttgtgacgaagcccagtaggtccataacagtgctgacaaagccccttccagtgacttcagtcagcatttatgactacaagccctcccctgaaaccggcgtgctgttcgagattcactacccagagaagtataacgtatttacgagagtgaatatcagttactgggaaggaaaagattttcggaccatgctttacaaggacttcttcaaaggaaaaactgtgtttaaccactggctgccaggcatgtgctatagtaatataaccttccaactggtgagtgaggccaccttcaacaaaagtaccctcgtagagtatagtggcgtgagccacgaacccaagcagcaccgtaccgcgccctacccgccgcagaacatcagcgtaaggatagtcaatctgaataagaataactgggaagagcagtccgggaacttcccggaggagtcattcatgcgttcccaggataccataggaaaagagaaactcttccatttcactgaagagaccccagaaattccgtcaggaaatatctcaagcggatggccagattttaatagtagtgattatgaaacaacctcccaaccctattggtgggactccgcttccgcagctcctgagtccgaggatgagttcgtgagtgtgttaccgatggaatacgaaaataactctacactgagtgaaaccgaaaaaagcaccagtggctctttttcattttttcctgtgcagatgatcctgacttggttgccccctaagccccctactgcattcgacggctttcatatccacattgaacgcgaagagaattttaccgagtaccttatggtcgacgaggaggcccacgagtttgtcgcagagttaaaggagcctgggaaatataaactttccgttaccactttcagctcaagcggatcatgcgagactcgcaaatcacagagtgctaagagcttgagcttttatatttctcctagtggcgagtggatcgaggaactcacagagaagccacagcacgtctctgtgcacgtgctgagctctaccaccgctctcatgtcctggactagttctcaggagaattataacagcactatagtaagtgtcgtgtctctgacttgccagaagcagaaagagtcccagcggctggagaaacagtactgcactcaggtcaattcttcaaaaccgattatcgagaacctcgtgccaggcgcccaatatcaagttgttatctatcttcggaaaggtcccctgatcggccccccctctgacccggtgaccttcgctattgtgcctactggtattaaagatttgatgctctatcctcttggtcctacggcggtggtgttgagttggactagaccgtacctgggtgtgttcagaaaatacgtagttgagatgttctactttaaccctgctacaatgacctctgagtggactacatactatgaaatcgccgccacggtgagtctcaccgcatctgtgaggatagcaaacttgttacctgcttggtactataactttagagtgacaatggtaacttggggggaccctgaattaagctgctgtgactcttctactatcagcttcataacggcccccgtggcacctgagatcacctctgtcgagtatttcaattctctcctgtatattagctggacttatggtgacgacactacggatctgtcacatagccgaatgttgcactggatggtcgtcgccgaaggtaaaaagaagataaaaaagagtgtgacccgaaacgtgatgactgccattctatctctgcctccaggcgatatctataacttgagtgtgactgcatgtacagaacggggtagcaatacatctatgttacgcttggtcaagctggagcctgccccgcccaaatctttgtttgccgtgaataaaacccagacatctgtaacccttttatgggtcgaggaaggggtggcggatttctttgaggtcttctgccagcaggttggcagcagccagaaaacaaaactgcaagaaccagtggcagtatccagccatgtcgtgaccataagctctttgctgccagctaccgcctacaactgctccgtgacatcgtttagtcacgacagcccttctgtgcctacattcatcgcggtcagtactatggtgaccgagatgaatccaaatgtagtcgttatatctgtccttgctattctgtccactctgctaattggcttattgctggttactctcatcatcttaagaaagaagcatctgcagatggccagggaatgcggggccggcaccttcgtgaacttcgccagtcttgagagagatggaaagctaccatacaattggtccaaaaacgggcttaagaaaaggaagctcacaaacccagtccagcttgacgacttcgacgcctatataaaagatatggccaaagacagcgactataaattcagcctgcagtttgaggagctcaagctgattgggttggacatccctcattttgctgccgatctgccccttaatcgctgcaagaatagatacaccaatatccttccttatgacttttccagggtgcgattagtgtctatgaatgaagaagaaggagctgactatatcaatgcaaactatatcccagggtataactctccccaggaatacatagctactcagggccccctgcctgaaacacgtaacgacttttggaagatggtcctacaacagaagagccaaatcattgtcatgctgactcaatgcaacgagaaacggcgcgtcaagtgtgatcactattggcccttcaccgaagagcccatagcttacggggacataacagttgaaatgataagcgaggaggaacaggatgattgggcgtgcagacactttcggatcaattatgcggatgaaatgcaggacgtgatgcactttaactacaccgcttggccagatcacggggtgccaactgcaaacgctgccgaaagtatcctgcagtttgttcatatggtacgacagcaagctaccaagtccaaaggacctatgattattcactgttctgcaggagtgggaagaactggtacctttatcgctttagataggttgttacaacacataagggaccacgaatttgtagatatcctgggtctcgtctctgagatgcgatcatatcgaatgagcatggtgcagacagaagagcagtatatctttattcaccagtgcgtgcagcttatgtggatgaaaaaaaaacagcaattctgtatttcagacgtgatttatgagaacgtgtcgaagagttag

SEQ ID NO: 132679 - DNA, 3567 bp, Artificial Sequence
  derived and/or modified sequence
atgggccacctgcccaccggcatccatggagcccggcggctgctgcccctgctgtggctgtttgtgctcttcaagaatgccacagccttccacgtgacagtgcaggatgacaacaacatcgtggtgtccctggaggccagtgatgtgatcagccctgcctctgtgtatgtggtgaagatcactggagagagcaagaactacttctttgaatttgaggagttcaacagcaccctgcccccacctgtgatcttcaaggccagctaccacggcctgtactacatcatcaccctggtggtggtgaatggaaatgtggtgaccaagcccagccgcagcatcaccgtgctgaccaagcccctgcctgtgacctctgtgtccatctatgactacaagcccagccctgagactggagtgctgtttgagatccactacccagagaagtacaacgtgttcaccagggtgaacatctcctactgggagggcaaggacttccgcaccatgctgtacaaggacttcttcaagggcaagacagtgttcaaccactggctgcccggcatgtgctacagcaacatcaccttccagctggtgtctgaggccaccttcaacaagagcaccctggtggagtacagcggcgtgtcccatgagcccaagcagcacaggacagccccctacccaccccagaacatctctgtgcgcatcgtgaacctgaacaagaacaactgggaggagcagagcggcaacttccctgaggagagcttcatgaggagccaggacaccatcggcaaggagaagctgttccacttcacagaggagaccccagagatccccagcggcaacatcagcagcggctggccagacttcaacagcagtgactatgagaccaccagccagccctactggtgggacagcgccagcgctgcccctgagagtgaagatgaatttgtgtctgtgctgcccatggagtatgagaacaacagcaccctgtctgaaacagagaagagcaccagcggcagcttctccttcttccctgtgcagatgatcctgacctggctgccccccaagccacccacagcctttgatggcttccacatccacatcgagcgggaggagaacttcacagagtacctgatggtggatgaggaggcccacgagtttgtggccgagctgaaggagcccgggaagtacaagctgtctgtgaccaccttcagcagcagcggcagctgtgagaccaggaagagccagagcgccaagagcctgtccttctacatcagccccagcggggagtggattgaggagctgacagagaagccccagcacgtgtctgtgcacgtgctgagcagcaccacagccctgatgtcctggaccagcagccaggagaactacaacagcaccatcgtgtctgtggtgtccctgacctgccagaagcagaaggagagccagaggctggagaagcagtactgcacccaggtgaacagcagcaagcccatcatcgagaacctggtgcctggggcccagtaccaggtggtgatctacctgaggaagggccccctgattggccccccaagtgaccctgtgacctttgccatcgtgcccaccggcatcaaggacctgatgctgtaccccctgggccccacagctgtggtgctgtcctggacccggccctacctgggcgtcttcagaaaatatgtggtggagatgttctacttcaacccagccaccatgaccagcgagtggaccacctactatgaaattgctgccaccgtgtccctgacagcctctgtgagaattgccaacctgctgcctgcctggtactacaacttccgggtgaccatggtgacctggggagaccctgagctgagctgctgtgacagcagcaccatctccttcatcacagcccctgtggcccctgagatcacctctgtggagtacttcaacagcctgctgtacatctcctggacctatggagatgacaccacagacctgagccacagcaggatgctgcactggatggtggtggccgagggcaagaagaagatcaagaagtctgtgaccagaaatgtgatgacagccatcctgagcctgcccccaggggacatctacaacctgtctgtgacagcctgcacagagcggggcagcaacacctccatgctgcggctggtgaagctggagcccgccccacccaagagcctgtttgctgtgaacaagacccagacctctgtgaccctgctgtgggtggaggagggcgtggccgacttctttgaggtgttctgccagcaggtgggcagcagccagaagaccaagctgcaggagcctgtggccgtgagcagccacgtggtgaccatcagcagcctgctgcctgccacagcctacaactgcagcgtgaccagcttcagccatgacagccccagcgtgcccaccttcatcgctgtgtccaccatggtgacagagatgaaccccaacgtggtggtgatctctgtgctggccatcctgagcaccctgctgattggcctgctgctggtgaccctcatcatcctgaggaagaagcacctgcagatggcccgggagtgtggggccggcacctttgtgaactttgccagcctggagagagatggcaagctgccctacaactggagcaagaatggcctgaagaagaggaagctgaccaaccctgtgcagctggatgactttgatgcctacatcaaggacatggccaaggacagcgactacaagttcagcctgcagtttgaggagctgaagctgattggcctggacatcccccactttgctgctgacctgcccctgaaccgctgcaagaaccgctacaccaacatcctgccctatgacttcagccgggtgcggctggtgtccatgaatgaggaggagggcgctgactacatcaatgccaactacatccctggctacaacagcccccaggagtacatcgccacccagggccccctgcctgagaccagaaatgacttctggaagatggtgctgcagcagaagagccagatcatcgtgatgctgacccagtgcaatgagaagagaagagtgaagtgtgaccactactggcccttcacagaggagcccatcgcctacggggacatcaccgtggagatgatcagcgaggaggagcaggatgactgggcctgccgccacttccgcatcaactatgcagatgagatgcaggatgtgatgcacttcaactacacagcctggccagaccatggagtgcccacagccaatgctgctgagagcatcctgcagtttgtgcacatggtgcggcagcaggccaccaagagcaagggccccatgatcatccactgcagcgctggggtgggccgcacaggcaccttcatcgccctggaccggctgctgcagcacatccgggaccatgaatttgtggacatcctgggcctggtgtctgagatgaggagctacaggatgtccatggtgcagacagaggagcagtacatcttcatccaccagtgtgtgcagctgatgtggatgaagaagaagcagcagttctgcatcagtgatgtgatctatgaaaatgtgtccaagagctag

SEQ ID NO: 132680 - DNA, 3567 bp, Artificial Sequence
  derived and/or modified sequence
atgggccacctgcccaccggcatccacggcgcccggcggctgctgcctctcctgtggcttttcgtgctgttcaaaaacgccaccgcattccacgtaaccgtccaggatgataacaacattgtcgtcagcctggaggcctcagatgttatctcccctgcaagcgtatacgtggtgaaaattacaggcgagtctaagaactactttttcgagttcgaagagttcaactccactctgccaccgcccgtgatctttaaggcctcataccacgggctatactacatcattactcttgtggttgtgaacggcaacgtggtgactaagccatccagatctattaccgtgctgacaaagccacttcctgtgactagtgtgtcaatctatgattataagccaagtcctgagacaggcgtcctcttcgaaattcactatcctgagaagtataatgttttcacaagagtgaacatatcttactgggaggggaaagacttccgtacaatgctgtacaaagacttcttcaaagggaaaaccgtcttcaaccactggttgccgggtatgtgctattccaacatcaccttccagttggtgtctgaagccacttttaacaagagcaccctggtggaatactctggagtgagtcacgagccgaaacagcacaggaccgccccctacccaccacagaatatatctgtgcgcatcgtgaacctgaataagaataactgggaggaacaatctggtaacttcccagaggaatcctttatgcggagtcaggataccatcggaaaagaaaaacttttccattttactgaggaaacccccgagatcccatcgggtaacattagcagcgggtggcccgattttaacagcagtgactacgagaccacttcgcagccatactggtgggacagcgcctccgccgcccctgaaagtgaagatgagttcgtttctgtattgcccatggaatatgagaataattcaactctgagtgaaaccgaaaagtctaccagtggaagcttcagtttctttccagtccagatgatcctgacttggcttccccctaagccacctacagccttcgacggcttccatattcacatagaacgtgaggagaatttcaccgaatatctgatggttgacgaggaagctcacgagtttgttgctgagctcaaggaacccggtaaatacaaactgtccgtgactacatttagctcgtctggctcctgcgaaacacggaaatcccaaagcgcaaaatccttgtccttctacatcagcccttccggcgagtggattgaagaactgaccgagaaacctcaacacgtgtccgtccacgtgctgagttcaacgactgccctcatgtcatggacgagtagccaggaaaactacaactccacgatcgtgtccgttgtctctctgacctgtcaaaagcagaaagagagtcagcggctggaaaagcagtattgcacacaagtgaatagttccaagcccattatcgagaacctcgtgcctggggctcaatatcaggttgtcatttatctccggaaaggcccgctgattggcccaccaagcgacccagtgacttttgcaatcgtgccaacaggcattaaggacttaatgctttaccccttggggccaaccgcagtggtgttgtcttggaccaggccctatctaggggtatttcgtaagtatgtagttgagatgttctactttaatccggcaactatgacttcagagtggactacatattacgaaatcgcagcaacggtgagtctaaccgcttccgtccgtattgccaacctgctccccgcatggtattacaacttccgcgtgactatggtgacctggggggacccagaactttcttgttgcgactcctccacaatatcatttatcactgcgccagtcgcaccggagatcacaagtgtagagtattttaatagcctgctttacatatcttggacctacggagacgacactacggacttgtctcattcccggatgctgcactggatggtggtcgccgagggaaagaagaagattaaaaaaagtgtgactcgtaatgtgatgacagcaatcttgagtctgcccccaggcgacatttacaacctgtcagtgacagcctgcacagagcggggatctaatacatctatgctgagactggttaagttagagcccgcgcccccaaaatctcttttcgctgttaataagacccagactagtgttaccctgctctgggtcgaggagggtgtggccgatttcttcgaagtgttttgccagcaagtgggcagctcgcagaaaaccaaactccaggaacccgtggcagtatcatcccatgtagtgacaattagcagcctgctccctgcaacagcttataactgcagtgtgacctccttctcacacgacagcccgtccgtcccaacgttcatcgcagtctcaacgatggttacggagatgaatcccaacgtcgtggttatcagtgtattagccatactgtcgacactgctcataggactgttactcgtcactttaatcattttgcgtaagaaacacctccagatggccagggagtgtggcgctggcactttcgtaaacttcgccagcttagaacgggacggcaagctgccttacaactggtctaagaacgggctcaagaagaggaagttaactaacccggtgcaattggacgatttcgatgcatatatcaaggacatggctaaagactctgactacaagttctccctgcagtttgaagagctcaagctgattgggctcgacataccacattttgctgctgatcttcctcttaaccgctgtaagaaccgttatactaacattctcccatacgatttcagtcgcgtgagactggtttcaatgaatgaggaagagggggctgactacataaatgcaaattatatacccggatacaatagtcctcaggagtatattgctacccaggggcctcttcccgagacgcgaaacgacttctggaaaatggtgcttcagcagaagtcccagatcattgtaatgctcacacagtgcaatgagaaacgtcgggtaaaatgcgaccactattggccttttaccgaggagcccattgcttatggagatatcaccgtggaaatgatttcggaggaggagcaggacgattgggcctgccgacatttcagaatcaactacgctgatgaaatgcaagatgtgatgcactttaattacacagcgtggcccgaccatggagtaccaaccgccaatgctgccgaaagtattctccagttcgtccacatggtgaggcagcaagcaactaaatccaaaggtcccatgatcatccactgctctgctggggtgggcaggaccgggactttcattgctctcgatcgtctccttcaacatataagagaccatgagttcgtggatatccttgggttagtgtccgaaatgaggagctaccgtatgtcaatggtgcagaccgaggaacagtacattttcattcaccagtgcgtgcagctcatgtggatgaagaagaagcaacagttttgcatcagcgacgtgatctacgagaacgtctctaagagctag

SEQ ID NO: 132681 - DNA, 3567 bp, Artificial Sequence
  derived and/or modified sequence
atgggccatttacctacaggcattcatggcgctaggcgcctgttgcccctgttgtggcttttcgtgctttttaagaacgctacagcctttcacgtcactgtgcaagacgacaataacatagtcgtttccctcgaagcctctgacgtgataagccccgcttcagtatatgtggtcaagatcaccggcgagagtaagaactatttttttgaatttgaggaatttaactctactcttcctccacccgtgatctttaaggcttcgtatcacggcctttactacattatcaccttggtcgtagtgaatggcaatgtggtgaccaaaccttcccgatcaatcacggtactgaccaagccactgccggttacatctgtgtctatttatgactacaaaccatcacctgagaccggtgtcctctttgagatccattaccccgaaaaatataacgtcttcacccgggtgaacatctcttactgggaaggcaaagacttccggacaatgctctacaaggacttttttaaggggaagacagtttttaatcattggcttcccggaatgtgctactcaaacattacttttcagctggtctccgaggctacgttcaacaagtccaccttggtcgagtactccggggtgagccacgaacctaagcaacacaggacagcaccatatcctcctcagaacatcagtgtgagaattgttaacttgaataagaataactgggaagagcagtcagggaactttccggaggaaagtttcatgaggagtcaggatacaatcggtaaggagaaacttttccacttcacagaggaaaccccagagatcccatcgggcaatattagttctggatggcccgatttcaattcttctgattacgagaccacgtctcagccctactggtgggactccgccagcgctgccccagagtccgaggatgagttcgtgtccgtactgcctatggagtatgaaaacaactccacgttgtccgaaaccgagaagagcacgtccggttcctttagtttctttcctgtgcagatgatcctgacgtggctcccgcctaaaccacctaccgccttcgatggctttcatatccacatcgagagggaggaaaacttcaccgagtatctaatggttgatgaagaagcccatgagttcgtggctgagctcaaggagccgggaaagtataagctatccgtgaccacattctcgtcctcgggttcatgtgagacccggaagagtcagagtgcaaagtctctcagtttctatatctctccttccggggagtggattgaggagctgactgagaaaccacagcacgtgagtgtccacgtgctctcatccacaacggctctgatgtcctggacttcttcgcaagaaaactacaattccacgattgtctccgtagtctccctgacatgccagaaacaaaaagaaagtcagcgcctcgagaagcagtactgtacacaggtcaattccagtaagcccatcatagaaaatctcgtgccgggagcccagtatcaggtagtgatttatctccggaaagggccattgataggacccccatccgatccagtgaccttcgccatcgtacccacgggcattaaggacctgatgttatatccactgggacccacggcggtcgtgctgtcctggacccgaccctacttgggagttttcagaaagtatgtggtggaaatgttctatttcaaccctgctacgatgacctcggagtggacaacatactacgaaatcgctgctacagtatctctgacagcttcagtcaggatcgccaatctacttcccgcttggtactataattttcgcgtcactatggtgacctggggagacccagagctgagctgttgtgatagtagcaccattagcttcatcacagctcctgtggcacccgagataacatctgtggagtacttcaattctttactctatatttcctggacgtacggcgatgatacgacagatctgagtcactctagaatgttgcactggatggtcgtggccgaggggaaaaaaaaaattaagaaatctgttacaagaaacgtgatgaccgccatcctctctctgccacccggtgatatttacaacctatctgtgactgcttgcacagaaagaggctctaatacctctatgctgagattagtcaagctcgaacccgctccccctaagtcactattcgctgtgaataagactcagacttctgtgacactcctctgggtggaagagggggtggccgatttttttgaagtgttttgtcagcaggtaggctcttctcaaaaaaccaaattgcaagaacccgtggctgtttcctctcacgtggttaccatatcctctctactacctgctacagcttataattgttccgtgacatccttttcgcacgattccccgtcagttcctacctttatagccgtgagtaccatggtgaccgagatgaatccaaatgtggtagttatctccgtactcgctattttatctactctcctcattggcttgctcctcgtgactctcatcatcctgcggaaaaagcatctccagatggccagggagtgcggtgctggaacattcgtaaacttcgcatcactagagcgcgacgggaagctgccctataactggtctaagaacggactgaaaaagcgtaagttgaccaacccagtgcagctggatgacttcgacgcctacattaaagacatggcgaaggacagtgattacaagttcagtctccagtttgaggaattgaagttgattgggttagatatcccacacttcgccgctgacctccctctgaaccgctgcaagaataggtacaccaatattctgccgtatgatttcagtcgcgtgcgcttggtttccatgaacgaagaggaaggagctgactatatcaacgcaaattatatacctggctataattcaccacaggaatatatcgccactcagggcccactgcctgagactagaaatgatttctggaaaatggttctgcagcaaaaatcacagattatcgtcatgctgactcagtgcaacgaaaagcgccgagtgaagtgcgaccactattggccatttacggaggagccaatagcctacggagacattaccgtggagatgatcagcgaagaagaacaggacgactgggcgtgcagacattttagaataaactacgctgatgaaatgcaggacgtcatgcatttcaattatacagcctggccagaccatggagttcccacagcaaacgcggctgaaagtatcctgcagttcgtgcatatggttaggcaacaggctactaagagcaagggtccaatgataattcattgttccgcaggcgtcggtcgcaccggtacctttatcgccctcgatcgcctgttgcaacacatacgggatcatgagttcgtggatattcttggactcgtcagcgagatgaggtcttatcgaatgagcatggttcagaccgaggaacaatacattttcattcatcaatgcgtgcagcttatgtggatgaaaaagaaacaacaattttgtatttccgatgtgatctacgaaaacgtgtccaaaagttag

SEQ ID NO: 132682 - DNA, 5061 bp, Artificial Sequence
  derived and/or modified sequence
gggcgcagaggaggaaagggagcaggcgcagggggactggaaaggcagcatgcgctcgccaggagcaacctcggcgcccagggtctgaggctgcagccccagttcgccattgtgagccgccgccgggggagtccgctagcgcagccgtgcccccgagtccccgtccgcgcagcgatggggcacctgcccacggggatacacggcgcccgccgcctcctgcctctgctctggctctttgtgctgttcaagaatgctacagctttccatgtaactgtccaagatgataataacatcgttgtctcattagaagcttcagacgtcatcagtccagcatctgtgtatgttgtgaagataactggtgaatccaaaaattatttcttcgaatttgaggaattcaacagcactttgcctcctcctgttattttcaaggccagttatcatggcctttattatataatcactctggtagtggtaaatggaaatgtggtgaccaagccatccagatcaatcactgtgttaacaaaacctctacctgtaaccagtgtttccatatatgactataaaccttctcctgaaacaggagtcctgtttgaaatacattatccagaaaaatataacgttttcacaagagtgaacattagctactgggaaggtaaagacttccggacaatgctatataaagatttctttaagggaaaaacagtatttaatcactggctgccaggaatgtgttatagtaatatcacctttcagctggtatctgaggcaacttttaataaaagtacccttgttgagtacagtggtgtcagtcacgaacccaaacagcacagaactgccccttatccacctcaaaatatttccgttcgtatcgtaaacttgaacaaaaacaactgggaagaacagagtggcaatttcccagaagaatccttcatgagatcacaagatacaataggaaaagaaaaactcttccattttacagaagaaacccctgaaattccctcgggcaacatttcttccggttggcctgattttaatagcagtgactatgaaactacgtctcagccatattggtgggacagtgcatctgcagctcctgaaagtgaagatgaatttgtcagcgtacttcccatggaatacgaaaataacagtacactcagtgagacagagaagtcaacatcaggctctttctcctttttccctgtgcaaatgatattgacctggttaccacccaaaccacccactgcttttgatgggttccatatccatattgaacgagaagagaactttactgaatatttgatggtggatgaagaagcacatgaatttgttgcagaactgaaggaacctgggaaatataagttatctgtgacaacctttagttcctcaggatcttgtgaaactcgaaaaagtcagtcagcaaaatcactcagcttttatatcagtccttcaggagagtggattgaagaactgaccgagaagccgcagcacgtgagtgtccacgttttaagctcaaccactgccttgatgtcctggacatcttcccaagagaactacaacagcaccattgtgtctgtggtgtcgctgacctgccagaaacaaaaggagagccagaggcttgaaaagcagtactgcactcaggtgaactcaagcaaacctattattgaaaatctggttcctggtgcccagtaccaggttgtaatatacctaaggaaaggccctttgattggaccaccttcagatcctgtgacatttgctattgttcccacaggaataaaggatttaatgctctatcctttgggtcctacggccgtggttctgagctggaccagaccttatttaggcgtgttcagaaaatacgtggttgaaatgttttatttcaaccctgctacaatgacatcagagtggaccacctactatgaaatagcagcaactgtttccttaactgcatccgtgagaatagctaatctgctgccagcatggtactacaacttccgggttaccatggtgacgtggggagatccagaattgagctgctgtgacagctctaccatcagcttcataacagccccagtggctccggaaatcacttctgtggaatatttcaacagtctgttatatatcagttggacatatggggatgatacaacggacttgtcccattctagaatgcttcactggatggtggttgcagaaggaaaaaagaaaattaaaaagagtgtaacacgcaatgtcatgactgcaattctcagcttgcctccaggcgacatctataacctctcagtaactgcttgtactgaaagaggaagtaatacctccatgctccgccttgtcaagctagaaccagctccacccaaatcactcttcgcagtgaacaaaacccagacttcagtgactttgctgtgggtggaagagggagtagctgatttctttgaagttttctgtcaacaagttggctccagtcagaaaaccaaacttcaggaaccagttgctgtttcttcccatgtcgtgaccatctccagccttcttcctgccactgcctacaattgtagtgtcaccagctttagccatgacagccccagtgtccctacgttcatagccgtctcaacaatggttacagagatgaatcccaatgtggtagtgatctccgtgctggccatccttagcacacttttaattggactgttgcttgttaccctcattattcttaggaaaaagcatctgcagatggctagggagtgtggagctggtacatttgtcaattttgcatccttagagagggatggaaagcttccatacaactggagtaaaaatggtttaaagaagaggaaactgacaaacccggttcaactggatgactttgatgcctatattaaggatatggccaaagactctgactataaattttctcttcagtttgaggagttgaaattgattggactggatatcccacactttgctgcagatcttccactgaatcgatgtaaaaaccgttacacaaacatcctaccatatgacttcagccgtgtgagattagtctccatgaatgaagaggaaggtgcagactacatcaatgccaactatattcctggatacaactcaccccaggagtatattgccacccaggggccactgcctgaaaccagaaatgacttctggaagatggtcctgcaacaaaagtctcagattattgtcatgctcactcagtgtaatgagaaaaggagggtgaaatgtgaccattactggccattcacggaagaacctatagcctatggagacatcactgtggagatgatttcagaggaagagcaggacgactgggcctgtagacacttccggatcaactatgctgacgagatgcaggatgtgatgcattttaactacactgcatggcctgatcatggtgtgcccacagcaaatgctgcagaaagtatcctgcagtttgtacacatggtccgacagcaagctaccaagagcaaaggtcccatgatcattcactgcagtgctggcgtgggacggacaggaacattcattgccctggacaggctcttgcagcacattcgggatcatgagtttgttgacatcttagggctggtgtcagaaatgaggtcataccggatgtctatggtacagacagaggagcagtacatttttatccatcagtgtgtgcaactgatgtggatgaagaagaagcagcagttctgcatcagtgatgtcatatacgagaatgttagcaagtcctagttcagaatccggagcagagaggacatgatgtgcgcccatcctcccttgcttccagattgttttagtgggccctgatggtcatttttctaaacagaggccctgctttgtaatatgtggccaaggagataatttatctcacagaagcaccgggaagacttagccttaaagagcctacagtgtccttttggactctttcacttcgggacatttaataatggaccaaattcaacagaacaccaggaaggtcaagacgctctccaaagggcaggaagtacagcacttccgaagagtttagttggccctttgctggttgggctgagttttttatttttaagtgtttgtttttcagtgcaataatttttgtgtgtgtgtgattcttatcagaaagttgaattgttttctgcctacaccgttcatcagccccataacccaggaaggaacaggcattgttagcatcagattatacctcattattaaaaggaggcatggccacacatgaagaaatggtcattctacttcaaagaaattgagccagcactatctgtactccaacattaccggatctggattggggaggttggtcagggaagagaggggttctacccacagatcaactgtgtaatcttttactattcaagctataattcagcttcaaagtagagtagaaaaaaaattgtcttaactgttctagttcttgatggttttcttccttattaacagttggtgtttcttccttggcccttttggactaatgttactgtccaagttctttctcaagaaaccacatctggttcagaagagtgtcaagttggactctttgaactctgttgctgtctgagcaatcgtggtgcctagactttgcattccttgttctgttgacctgcatacatgtgagagctatttctttaagaactatataggctgtgaaaacgcactttctttcccccaaagagctgggaatttatgaagttatggcaatgaactgcagcatgctgggacaattatttgactacttttttttgtaatattgtcaaatgtctctatggattctgacagagatttctttttgttttgttattcttttggttgtcagtttcattttaacgagtgtaactagtaacattttattctttggattttgtataattacagtacatgattgtgtattgtgacatgaatgctgtcaaaatgacattgatggcattgtgaagcctgttactttgtgtcacttcctgataaataagaggtgatgacatggatatacaacagaaaacactttgagttgaaagtaaacacaagctggctgcttccctgtggcaa
